United States Patent Application Publication US 2007/0214517 A1 - sequence listing, part 28

SEQ ID NO: 33646 - DNA, 1436 bp, Arabidopsis thaliana; identical to SEQ ID NO: 30056
  misc_feature (1)..(1436): Ceres Seq. ID no. 12333640
  misc_feature: MA Experiment ID: 108434 Result: Down-regulated in Transcription
  misc_feature: MA Experiment 108434 PARAMETER Experiment Name: At_Root_Tips_cDNA_P Parameter: Tissue Value: Root Tips
  misc_feature: MA Experiment ID: 108461 Result: Up-regulated in Transcription
  misc_feature: MA Experiment 108461 PARAMETER Experiment Name: At_Germinating_Seeds_cDNA_P Parameter: Age (day) Value: 1 vs. 0
  misc_feature: MA Experiment 108461 PARAMETER Experiment Name: At_Germinating_Seeds_cDNA_P Parameter: Tissue Value: Germinating Seeds
  misc_feature: MA Experiment ID: 108462 Result: Up-regulated in Transcription
  misc_feature: MA Experiment 108462 PARAMETER Experiment Name: At_Germinating_Seeds_cDNA_P Parameter: Age (day) Value: 2 vs. 0
  misc_feature: MA Experiment 108462 PARAMETER Experiment Name: At_Germinating_Seeds_cDNA_P Parameter: Tissue Value: Germinating Seeds
  misc_feature: MA Experiment ID: 108463 Result: Up-regulated in Transcription
  misc_feature: MA Experiment 108463 PARAMETER Experiment Name: At_Germinating_Seeds_cDNA_P Parameter: Age (day) Value: 3 vs. 0
  misc_feature: MA Experiment 108463 PARAMETER Experiment Name: At_Germinating_Seeds_cDNA_P Parameter: Tissue Value: Germinating Seeds
  misc_feature: MA Experiment ID: 108464 Result: Up-regulated in Transcription
  misc_feature: MA Experiment 108464 PARAMETER Experiment Name: At_Germinating_Seeds_cDNA_P Parameter: Age (day) Value: 4 vs. 0
  misc_feature: MA Experiment 108464 PARAMETER Experiment Name: At_Germinating_Seeds_cDNA_P Parameter: Tissue Value: Germinating Seeds
  misc_feature: MA Experiment ID: 108473 Result: Up-regulated in Transcription
  misc_feature: MA Experiment 108473 PARAMETER Experiment Name: At_Drought_Flowers_cDNA_P Parameter: Timepoint (hr) Value: 7 d
  misc_feature: MA Experiment 108473 PARAMETER Experiment Name: At_Drought_Flowers_cDNA_P Parameter: Tissue Value: Flower
  misc_feature: MA Experiment 108473 PARAMETER Experiment Name: At_Drought_Flowers_cDNA_P Parameter: Treatment Value: Drought vs. No Drought
  misc_feature: MA Experiment ID: 108488 Result: Down-regulated in Transcription
  misc_feature: MA Experiment ID: 108501 Result: Down-regulated in Transcription
  misc_feature: MA Experiment 108501 PARAMETER Experiment Name: At_ap2_floral_buds_cDNA_P Parameter: Plant Line Value: ap2 (Ler.)
  misc_feature: MA Experiment 108501 PARAMETER Experiment Name: At_ap2_floral_buds_cDNA_P Parameter: Tissue Value: Closed Flower
  misc_feature: MA Experiment ID: 108595 Result: Up-regulated in Transcription
  misc_feature: MA Experiment 108595 PARAMETER Experiment Name: At_Ler-pi_Ovule_cDNA_P Parameter: Plant Line Value: null
  misc_feature: MA Experiment ID: 108608 Result: Up-regulated in Transcription
  misc_feature: MA Experiment 108608 PARAMETER Experiment Name: At_100uM_ABA_cDNA_P Parameter: Timepoint (hr) Value: 1
  misc_feature: MA Experiment 108608 PARAMETER Experiment Name: At_100uM_ABA_cDNA_P Parameter: Tissue Value: Aerial
  misc_feature: MA Experiment 108608 PARAMETER Experiment Name: At_100uM_ABA_cDNA_P Parameter: Treatment Value: 100uM ABA vs. No Treatment
  misc_feature: MA Experiment ID: 108609 Result: Up-regulated in Transcription
  misc_feature: MA Experiment 108609 PARAMETER Experiment Name: At_100uM_ABA_cDNA_P Parameter: Timepoint (hr) Value: 24
  misc_feature: MA Experiment 108609 PARAMETER Experiment Name: At_100uM_ABA_cDNA_P Parameter: Tissue Value: Aerial
  misc_feature: MA Experiment 108609 PARAMETER Experiment Name: At_100uM_ABA_cDNA_P Parameter: Treatment Value: 100uM ABA vs. No Treatment
  misc_feature: MA Experiment ID: 20000069 Result: Up-regulated in Transcription
  misc_feature: MA Experiment 20000069 PARAMETER Experiment Name: At_100uM_ABA_Mutants_cDNA_P Parameter: Plant Line Value: CS23
  misc_feature: MA Experiment 20000069 PARAMETER Experiment Name: At_100uM_ABA_Mutants_cDNA_P Parameter: Timepoint (hr) Value: 6
  misc_feature: MA Experiment 20000069 PARAMETER Experiment Name: At_100uM_ABA_Mutants_cDNA_P Parameter: Tissue Value: Aerial
  misc_feature: MA Experiment 20000069 PARAMETER Experiment Name: At_100uM_ABA_Mutants_cDNA_P Parameter: Treatment Value: 100uM ABA vs. No Treatment
  misc_feature: MA Experiment ID: 20000070 Result: Up-regulated in Transcription
  misc_feature: MA Experiment 20000070 PARAMETER Experiment Name: At_100uM_ABA_Mutants_cDNA_P Parameter: Plant Line Value: CS24
  misc_feature: MA Experiment 20000070 PARAMETER Experiment Name: At_100uM_ABA_Mutants_cDNA_P Parameter: Timepoint (hr) Value: 6
  misc_feature: MA Experiment 20000070 PARAMETER Experiment Name: At_100uM_ABA_Mutants_cDNA_P Parameter: Tissue Value: Aerial
  misc_feature: MA Experiment 20000070 PARAMETER Experiment Name: At_100uM_ABA_Mutants_cDNA_P Parameter: Treatment Value: 100uM ABA vs. No Treatment
  misc_feature: MA Experiment ID: 20000071 Result: Up-regulated in Transcription
  misc_feature: MA Experiment 20000071 PARAMETER Experiment Name: At_100uM_ABA_Mutants_cDNA_P Parameter: Plant Line Value: CS8104
  misc_feature: MA Experiment 20000071 PARAMETER Experiment Name: At_100uM_ABA_Mutants_cDNA_P Parameter: Timepoint (hr) Value: 6
  misc_feature: MA Experiment 20000071 PARAMETER Experiment Name: At_100uM_ABA_Mutants_cDNA_P Parameter: Tissue Value: Aerial
  misc_feature: MA Experiment 20000071 PARAMETER Experiment Name: At_100uM_ABA_Mutants_cDNA_P Parameter: Treatment Value: 100uM ABA vs. No Treatment
  misc_feature: MA Experiment ID: 20000086 Result: Up-regulated in Transcription
  misc_feature: MA Experiment 20000086 PARAMETER Experiment Name: At_100uM_ABA_Mutants_cDNA_P Parameter: Plant Line Value: CS22
  misc_feature: MA Experiment 20000086 PARAMETER Experiment Name: At_100uM_ABA_Mutants_cDNA_P Parameter: Timepoint (hr) Value: 6
  misc_feature: MA Experiment 20000086 PARAMETER Experiment Name: At_100uM_ABA_Mutants_cDNA_P Parameter: Tissue Value: Aerial
  misc_feature: MA Experiment 20000086 PARAMETER Experiment Name: At_100uM_ABA_Mutants_cDNA_P Parameter: Treatment Value: 100uM ABA vs. No Treatment
  misc_feature: MA Experiment ID: 20000087 Result: Up-regulated in Transcription
  misc_feature: MA Experiment 20000087 PARAMETER Experiment Name: At_100uM_ABA_Mutants_cDNA_P Parameter: Plant Line Value: WS
  misc_feature: MA Experiment 20000087 PARAMETER Experiment Name: At_100uM_ABA_Mutants_cDNA_P Parameter: Timepoint (hr) Value: 6
  misc_feature: MA Experiment 20000087 PARAMETER Experiment Name: At_100uM_ABA_Mutants_cDNA_P Parameter: Tissue Value: Aerial
  misc_feature: MA Experiment 20000087 PARAMETER Experiment Name: At_100uM_ABA_Mutants_cDNA_P Parameter: Treatment Value: 100uM ABA vs. No Treatment
  misc_feature: MA Experiment ID: 20000088 Result: Up-regulated in Transcription
  misc_feature: MA Experiment 20000088 PARAMETER Experiment Name: At_100uM_ABA_Mutants_cDNA_P Parameter: Plant Line Value: Landsberg
  misc_feature: MA Experiment 20000088 PARAMETER Experiment Name: At_100uM_ABA_Mutants_cDNA_P Parameter: Timepoint (hr) Value: 6
  misc_feature: MA Experiment 20000088 PARAMETER Experiment Name: At_100uM_ABA_Mutants_cDNA_P Parameter: Tissue Value: Aerial
  misc_feature: MA Experiment 20000088 PARAMETER Experiment Name: At_100uM_ABA_Mutants_cDNA_P Parameter: Treatment Value: 100uM ABA vs. No Treatment
  misc_feature: MA Experiment ID: 20000113 Result: Down-regulated in Transcription
  misc_feature: MA Experiment 20000113 PARAMETER Experiment Name: At_42deg_Heat_cDNA_P Parameter: Temperature (deg C) Value: 42 vs. 22
  misc_feature: MA Experiment 20000113 PARAMETER Experiment Name: At_42deg_Heat_cDNA_P Parameter: Timepoint (hr) Value: 8
  misc_feature: MA Experiment 20000113 PARAMETER Experiment Name: At_42deg_Heat_cDNA_P Parameter: Tissue Value: Aerial
  misc_feature: MA Experiment ID: 20000117 Result: Up-regulated in Transcription
  misc_feature: MA Experiment 20000117 PARAMETER Experiment Name: At_100uM_ABA_Mutants_cDNA_P Parameter: Plant Line Value: Columbia
  misc_feature: MA Experiment 20000117 PARAMETER Experiment Name: At_100uM_ABA_Mutants_cDNA_P Parameter: Timepoint (hr) Value: 6
  misc_feature: MA Experiment 20000117 PARAMETER Experiment Name: At_100uM_ABA_Mutants_cDNA_P Parameter: Tissue Value: Aerial
  misc_feature: MA Experiment 20000117 PARAMETER Experiment Name: At_100uM_ABA_Mutants_cDNA_P Parameter: Treatment Value: 100uM ABA vs. No Treatment
  misc_feature: MA Experiment ID: 20000166 Result: Up-regulated in Transcription
  misc_feature: MA Experiment 20000166 PARAMETER Experiment Name: At_100uM_ABA_P Parameter: Age (day) Value: 14
  misc_feature: MA Experiment 20000166 PARAMETER Experiment Name: At_100uM_ABA_P Parameter: Organism Value: A. thaliana
  misc_feature: MA Experiment 20000166 PARAMETER Experiment Name: At_100uM_ABA_P Parameter: Plant Line Value: WS
  misc_feature: MA Experiment 20000166 PARAMETER Experiment Name: At_100uM_ABA_P Parameter: Timepoint (hr) Value: 1
  misc_feature: MA Experiment 20000166 PARAMETER Experiment Name: At_100uM_ABA_P Parameter: Tissue Value: Aerial
  misc_feature: MA Experiment 20000166 PARAMETER Experiment Name: At_100uM_ABA_P Parameter: Treatment Value: 100uM ABA vs. No Treatment
  misc_feature: MA Experiment ID: 20000224 Result: Down-regulated in Transcription
  misc_feature: MA Experiment ID: 20000227 Result: Down-regulated in Transcription
  misc_feature: MA Experiment 20000227 PARAMETER Experiment Name: At_Root-Tips-vs-Tops_P Parameter: Tissue Value: Root Tips vs. Root Tops
  misc_feature: MA Experiment ID: 20000234 Result: Down-regulated in Transcription
  misc_feature: MA Experiment 20000234 PARAMETER Experiment Name: At_Siliques_P Parameter: Age (day) Value: 21
  misc_feature: MA Experiment 20000234 PARAMETER Experiment Name: At_Siliques_P Parameter: Organism Value: A. thaliana
  misc_feature: MA Experiment 20000234 PARAMETER Experiment Name: At_Siliques_P Parameter: Plant Line Value: WS
  misc_feature: MA Experiment 20000234 PARAMETER Experiment Name: At_Siliques_P Parameter: Tissue Value: Less Than 5mm Siliques vs. Whole Plant
  misc_feature: MA Experiment ID: 20000235 Result: Down-regulated in Transcription
  misc_feature: MA Experiment 20000235 PARAMETER Experiment Name: At_Siliques_P Parameter: Age (day) Value: 21
  misc_feature: MA Experiment 20000235 PARAMETER Experiment Name: At_Siliques_P Parameter: Organism Value: A. thaliana
  misc_feature: MA Experiment 20000235 PARAMETER Experiment Name: At_Siliques_P Parameter: Plant Line Value: WS
  misc_feature: MA Experiment 20000235 PARAMETER Experiment Name: At_Siliques_P Parameter: Tissue Value: 5-10mm Siliques vs. Whole Plant
  misc_feature: MA Experiment ID: 20000264 Result: Down-regulated in Transcription
  misc_feature: MA Experiment 20000264 PARAMETER Experiment Name: At_Open_Flower_P Parameter: Age (day) Value: 21
  misc_feature: MA Experiment 20000264 PARAMETER Experiment Name: At_Open_Flower_P Parameter: Plant Line Value: WS
  misc_feature: MA Experiment 20000264 PARAMETER Experiment Name: At_Open_Flower_P Parameter: Tissue Value: Open Flower vs. Whole Plant
  misc_feature: MA Experiment ID: 20000265 Result: Down-regulated in Transcription
  misc_feature: MA Experiment 20000265 PARAMETER Experiment Name: At_Open_Flower_P Parameter: Age (day) Value: 21
  misc_feature: MA Experiment 20000265 PARAMETER Experiment Name: At_Open_Flower_P Parameter: Plant Line Value: WS
  misc_feature: MA Experiment 20000265 PARAMETER Experiment Name: At_Open_Flower_P Parameter: Tissue Value: Closed Flower vs. Whole Plant
  misc_feature: MA Experiment ID: 20000268 Result: Up-regulated in Transcription
  misc_feature: MA Experiment 20000268 PARAMETER Experiment Name: At_100mM_NaCl__P Parameter: Age (day) Value: 14
  misc_feature: MA Experiment 20000268 PARAMETER Experiment Name: At_100mM_NaCl__P Parameter: Organism Value: A. thaliana
  misc_feature: MA Experiment 20000268 PARAMETER Experiment Name: At_100mM_NaCl__P Parameter: Plant Line Value: WS
  misc_feature: MA Experiment 20000268 PARAMETER Experiment Name: At_100mM_NaCl__P Parameter: Timepoint (hr) Value: 6
  misc_feature: MA Experiment 20000268 PARAMETER Experiment Name: At_100mM_NaCl__P Parameter: Tissue Value: Whole Plant
  misc_feature: MA Experiment 20000268 PARAMETER Experiment Name: At_100mM_NaCl__P Parameter: Treatment Value: 100mM NaCl vs. No Treatment
  misc_feature: MA Experiment ID: 20000286 Result: Down-regulated in Transcription
  misc_feature: MA Experiment 20000286 PARAMETER Experiment Name: At_Open_Flower_P Parameter: Age (day) Value: 21
  misc_feature: MA Experiment 20000286 PARAMETER Experiment Name: At_Open_Flower_P Parameter: Plant Line Value: WS
  misc_feature: MA Experiment 20000286 PARAMETER Experiment Name: At_Open_Flower_P Parameter: Tissue Value: Half Open vs. Whole Plant
  misc_feature: MA Experiment ID: 20000436 Result: Up-regulated in Transcription
  misc_feature: MA Experiment 20000436 PARAMETER Experiment Name: At_Drought_P Parameter: Age (day) Value: 7
  misc_feature: MA Experiment 20000436 PARAMETER Experiment Name: At_Drought_P Parameter: Organism Value: A. thaliana
  misc_feature: MA Experiment 20000436 PARAMETER Experiment Name: At_Drought_P Parameter: Plant Line Value: WS
  misc_feature: MA Experiment 20000436 PARAMETER Experiment Name: At_Drought_P Parameter: Timepoint (hr) Value: 12
  misc_feature: MA Experiment 20000436 PARAMETER Experiment Name: At_Drought_P Parameter: Tissue Value: Whole Plant
  misc_feature: MA Experiment 20000436 PARAMETER Experiment Name: At_Drought_P Parameter: Treatment Value: Drought vs. No Drought
  misc_feature: MA Experiment ID: 20000437 Result: Up-regulated in Transcription
  misc_feature: MA Experiment 20000437 PARAMETER Experiment Name: At_Drought_P Parameter: Age (day) Value: 8
  misc_feature: MA Experiment 20000437 PARAMETER Experiment Name: At_Drought_P Parameter: Organism Value: A. thaliana
  misc_feature: MA Experiment 20000437 PARAMETER Experiment Name: At_Drought_P Parameter: Plant Line Value: WS
  misc_feature: MA Experiment 20000437 PARAMETER Experiment Name: At_Drought_P Parameter: Timepoint (hr) Value: 24
  misc_feature: MA Experiment 20000437 PARAMETER Experiment Name: At_Drought_P Parameter: Tissue Value: Whole Plant
  misc_feature: MA Experiment 20000437 PARAMETER Experiment Name: At_Drought_P Parameter: Treatment Value: Drought vs. No Drought
  misc_feature: MA Experiment ID: 20000439 Result: Down-regulated in Transcription
  misc_feature: MA Experiment 20000439 PARAMETER Experiment Name: At_Roots__P Parameter: Age (day) Value: 14 vs. 21
  misc_feature: MA Experiment 20000439 PARAMETER Experiment Name: At_Roots__P Parameter: Organism Value: A. thaliana
  misc_feature: MA Experiment 20000439 PARAMETER Experiment Name: At_Roots__P Parameter: Tissue Value: Roots vs. Whole Plant
  misc_feature: MA Experiment ID: 20000441 Result: Up-regulated in Transcription
  misc_feature: MA Experiment 20000441 PARAMETER Experiment Name: At_1uM_BR-BRZ__P Parameter: Tissue Value: Shoot Apices
  misc_feature: MA Experiment 20000441 PARAMETER Experiment Name: At_1uM_BR-BRZ__P Parameter: Treatment Value: 1uM BR vs. No Treatment
  misc_feature: MA Experiment ID: 20000453 Result: Up-regulated in Transcription
  misc_feature: MA Experiment 20000453 PARAMETER Experiment Name: At_100uM_ABA_P Parameter: Age (day) Value: 15
  misc_feature: MA Experiment 20000453 PARAMETER Experiment Name: At_100uM_ABA_P Parameter: Organism Value: A. thaliana
  misc_feature: MA Experiment 20000453 PARAMETER Experiment Name: At_100uM_ABA_P Parameter: Plant Line Value: WS
  misc_feature: MA Experiment 20000453 PARAMETER Experiment Name: At_100uM_ABA_P Parameter: Timepoint (hr) Value: 24
  misc_feature: MA Experiment 20000453 PARAMETER Experiment Name: At_100uM_ABA_P Parameter: Tissue Value: Aerial
  misc_feature: MA Experiment 20000453 PARAMETER Experiment Name: At_100uM_ABA_P Parameter: Treatment Value: 100uM ABA vs. No Treatment
  misc_feature: MA Experiment ID: 20000456 Result: Down-regulated in Transcription
  misc_feature: MA Experiment 20000456 PARAMETER Experiment Name: At_100uM_BA_P Parameter: Age (day) Value: 14
  misc_feature: MA Experiment 20000456 PARAMETER Experiment Name: At_100uM_BA_P Parameter: Organism Value: A. thaliana
  misc_feature: MA Experiment 20000456 PARAMETER Experiment Name: At_100uM_BA_P Parameter: Plant Line Value: WS
  misc_feature: MA Experiment 20000456 PARAMETER Experiment Name: At_100uM_BA_P Parameter: Timepoint (hr) Value: 6
  misc_feature: MA Experiment 20000456 PARAMETER Experiment Name: At_100uM_BA_P Parameter: Tissue Value: Aerial
  misc_feature: MA Experiment 20000456 PARAMETER Experiment Name: At_100uM_BA_P Parameter: Treatment Value: 100uM BA vs. No Treatment
  misc_feature: MA Experiment ID: 20000495 Result: Down-regulated in Transcription
  misc_feature: MA Experiment 20000495 PARAMETER Experiment Name: At_Guard_Cells_P Parameter: Harvest Date Value: 8/2/2002
  misc_feature: MA Experiment 20000495 PARAMETER Experiment Name: At_Guard_Cells_P Parameter: Organism Value: A. thaliana
  misc_feature: MA Experiment 20000495 PARAMETER Experiment Name: At_Guard_Cells_P Parameter: Tissue Value: Guard Cells vs. Leaves
  misc_feature: MA Experiment ID: 20000709 Result: Down-regulated in Transcription
  misc_feature: MA Experiment 20000709 PARAMETER Experiment Name: At_15mM_NH4NO3_L-to-H_P Parameter: Age (hr) Value: 14
  misc_feature: MA Experiment 20000709 PARAMETER Experiment Name: At_15mM_NH4NO3_L-to-H_P Parameter: Organism Value: A. thaliana
  misc_feature: MA Experiment 20000709 PARAMETER Experiment Name: At_15mM_NH4NO3_L-to-H_P Parameter: Plant Line Value: WS
  misc_feature: MA Experiment 20000709 PARAMETER Experiment Name: At_15mM_NH4NO3_L-to-H_P Parameter: Timepoint (hr) Value: 4
  misc_feature: MA Experiment 20000709 PARAMETER Experiment Name: At_15mM_NH4NO3_L-to-H_P Parameter: Tissue Value: Aerial
  misc_feature: MA Experiment 20000709 PARAMETER Experiment Name: At_15mM_NH4NO3_L-to-H_P Parameter: Treatment Value: 15mM NH4NO3 vs. 30mM Mannitol
  misc_feature: MA Experiment ID: 20000794 Result: Down-regulated in Transcription
  misc_feature: MA Experiment 20000794 PARAMETER Experiment Name: At_Petals_P Parameter: Age (day) Value: 23-25 days
  misc_feature: MA Experiment 20000794 PARAMETER Experiment Name: At_Petals_P Parameter: Plant Line Value: WS
  misc_feature: MA Experiment 20000794 PARAMETER Experiment Name: At_Petals_P Parameter: Tissue Value: Petals vs. Whole plant
  misc_feature: MA Experiment ID: 20001248 Result: Up-regulated in Transcription
  misc_feature: MA Experiment 20001248 PARAMETER Experiment Name: At_Far-red-induction_P Parameter: Age (day) Value: 7
  misc_feature: MA Experiment 20001248 PARAMETER Experiment Name: At_Far-red-induction_P Parameter: Light Value: Far-red vs. White
  misc_feature: MA Experiment 20001248 PARAMETER Experiment Name: At_Far-red-induction_P Parameter: Organism Value: A. thaliana
  misc_feature: MA Experiment 20001248 PARAMETER Experiment Name: At_Far-red-induction_P Parameter: Plant Line Value: Columbia
  misc_feature: MA Experiment 20001248 PARAMETER Experiment Name: At_Far-red-induction_P Parameter: Timepoint (hr) Value: 4
  misc_feature: MA Experiment 20001248 PARAMETER Experiment Name: At_Far-red-induction_P Parameter: Tissue Value: Whole Plant
  misc_feature: MA Experiment ID: 20001450 Result: Up-regulated in Transcription
  misc_feature: MA Experiment 20001450 PARAMETER Experiment Name: At_Far-red-induction_P Parameter: Age (day) Value: 7
  misc_feature: MA Experiment 20001450 PARAMETER Experiment Name: At_Far-red-induction_P Parameter: Light Value: Far-red vs. White
  misc_feature: MA Experiment 20001450 PARAMETER Experiment Name: At_Far-red-induction_P Parameter: Organism Value: A. thaliana
  misc_feature: MA Experiment 20001450 PARAMETER Experiment Name: At_Far-red-induction_P Parameter: Plant Line Value: Columbia
  misc_feature: MA Experiment 20001450 PARAMETER Experiment Name: At_Far-red-induction_P Parameter: Timepoint (hr) Value: 8
  misc_feature: MA Experiment 20001450 PARAMETER Experiment Name: At_Far-red-induction_P Parameter: Tissue Value: Whole Plant
  misc_feature: MA Experiment ID: 20001557 Result: Down-regulated in Transcription
  misc_feature: MA Experiment 20001557 PARAMETER Experiment Name: At_Drought_Soil_Dry_P Parameter: Age (day) Value: 27
  misc_feature: MA Experiment 20001557 PARAMETER Experiment Name: At_Drought_Soil_Dry_P Parameter: Organism Value: A. thaliana
  misc_feature: MA Experiment 20001557 PARAMETER Experiment Name: At_Drought_Soil_Dry_P Parameter: Plant Line Value: WS
  misc_feature: MA Experiment 20001557 PARAMETER Experiment Name: At_Drought_Soil_Dry_P Parameter: Post Timepoint (hr) Value: 3
  misc_feature: MA Experiment 20001557 PARAMETER Experiment Name: At_Drought_Soil_Dry_P Parameter: Post-Treatment Value: Re-Water vs. No Drought
  misc_feature: MA Experiment 20001557 PARAMETER Experiment Name: At_Drought_Soil_Dry_P Parameter: Timepoint (day) Value: 13
  misc_feature: MA Experiment 20001557 PARAMETER Experiment Name: At_Drought_Soil_Dry_P Parameter: Treatment Value: Drought vs. No Drought
  misc_feature: MA Experiment ID: 20001558 Result: Down-regulated in Transcription
  misc_feature: MA Experiment 20001558 PARAMETER Experiment Name: At_Drought_Soil_Dry_P Parameter: Age (day) Value: 27
  misc_feature: MA Experiment 20001558 PARAMETER Experiment Name: At_Drought_Soil_Dry_P Parameter: Organism Value: A. thaliana
  misc_feature: MA Experiment 20001558 PARAMETER Experiment Name: At_Drought_Soil_Dry_P Parameter: Plant Line Value: WS
  misc_feature: MA Experiment 20001558 PARAMETER Experiment Name: At_Drought_Soil_Dry_P Parameter: Post Timepoint (hr) Value: 6
  misc_feature: MA Experiment 20001558 PARAMETER Experiment Name: At_Drought_Soil_Dry_P Parameter: Post-Treatment Value: Re-Water vs. No Drought
  misc_feature: MA Experiment 20001558 PARAMETER Experiment Name: At_Drought_Soil_Dry_P Parameter: Timepoint (day) Value: 13
  misc_feature: MA Experiment 20001558 PARAMETER Experiment Name: At_Drought_Soil_Dry_P Parameter: Treatment Value: Drought vs. No Drought
  misc_feature: MA Experiment ID: 20001560 Result: Down-regulated in Transcription
  misc_feature: MA Experiment 20001560 PARAMETER Experiment Name: At_Drought_Soil_Dry_P Parameter: Age (day) Value: 28
  misc_feature: MA Experiment 20001560 PARAMETER Experiment Name: At_Drought_Soil_Dry_P Parameter: Organism Value: A. thaliana
  misc_feature: MA Experiment 20001560 PARAMETER Experiment Name: At_Drought_Soil_Dry_P Parameter: Plant Line Value: WS
  misc_feature: MA Experiment 20001560 PARAMETER Experiment Name: At_Drought_Soil_Dry_P Parameter: Post Timepoint (hr) Value: None
  misc_feature: MA Experiment 20001560 PARAMETER Experiment Name: At_Drought_Soil_Dry_P Parameter: Post-Treatment Value: None
  misc_feature: MA Experiment 20001560 PARAMETER Experiment Name: At_Drought_Soil_Dry_P Parameter: Timepoint (day) Value: 14
  misc_feature: MA Experiment 20001560 PARAMETER Experiment Name: At_Drought_Soil_Dry_P Parameter: Treatment Value: Drought vs. No Drought
  misc_feature: MA Experiment ID: 20001906 Result: Up-regulated in Transcription
  misc_feature: MA Experiment 20001906 PARAMETER Experiment Name: At_Drought_Reproduction_P Parameter: Age (day) Value: 35
  misc_feature: MA Experiment 20001906 PARAMETER Experiment Name: At_Drought_Reproduction_P Parameter: Organism Value: A. thaliana
  misc_feature: MA Experiment 20001906 PARAMETER Experiment Name: At_Drought_Reproduction_P Parameter: Plant Line Value: WS
  misc_feature: MA Experiment 20001906 PARAMETER Experiment Name: At_Drought_Reproduction_P Parameter: Timepoint (day) Value: 5
  misc_feature: MA Experiment 20001906 PARAMETER Experiment Name: At_Drought_Reproduction_P Parameter: Tissue Value: Siliques
  misc_feature: MA Experiment 20001906 PARAMETER Experiment Name: At_Drought_Reproduction_P Parameter: Treatment Value: Drought vs. No Drought
  misc_feature: MA Experiment ID: 20001908 Result: Up-regulated in Transcription
  misc_feature: MA Experiment 20001908 PARAMETER Experiment Name: At_Drought_Reproduction_P Parameter: Age (day) Value: 40
  misc_feature: MA Experiment 20001908 PARAMETER Experiment Name: At_Drought_Reproduction_P Parameter: Organism Value: A. thaliana
  misc_feature: MA Experiment 20001908 PARAMETER Experiment Name: At_Drought_Reproduction_P Parameter: Plant Line Value: WS
  misc_feature: MA Experiment 20001908 PARAMETER Experiment Name: At_Drought_Reproduction_P Parameter: Timepoint (day) Value: 10
  misc_feature: MA Experiment 20001908 PARAMETER Experiment Name: At_Drought_Reproduction_P Parameter: Tissue Value: Siliques
  misc_feature: MA Experiment 20001908 PARAMETER Experiment Name: At_Drought_Reproduction_P Parameter: Treatment Value: Drought vs. No Drought
  misc_feature: MA Experiment ID: 20001911 Result: Up-regulated in Transcription
  misc_feature: MA Experiment 20001911 PARAMETER Experiment Name: At_Drought_Reproduction_P Parameter: Age (day) Value: 40
  misc_feature: MA Experiment 20001911 PARAMETER Experiment Name: At_Drought_Reproduction_P Parameter: Organism Value: A. thaliana
  misc_feature: MA Experiment 20001911 PARAMETER Experiment Name: At_Drought_Reproduction_P Parameter: Plant Line Value: WS
  misc_feature: MA Experiment 20001911 PARAMETER Experiment Name: At_Drought_Reproduction_P Parameter: Timepoint (day) Value: 10
  misc_feature: MA Experiment 20001911 PARAMETER Experiment Name: At_Drought_Reproduction_P Parameter: Tissue Value: Flowers
  misc_feature: MA Experiment 20001911 PARAMETER Experiment Name: At_Drought_Reproduction_P Parameter: Treatment Value: Drought vs. No Drought

SEQ ID NO: 33647 - protein, 356 aa, Arabidopsis thaliana; identical to SEQ ID NO: 30057
  peptide (1)..(356): Ceres Seq. ID no. 12333641
  misc_feature (120)..(145): Pfam Name: Zinc finger C-x8-C-x5-C-x3-H type (and similar) Pfam Description: Zinc finger C-x8-C-x5-C-x3-H type (and similar)
  misc_feature (36)..(236): Homolog of NCBI NO: 28273376 NR Description: unknown protein [Oryza sativa (japonica
  misc_feature (52)..(222): Homolog of NCBI NO: 25408764 NR Description: probable CCCH-type zinc finger protein
  misc_feature (52)..(222): Homolog of NCBI NO: 18405834 NR Description: putative CCCH-type zinc finger protein
  misc_feature (11)..(230): Homolog of NCBI NO: 26449538 NR Description: unknown protein [Arabidopsis thaliana]
  misc_feature (11)..(230): Homolog of NCBI NO: 15219557 NR Description: hypothetical protein; protein id: At1g03790.1
  misc_feature (1)..(230): Homolog of NCBI NO: 34906436 NR Description: putative zinc finger transcription factor
  misc_feature (1)..(256): Homolog of NCBI NO: 21593538 NR Description: putative CCCH-type zinc finger protein
  misc_feature (1)..(256): Homolog of NCBI NO: 15225213 NR Description: putative CCCH-type zinc finger protein
  misc_feature (1)..(356): Homolog of NCBI NO: 15224852 NR Description: putative CCCH-type zinc finger protein
  misc_feature (1)..(356): Homolog of NCBI NO: 15233491 NR Description: putative protein

SEQ ID NO: 33648 - protein, 355 aa, Arabidopsis thaliana; identical to SEQ ID NO: 30058
  peptide (1)..(355): Ceres Seq. ID no. 12333642
  misc_feature (119)..(144): Pfam Name: Zinc finger C-x8-C-x5-C-x3-H type (and similar) Pfam Description: Zinc finger C-x8-C-x5-C-x3-H type (and similar)
  misc_feature (35)..(235): Homolog of NCBI NO: 28273376 NR Description: unknown protein [Oryza sativa (japonica
  misc_feature (51)..(221): Homolog of NCBI NO: 25408764 NR Description: probable CCCH-type zinc finger protein
  misc_feature (51)..(221): Homolog of NCBI NO: 18405834 NR Description: putative CCCH-type zinc finger protein
  misc_feature (10)..(229): Homolog of NCBI NO: 26449538 NR Description: unknown protein [Arabidopsis thaliana]
  misc_feature (10)..(229): Homolog of NCBI NO: 15219557 NR Description: hypothetical protein; protein id: At1g03790.1
  misc_feature (1)..(229): Homolog of NCBI NO: 34906436 NR Description: putative zinc finger transcription factor
  misc_feature (1)..(255): Homolog of NCBI NO: 21593538 NR Description: putative CCCH-type zinc finger protein
  misc_feature (1)..(255): Homolog of NCBI NO: 15225213 NR Description: putative CCCH-type zinc finger protein
  misc_feature (1)..(355): Homolog of NCBI NO: 15224852 NR Description: putative CCCH-type zinc finger protein
  misc_feature (1)..(355): Homolog of NCBI NO: 15233491 NR Description: putative protein

SEQ ID NO: 33649 - protein, 323 aa, Arabidopsis thaliana; identical to SEQ ID NO: 30059
  peptide (1)..(323): Ceres Seq. ID no. 12333643
  misc_feature (87)..(112): Pfam Name: Zinc finger C-x8-C-x5-C-x3-H type (and similar) Pfam Description: Zinc finger C-x8-C-x5-C-x3-H type (and similar)
  misc_feature (3)..(203): Homolog of NCBI NO: 28273376 NR Description: unknown protein [Oryza sativa (japonica
  misc_feature (19)..(189): Homolog of NCBI NO: 25408764 NR Description: probable CCCH-type zinc finger protein
  misc_feature (19)..(189): Homolog of NCBI NO: 18405834 NR Description: putative CCCH-type zinc finger protein
  misc_feature (1)..(197): Homolog of NCBI NO: 26449538 NR Description: unknown protein [Arabidopsis thaliana]
  misc_feature (1)..(197): Homolog of NCBI NO: 15219557 NR Description: hypothetical protein; protein id: At1g03790.1
  misc_feature (1)..(197): Homolog of NCBI NO: 34906436 NR Description: putative zinc finger transcription factor
  misc_feature (1)..(223): Homolog of NCBI NO: 21593538 NR Description: putative CCCH-type zinc finger protein
  misc_feature (1)..(223): Homolog of NCBI NO: 15225213 NR Description: putative CCCH-type zinc finger protein
  misc_feature (1)..(323): Homolog of NCBI NO: 15224852 NR Description: putative CCCH-type zinc finger protein
  misc_feature (1)..(323): Homolog of NCBI NO: 15233491 NR Description: putative protein

SEQ ID NO: 33650 - DNA, 1349 bp, Arabidopsis thaliana; identical to SEQ ID NO: 30060
  misc_feature (1)..(1349): Ceres Seq. ID no. 12334159
  misc_feature: MA Experiment ID: 108434 Result: Down-regulated in Transcription
  misc_feature: MA Experiment 108434 PARAMETER Experiment Name: At_Root_Tips_cDNA_P Parameter: Tissue Value: Root Tips
  misc_feature: MA Experiment ID: 108573 Result: Up-regulated in Transcription
  misc_feature: MA Experiment 108573 PARAMETER Experiment Name: At_Drought_cDNA_P Parameter: Timepoint (hr) Value: 6
  misc_feature: MA Experiment 108573 PARAMETER Experiment Name: At_Drought_cDNA_P Parameter: Tissue Value: Aerial
  misc_feature: MA Experiment 108573 PARAMETER Experiment Name: At_Drought_cDNA_P Parameter: Treatment Value: Drought vs. No Drought
  misc_feature: MA Experiment ID: 108585 Result: Up-regulated in Transcription
  misc_feature: MA Experiment 108585 PARAMETER Experiment Name: At_5mM_NaNP_cDNA_P Parameter: Timepoint (hr) Value: 6
  misc_feature: MA Experiment 108585 PARAMETER Experiment Name: At_5mM_NaNP_cDNA_P Parameter: Tissue Value: Aerial
  misc_feature: MA Experiment 108585 PARAMETER Experiment Name: At_5mM_NaNP_cDNA_P Parameter: Treatment Value: null
  misc_feature: MA Experiment ID: 20000069 Result: Up-regulated in Transcription
  misc_feature: MA Experiment 20000069 PARAMETER Experiment Name: At_100uM_ABA_Mutants_cDNA_P Parameter: Plant Line Value: CS23
  misc_feature: MA Experiment 20000069 PARAMETER Experiment Name: At_100uM_ABA_Mutants_cDNA_P Parameter: Timepoint (hr) Value: 6
  misc_feature: MA Experiment 20000069 PARAMETER Experiment Name: At_100uM_ABA_Mutants_cDNA_P Parameter: Tissue Value: Aerial
  misc_feature: MA Experiment 20000069 PARAMETER Experiment Name: At_100uM_ABA_Mutants_cDNA_P Parameter: Treatment Value: 100uM ABA vs. No Treatment
  misc_feature: MA Experiment ID: 20000180 Result: Up-regulated in Transcription
  misc_feature: MA Experiment 20000180 PARAMETER Experiment Name: At_Germinating_Seeds_P Parameter: Age (hr) Value: 24 vs. 0
  misc_feature: MA Experiment 20000180 PARAMETER Experiment Name: At_Germinating_Seeds_P Parameter: Tissue Value: Germinating Seeds
  misc_feature: MA Experiment ID: 20000234 Result: Down-regulated in Transcription
  misc_feature: MA Experiment 20000234 PARAMETER Experiment Name: At_Siliques_P Parameter: Age (day) Value: 21
  misc_feature: MA Experiment 20000234 PARAMETER Experiment Name: At_Siliques_P Parameter: Organism Value: A. thaliana
  misc_feature: MA Experiment 20000234 PARAMETER Experiment Name: At_Siliques_P Parameter: Plant Line Value: WS
  misc_feature: MA Experiment 20000234 PARAMETER Experiment Name: At_Siliques_P Parameter: Tissue Value: Less Than 5mm Siliques vs. Whole Plant
  misc_feature: MA Experiment ID: 20000438 Result: Down-regulated in Transcription
  misc_feature: MA Experiment 20000438 PARAMETER Experiment Name: At_Shoots__P Parameter: Age (day) Value: 14
  misc_feature: MA Experiment 20000438 PARAMETER Experiment Name: At_Shoots__P Parameter: Tissue Value: Shoots vs. Whole Plant
  misc_feature: MA Experiment ID: 20000527 Result: Down-regulated in Transcription
  misc_feature: MA Experiment 20000527 PARAMETER Experiment Name: At_10percent_PEG_P Parameter: Age (day) Value: 20
  misc_feature: MA Experiment 20000527 PARAMETER Experiment Name: At_10percent_PEG_P Parameter: Organism Value: A. thaliana
  misc_feature: MA Experiment 20000527 PARAMETER Experiment Name: At_10percent_PEG_P Parameter: Plant Line Value: WS
  misc_feature: MA Experiment 20000527 PARAMETER Experiment Name: At_10percent_PEG_P Parameter: Timepoint (day) Value: 20
  misc_feature: MA Experiment 20000527 PARAMETER Experiment Name: At_10percent_PEG_P Parameter: Tissue Value: Whole Plant
  misc_feature: MA Experiment 20000527 PARAMETER Experiment Name: At_10percent_PEG_P Parameter: Treatment Value: 10percent PEG vs. No Treatment
  misc_feature: MA Experiment ID: 20001247 Result: Up-regulated in Transcription
  misc_feature: MA Experiment 20001247 PARAMETER Experiment Name: At_Far-red-induction_P Parameter: Age (day) Value: 7
  misc_feature: MA Experiment 20001247 PARAMETER Experiment Name: At_Far-red-induction_P Parameter: Light Value: Far-red vs. White
  misc_feature: MA Experiment 20001247 PARAMETER Experiment Name: At_Far-red-induction_P Parameter: Organism Value: A. thaliana
  misc_feature: MA Experiment 20001247 PARAMETER Experiment Name: At_Far-red-induction_P Parameter: Plant Line Value: Columbia
  misc_feature: MA Experiment 20001247 PARAMETER Experiment Name: At_Far-red-induction_P Parameter: Timepoint (hr) Value: 1
  misc_feature: MA Experiment 20001247 PARAMETER Experiment Name: At_Far-red-induction_P Parameter: Tissue Value: Whole Plant
  misc_feature: MA Experiment ID: 20001905 Result: Up-regulated in Transcription
  misc_feature: MA Experiment 20001905 PARAMETER Experiment Name: At_Drought_Reproduction_P Parameter: Age (day) Value: 40
  misc_feature: MA Experiment 20001905 PARAMETER Experiment Name: At_Drought_Reproduction_P Parameter: Organism Value: A. thaliana
  misc_feature: MA Experiment 20001905 PARAMETER Experiment Name: At_Drought_Reproduction_P Parameter: Plant Line Value: WS
  misc_feature: MA Experiment 20001905 PARAMETER Experiment Name: At_Drought_Reproduction_P Parameter: Timepoint (day) Value: 10
  misc_feature: MA Experiment 20001905 PARAMETER Experiment Name: At_Drought_Reproduction_P Parameter: Tissue Value: Rosettes
  misc_feature: MA Experiment 20001905 PARAMETER Experiment Name: At_Drought_Reproduction_P Parameter: Treatment Value: Drought vs. No Drought

SEQ ID NO: 33651 - protein, 394 aa, Arabidopsis thaliana; identical to SEQ ID NO: 30061
  peptide (1)..(394): Ceres Seq. ID no. 12334160
  misc_feature (133)..(390): Homolog of NCBI NO: 33146734 NR Description: unknown protein [Oryza sativa (japonica
  misc_feature (65)..(174): Homolog of NCBI NO: 34897958 NR Description: contains ESTs AU068434(C30250)~similar to Oryza sativa chromosome 7,
  misc_feature (175)..(390): Homolog of NCBI NO: 34897958 NR Description: contains ESTs AU068434(C30250)~similar to Oryza sativa chromosome 7,
  misc_feature (44)..(393): Homolog of NCBI NO: 37537220 NR Description: unknown protein [Oryza sativa (japonica
  misc_feature (66)..(367): Homolog of NCBI NO: 21954084 NR Description: unknown protein [Arabidopsis thaliana]
  misc_feature (57)..(367): Homolog of NCBI NO: 30694759 NR Description: expressed protein [Arabidopsis thaliana]
  misc_feature (57)..(367): Homolog of NCBI NO: 21595083 NR Description: unknown [Arabidopsis thaliana]
  misc_feature (51)..(394): Homolog of NCBI NO: 15234866 NR Description: putative protein

SEQ ID NO: 33652 - protein, 344 aa, Arabidopsis thaliana; identical to SEQ ID NO: 30062
  peptide (1)..(344): Ceres Seq. ID no. 12334161
  misc_feature (83)..(340): Homolog of NCBI NO: 33146734 NR Description: unknown protein [Oryza sativa (japonica
  misc_feature (15)..(124): Homolog of NCBI NO: 34897958 NR Description: contains ESTs AU068434(C30250)~similar to Oryza sativa chromosome 7,
  misc_feature (125)..(340): Homolog of NCBI NO: 34897958 NR Description: contains ESTs AU068434(C30250)~similar to Oryza sativa chromosome 7,
  misc_feature (1)..(343): Homolog of NCBI NO: 37537220 NR Description: unknown protein [Oryza sativa (japonica
  misc_feature (16)..(317): Homolog of NCBI NO: 21954084 NR Description: unknown protein [Arabidopsis thaliana]
  misc_feature (7)..(317): Homolog of NCBI NO: 30694759 NR Description: expressed protein [Arabidopsis thaliana]
  misc_feature (7)..(317): Homolog of NCBI NO: 21595083 NR Description: unknown [Arabidopsis thaliana]
  misc_feature (1)..(344): Homolog of NCBI NO: 15234866 NR Description: putative protein

SEQ ID NO: 33653 - protein, 335 aa, Arabidopsis thaliana; identical to SEQ ID NO: 30063
  peptide (1)..(335): Ceres Seq. ID no. 12334162
  misc_feature (74)..(331): Homolog of NCBI NO: 33146734 NR Description: unknown protein [Oryza sativa (japonica
  misc_feature (6)..(115): Homolog of NCBI NO: 34897958 NR Description: contains ESTs AU068434(C30250)~similar to Oryza sativa chromosome 7,
  misc_feature (116)..(331): Homolog of NCBI NO: 34897958 NR Description: contains ESTs AU068434(C30250)~similar to Oryza sativa chromosome 7,
  misc_feature (1)..(334): Homolog of NCBI NO: 37537220 NR Description: unknown protein [Oryza sativa (japonica
  misc_feature (7)..(308): Homolog of NCBI NO: 21954084 NR Description: unknown protein [Arabidopsis thaliana]
  misc_feature (1)..(308): Homolog of NCBI NO: 30694759 NR Description: expressed protein [Arabidopsis thaliana]
  misc_feature (1)..(308): Homolog of NCBI NO: 21595083 NR Description: unknown [Arabidopsis thaliana]
  misc_feature (1)..(335): Homolog of NCBI NO: 15234866 NR Description: putative protein

SEQ ID NO: 33654 - DNA, 1665 bp, Arabidopsis thaliana; identical to SEQ ID NO: 30064
  misc_feature (1)..(1665): Ceres Seq. ID no. 13489296
  misc_feature: MA Experiment ID: 108572 Result: Up-regulated in Transcription
  misc_feature: MA Experiment 108572 PARAMETER Experiment Name: At_Drought_cDNA_P Parameter: Timepoint (hr) Value: 1
  misc_feature: MA Experiment 108572 PARAMETER Experiment Name: At_Drought_cDNA_P Parameter: Tissue Value: Aerial
  misc_feature: MA Experiment 108572 PARAMETER Experiment Name: At_Drought_cDNA_P Parameter: Treatment Value: Drought vs. No Drought
  misc_feature: MA Experiment ID: 108573 Result: Up-regulated in Transcription
  misc_feature: MA Experiment 108573 PARAMETER Experiment Name: At_Drought_cDNA_P Parameter: Timepoint (hr) Value: 6
  misc_feature: MA Experiment 108573 PARAMETER Experiment Name: At_Drought_cDNA_P Parameter: Tissue Value: Aerial
  misc_feature: MA Experiment 108573 PARAMETER Experiment Name: At_Drought_cDNA_P Parameter: Treatment Value: Drought vs. No Drought
  misc_feature: MA Experiment ID: 108585 Result: Up-regulated in Transcription
  misc_feature: MA Experiment 108585 PARAMETER Experiment Name: At_5mM_NaNP_cDNA_P Parameter: Timepoint (hr) Value: 6
  misc_feature: MA Experiment 108585 PARAMETER Experiment Name: At_5mM_NaNP_cDNA_P Parameter: Tissue Value: Aerial
  misc_feature: MA Experiment 108585 PARAMETER Experiment Name: At_5mM_NaNP_cDNA_P Parameter: Treatment Value: null
  misc_feature: MA Experiment ID: 108595 Result: Up-regulated in Transcription
  misc_feature: MA Experiment 108595 PARAMETER Experiment Name: At_Ler-pi_Ovule_cDNA_P Parameter: Plant Line Value: null
  misc_feature: MA Experiment ID: 20000111 Result: Up-regulated in Transcription
  misc_feature: MA Experiment 20000111 PARAMETER Experiment Name: At_42deg_Heat_cDNA_P Parameter: Temperature (deg C) Value: 42 vs. 22
  misc_feature: MA Experiment 20000111 PARAMETER Experiment Name: At_42deg_Heat_cDNA_P Parameter: Timepoint (hr) Value: 6
  misc_feature: MA Experiment 20000111 PARAMETER Experiment Name: At_42deg_Heat_cDNA_P Parameter: Tissue Value: Aerial
  misc_feature: MA Experiment ID: 20000234 Result: Up-regulated in Transcription
  misc_feature: MA Experiment 20000234 PARAMETER Experiment Name: At_Siliques_P Parameter: Age (day) Value: 21
  misc_feature: MA Experiment 20000234 PARAMETER Experiment Name: At_Siliques_P Parameter: Organism Value: A. thaliana
  misc_feature: MA Experiment 20000234 PARAMETER Experiment Name: At_Siliques_P Parameter: Plant Line Value: WS
  misc_feature: MA Experiment 20000234 PARAMETER Experiment Name: At_Siliques_P Parameter: Tissue Value: Less Than 5mm Siliques vs. Whole Plant
  misc_feature: MA Experiment ID: 20000235 Result: Up-regulated in Transcription
  misc_feature: MA Experiment 20000235 PARAMETER Experiment Name: At_Siliques_P Parameter: Age (day) Value: 21
  misc_feature: MA Experiment 20000235 PARAMETER Experiment Name: At_Siliques_P Parameter: Organism Value: A. thaliana
  misc_feature: MA Experiment 20000235 PARAMETER Experiment Name: At_Siliques_P Parameter: Plant Line Value: WS
  misc_feature: MA Experiment 20000235 PARAMETER Experiment Name: At_Siliques_P Parameter: Tissue Value: 5-10mm Siliques vs. Whole Plant
  misc_feature: MA Experiment ID: 20000264 Result: Up-regulated in Transcription
  misc_feature: MA Experiment 20000264 PARAMETER Experiment Name: At_Open_Flower_P Parameter: Age (day) Value: 21
  misc_feature: MA Experiment 20000264 PARAMETER Experiment Name: At_Open_Flower_P Parameter: Plant Line Value: WS
  misc_feature: MA Experiment 20000264 PARAMETER Experiment Name: At_Open_Flower_P Parameter: Tissue Value: Open Flower vs. Whole Plant
  misc_feature: MA Experiment ID: 20000267 Result: Up-regulated in Transcription
  misc_feature: MA Experiment 20000267 PARAMETER Experiment Name: At_Drought_P Parameter: Age (day) Value: 7
  misc_feature: MA Experiment 20000267 PARAMETER Experiment Name: At_Drought_P Parameter: Organism Value: A. thaliana
  misc_feature: MA Experiment 20000267 PARAMETER Experiment Name: At_Drought_P Parameter: Plant Line Value: WS
  misc_feature: MA Experiment 20000267 PARAMETER Experiment Name: At_Drought_P Parameter: Timepoint (hr) Value: 6
  misc_feature: MA Experiment 20000267 PARAMETER Experiment Name: At_Drought_P Parameter: Tissue Value: Whole Plant
  misc_feature: MA Experiment 20000267 PARAMETER Experiment Name: At_Drought_P Parameter: Treatment Value: Drought vs. No Drought
  misc_feature: MA Experiment ID: 20000268 Result: Up-regulated in Transcription
  misc_feature: MA Experiment 20000268 PARAMETER Experiment Name: At_100mM_NaCl__P Parameter: Age (day) Value: 14
  misc_feature: MA Experiment 20000268 PARAMETER Experiment Name: At_100mM_NaCl__P Parameter: Organism Value: A. thaliana
  misc_feature: MA Experiment 20000268 PARAMETER Experiment Name: At_100mM_NaCl__P Parameter: Plant Line Value: WS
  misc_feature: MA Experiment 20000268 PARAMETER Experiment Name: At_100mM_NaCl__P Parameter: Timepoint (hr) Value: 6
  misc_feature: MA Experiment 20000268 PARAMETER Experiment Name: At_100mM_NaCl__P Parameter: Tissue Value: Whole Plant
  misc_feature: MA Experiment 20000268 PARAMETER Experiment Name: At_100mM_NaCl__P Parameter: Treatment Value: 100mM NaCl vs. No Treatment
  misc_feature: MA Experiment ID: 20000286 Result: Up-regulated in Transcription
  misc_feature: MA Experiment 20000286 PARAMETER Experiment Name: At_Open_Flower_P Parameter: Age (day) Value: 21
  misc_feature: MA Experiment 20000286 PARAMETER Experiment Name: At_Open_Flower_P Parameter: Plant Line Value: WS
  misc_feature: MA Experiment 20000286 PARAMETER Experiment Name: At_Open_Flower_P Parameter: Tissue Value: Half Open vs. Whole Plant
  misc_feature: MA Experiment ID: 20000436 Result: Up-regulated in Transcription
  misc_feature: MA Experiment 20000436 PARAMETER Experiment Name: At_Drought_P Parameter: Age (day) Value: 7
  misc_feature: MA Experiment 20000436 PARAMETER Experiment Name: At_Drought_P Parameter: Organism Value: A. thaliana
  misc_feature: MA Experiment 20000436 PARAMETER Experiment Name: At_Drought_P Parameter: Plant Line Value: WS
  misc_feature: MA Experiment 20000436 PARAMETER Experiment Name: At_Drought_P Parameter: Timepoint (hr) Value: 12
  misc_feature: MA Experiment 20000436 PARAMETER Experiment Name: At_Drought_P Parameter: Tissue Value: Whole Plant
  misc_feature: MA Experiment 20000436 PARAMETER Experiment Name: At_Drought_P Parameter: Treatment Value: Drought vs. No Drought
  misc_feature: MA Experiment ID: 20000437 Result: Up-regulated in Transcription
  misc_feature: MA Experiment 20000437 PARAMETER Experiment Name: At_Drought_P Parameter: Age (day) Value: 8
  misc_feature: MA Experiment 20000437 PARAMETER Experiment Name: At_Drought_P Parameter: Organism Value: A. thaliana
  misc_feature: MA Experiment 20000437 PARAMETER Experiment Name: At_Drought_P Parameter: Plant Line Value: WS
  misc_feature: MA Experiment 20000437 PARAMETER Experiment Name: At_Drought_P Parameter: Timepoint (hr) Value: 24
  misc_feature: MA Experiment 20000437 PARAMETER Experiment Name: At_Drought_P Parameter: Tissue Value: Whole Plant
  misc_feature: MA Experiment 20000437 PARAMETER Experiment Name: At_Drought_P Parameter: Treatment Value: Drought vs. No Drought
  misc_feature: MA Experiment ID: 20000496 Result: Up-regulated in Transcription
  misc_feature: MA Experiment 20000496 PARAMETER Experiment Name: At_Guard_Cells_P Parameter: Harvest Date Value: 7/19/2002
  misc_feature: MA Experiment 20000496 PARAMETER Experiment Name: At_Guard_Cells_P Parameter: Organism Value: Canola
  misc_feature: MA Experiment 20000496 PARAMETER Experiment Name: At_Guard_Cells_P Parameter: Tissue Value: Guard Cells vs. Leaves
  misc_feature: MA Experiment ID: 20000794 Result: Up-regulated in Transcription
  misc_feature: MA Experiment 20000794 PARAMETER Experiment Name: At_Petals_P Parameter: Age (day) Value: 23-25 days
  misc_feature: MA Experiment 20000794 PARAMETER Experiment Name: At_Petals_P Parameter: Plant Line Value: WS
  misc_feature: MA Experiment 20000794 PARAMETER Experiment Name: At_Petals_P Parameter: Tissue Value: Petals vs. Whole plant
  misc_feature: MA Experiment ID: 20001557 Result: Up-regulated in Transcription
  misc_feature: MA Experiment 20001557 PARAMETER Experiment Name: At_Drought_Soil_Dry_P Parameter: Age (day) Value: 27
  misc_feature: MA Experiment 20001557 PARAMETER Experiment Name: At_Drought_Soil_Dry_P Parameter: Organism Value: A. thaliana
  misc_feature: MA Experiment 20001557 PARAMETER Experiment Name: At_Drought_Soil_Dry_P Parameter: Plant Line Value: WS
  misc_feature: MA Experiment 20001557 PARAMETER Experiment Name: At_Drought_Soil_Dry_P Parameter: Post Timepoint (hr) Value: 3
  misc_feature: MA Experiment 20001557 PARAMETER Experiment Name: At_Drought_Soil_Dry_P Parameter: Post-Treatment Value: Re-Water vs. No Drought
  misc_feature: MA Experiment 20001557 PARAMETER Experiment Name: At_Drought_Soil_Dry_P Parameter: Timepoint (day) Value: 13
  misc_feature: MA Experiment 20001557 PARAMETER Experiment Name: At_Drought_Soil_Dry_P Parameter: Treatment Value: Drought vs. No Drought
  misc_feature: MA Experiment ID: 20001559 Result: Up-regulated in Transcription
  misc_feature: MA Experiment 20001559 PARAMETER Experiment Name: At_Drought_Soil_Dry_P Parameter: Age (day) Value: 28
  misc_feature: MA Experiment 20001559 PARAMETER Experiment Name: At_Drought_Soil_Dry_P Parameter: Organism Value: A. thaliana
  misc_feature: MA Experiment 20001559 PARAMETER Experiment Name: At_Drought_Soil_Dry_P Parameter: Plant Line Value: WS
  misc_feature: MA Experiment 20001559 PARAMETER Experiment Name: At_Drought_Soil_Dry_P Parameter: Post Timepoint (hr) Value: 29
  misc_feature: MA Experiment 20001559 PARAMETER Experiment Name: At_Drought_Soil_Dry_P Parameter: Post-Treatment Value: Re-Water vs. No Drought
  misc_feature: MA Experiment 20001559 PARAMETER Experiment Name: At_Drought_Soil_Dry_P Parameter: Timepoint (day) Value: 14
  misc_feature: MA Experiment 20001559 PARAMETER Experiment Name: At_Drought_Soil_Dry_P Parameter: Treatment Value: Drought vs. No Drought
  misc_feature: MA Experiment ID: 20001904 Result: Up-regulated in Transcription
  misc_feature: MA Experiment 20001904 PARAMETER Experiment Name: At_Drought_Reproduction_P Parameter: Age (day) Value: 37
  misc_feature: MA Experiment 20001904 PARAMETER Experiment Name: At_Drought_Reproduction_P Parameter: Organism Value: A. thaliana
  misc_feature: MA Experiment 20001904 PARAMETER Experiment Name: At_Drought_Reproduction_P Parameter: Plant Line Value: WS
  misc_feature: MA Experiment 20001904 PARAMETER Experiment Name: At_Drought_Reproduction_P Parameter: Timepoint (day) Value: 7
  misc_feature: MA Experiment 20001904 PARAMETER Experiment Name: At_Drought_Reproduction_P Parameter: Tissue Value: Rosettes
  misc_feature: MA Experiment 20001904 PARAMETER Experiment Name: At_Drought_Reproduction_P Parameter: Treatment Value: Drought vs. No Drought
  misc_feature: MA Experiment ID: 20001905 Result: Up-regulated in Transcription
  misc_feature: MA Experiment 20001905 PARAMETER Experiment Name: At_Drought_Reproduction_P Parameter: Age (day) Value: 40
  misc_feature: MA Experiment 20001905 PARAMETER Experiment Name: At_Drought_Reproduction_P Parameter: Organism Value: A. thaliana
  misc_feature: MA Experiment 20001905 PARAMETER Experiment Name: At_Drought_Reproduction_P Parameter: Plant Line Value: WS
  misc_feature: MA Experiment 20001905 PARAMETER Experiment Name: At_Drought_Reproduction_P Parameter: Timepoint (day) Value: 10
  misc_feature: MA Experiment 20001905 PARAMETER Experiment Name: At_Drought_Reproduction_P Parameter: Tissue Value: Rosettes
  misc_feature: MA Experiment 20001905 PARAMETER Experiment Name: At_Drought_Reproduction_P Parameter: Treatment Value: Drought vs. No Drought
  misc_feature: MA Experiment ID: 20001911 Result: Up-regulated in Transcription
  misc_feature: MA Experiment 20001911 PARAMETER Experiment Name: At_Drought_Reproduction_P Parameter: Age (day) Value: 40
  misc_feature: MA Experiment 20001911 PARAMETER Experiment Name: At_Drought_Reproduction_P Parameter: Organism Value: A. thaliana
  misc_feature: MA Experiment 20001911 PARAMETER Experiment Name: At_Drought_Reproduction_P Parameter: Plant Line Value: WS
  misc_feature: MA Experiment 20001911 PARAMETER Experiment Name: At_Drought_Reproduction_P Parameter: Timepoint (day) Value: 10
  misc_feature: MA Experiment 20001911 PARAMETER Experiment Name: At_Drought_Reproduction_P Parameter: Tissue Value: Flowers
  misc_feature: MA Experiment 20001911 PARAMETER Experiment Name: At_Drought_Reproduction_P Parameter: Treatment Value: Drought vs. No Drought

SEQ ID NO: 33655 - protein, 222 aa, Arabidopsis thaliana; identical to SEQ ID NO: 30065
  peptide (1)..(222): Ceres Seq. ID no. 13489297
  misc_feature (78)..(188): Pfam Name: Equine herpesvirus glycoprotein gp2 Pfam Description: Equine herpesvirus glycoprotein gp2
  misc_feature (16)..(180): Homolog of NCBI NO: 8778409 NR Description: F16A14.5 [Arabidopsis thaliana]
  misc_feature (1)..(189): Homolog of NCBI NO: 15241485 NR Description: glycosyl hydrolase family 17 [Arabidopsis
  misc_feature (1)..(189): Homolog of NCBI NO: 21592859 NR Description: unknown [Arabidopsis thaliana]
  misc_feature (1)..(166): Homolog of NCBI NO: 18394637 NR Description: glycosyl hydrolase family 17 [Arabidopsis
  misc_feature (1)..(180): Homolog of NCBI NO: 30697478 NR Description: glycosyl hydrolase family 17 [Arabidopsis
  misc_feature (1)..(163): Homolog of NCBI NO: 30683485 NR Description: expressed protein [Arabidopsis thaliana]
  misc_feature (1)..(185): Homolog of NCBI NO: 15222715 NR Description: glycosyl hydrolase family 17 [Arabidopsis
  misc_feature (1)..(205): Homolog of NCBI NO: 25404810 NR Description: unknown protein, 45065-49536 [imported] -
  misc_feature (1)..(222): Homolog of NCBI NO: 21553768 NR Description: unknown [Arabidopsis thaliana]
  misc_feature (1)..(222): Homolog of NCBI NO: 18409239 NR Description: expressed protein [Arabidopsis thaliana]

SEQ ID NO: 33656 - protein, 210 aa, Arabidopsis thaliana; identical to SEQ ID NO: 30066
  peptide (1)..(210): Ceres Seq. ID no. 13489298
  misc_feature (66)..(176): Pfam Name: Equine herpesvirus glycoprotein gp2 Pfam Description: Equine herpesvirus glycoprotein gp2
  misc_feature (4)..(168): Homolog of NCBI NO: 8778409 NR Description: F16A14.5 [Arabidopsis thaliana]
  misc_feature (1)..(177): Homolog of NCBI NO: 15241485 NR Description: glycosyl hydrolase family 17 [Arabidopsis
  misc_feature (1)..(177): Homolog of NCBI NO: 21592859 NR Description: unknown [Arabidopsis thaliana]
  misc_feature (1)..(154): Homolog of NCBI NO: 18394637 NR Description: glycosyl hydrolase family 17 [Arabidopsis
  misc_feature (1)..(168): Homolog of NCBI NO: 30697478 NR Description: glycosyl hydrolase family 17 [Arabidopsis
  misc_feature (1)..(151): Homolog of NCBI NO: 30683485 NR Description: expressed protein [Arabidopsis thaliana]
  misc_feature (1)..(173): Homolog of NCBI NO: 15222715 NR Description: glycosyl hydrolase family 17 [Arabidopsis
  misc_feature (1)..(193): Homolog of NCBI NO: 25404810 NR Description: unknown protein, 45065-49536 [imported] -
  misc_feature (1)..(210): Homolog of NCBI NO: 21553768 NR Description: unknown [Arabidopsis thaliana]
  misc_feature (1)..(210): Homolog of NCBI NO: 18409239 NR Description: expressed protein [Arabidopsis thaliana]

SEQ ID NO: 33657 - DNA, 762 bp, Arabidopsis thaliana; identical to SEQ ID NO: 30067
  misc_feature (1)..(762): Ceres Seq. ID no. 12482057
  misc_feature: MA Experiment ID: 108474 Result: Down-regulated in Transcription
  misc_feature: MA Experiment 108474 PARAMETER Experiment Name: At_Drought_Flowers_cDNA_P Parameter: Timepoint (hr) Value: null
  misc_feature: MA Experiment 108474 PARAMETER Experiment Name: At_Drought_Flowers_cDNA_P Parameter: Treatment Value: Drought vs. No Drought
  misc_feature: MA Experiment ID: 20000087 Result: Down-regulated in Transcription
  misc_feature: MA Experiment 20000087 PARAMETER Experiment Name: At_100uM_ABA_Mutants_cDNA_P Parameter: Plant Line Value: WS
  misc_feature: MA Experiment 20000087 PARAMETER Experiment Name: At_100uM_ABA_Mutants_cDNA_P Parameter: Timepoint (hr) Value: 6
  misc_feature: MA Experiment 20000087 PARAMETER Experiment Name: At_100uM_ABA_Mutants_cDNA_P Parameter: Tissue Value: Aerial
  misc_feature: MA Experiment 20000087 PARAMETER Experiment Name: At_100uM_ABA_Mutants_cDNA_P Parameter: Treatment Value: 100uM ABA vs. No Treatment
  misc_feature: MA Experiment ID: 20000113 Result: Up-regulated in Transcription
  misc_feature: MA Experiment 20000113 PARAMETER Experiment Name: At_42deg_Heat_cDNA_P Parameter: Temperature (deg C) Value: 42 vs. 22
  misc_feature: MA Experiment 20000113 PARAMETER Experiment Name: At_42deg_Heat_cDNA_P Parameter: Timepoint (hr) Value: 8
  misc_feature: MA Experiment 20000113 PARAMETER Experiment Name: At_42deg_Heat_cDNA_P Parameter: Tissue Value: Aerial
  misc_feature: MA Experiment ID: 20000184 Result: Up-regulated in Transcription
  misc_feature: MA Experiment 20000184 PARAMETER Experiment Name: At_Shoots__P Parameter: Age (day) Value: 7
  misc_feature: MA Experiment 20000184 PARAMETER Experiment Name: At_Shoots__P Parameter: Tissue Value: Shoots vs. Whole Plant
  misc_feature: MA Experiment ID: 20000264 Result: Up-regulated in Transcription
  misc_feature: MA Experiment 20000264 PARAMETER Experiment Name: At_Open_Flower_P Parameter: Age (day) Value: 21
  misc_feature: MA Experiment 20000264 PARAMETER Experiment Name: At_Open_Flower_P Parameter: Plant Line Value: WS
  misc_feature: MA Experiment 20000264 PARAMETER Experiment Name: At_Open_Flower_P Parameter: Tissue Value: Open Flower vs. Whole Plant
  misc_feature: MA Experiment ID: 20000265 Result: Up-regulated in Transcription
  misc_feature: MA Experiment 20000265 PARAMETER Experiment Name: At_Open_Flower_P Parameter: Age (day) Value: 21
  misc_feature: MA Experiment 20000265 PARAMETER Experiment Name: At_Open_Flower_P Parameter: Plant Line Value: WS
  misc_feature: MA Experiment 20000265 PARAMETER Experiment Name: At_Open_Flower_P Parameter: Tissue Value: Closed Flower vs. Whole Plant
  misc_feature: MA Experiment ID: 20000286 Result: Up-regulated in Transcription
  misc_feature: MA Experiment 20000286 PARAMETER Experiment Name: At_Open_Flower_P Parameter: Age (day) Value: 21
  misc_feature: MA Experiment 20000286 PARAMETER Experiment Name: At_Open_Flower_P Parameter: Plant Line Value: WS
  misc_feature: MA Experiment 20000286 PARAMETER Experiment Name: At_Open_Flower_P Parameter: Tissue Value: Half Open vs. Whole Plant
  misc_feature: MA Experiment ID: 20001910 Result: Up-regulated in Transcription
  misc_feature: MA Experiment 20001910 PARAMETER Experiment Name: At_Drought_Reproduction_P Parameter: Age (day) Value: 37
  misc_feature: MA Experiment 20001910 PARAMETER Experiment Name: At_Drought_Reproduction_P Parameter: Organism Value: A. thaliana
  misc_feature: MA Experiment 20001910 PARAMETER Experiment Name: At_Drought_Reproduction_P Parameter: Plant Line Value: WS
  misc_feature: MA Experiment 20001910 PARAMETER Experiment Name: At_Drought_Reproduction_P Parameter: Timepoint (day) Value: 7
  misc_feature: MA Experiment 20001910 PARAMETER Experiment Name: At_Drought_Reproduction_P Parameter: Tissue Value: Flowers
  misc_feature: MA Experiment 20001910 PARAMETER Experiment Name: At_Drought_Reproduction_P Parameter: Treatment Value: Drought vs. No Drought

SEQ ID NO: 33658 - protein, 134 aa, Arabidopsis thaliana; identical to SEQ ID NO: 30068
  peptide (1)..(134): Ceres Seq. ID no. 12482058
  misc_feature (2)..(129): Pfam Name: Profilin Pfam Description: Profilin
  misc_feature (1)..(133): Homolog of NCBI NO: 2129962 NR Description: profilin - common tobacco
  misc_feature (1)..(133): Homolog of NCBI NO: 6469497 NR Description: profilin [Nicotiana tabacum]
  misc_feature (1)..(134): Homolog of NCBI NO: 464471 NR Description: PROFILIN 1 (POLLEN ALLERGEN PHL P 11) (PHL P XI)
  misc_feature (1)..(134): Homolog of NCBI NO: 3914432 NR Description: PROFILIN 2/4 (POLLEN ALLERGEN PHL P 11) (PHL P
  misc_feature (1)..(134): Homolog of NCBI NO: 1942360 NR Description: Birch Pollen Profilin
  misc_feature (1)..(134): Homolog of NCBI NO: 3914446 NR Description: Profilin (Pollen allergen Mer a 1)
  misc_feature (1)..(134): Homolog of NCBI NO: 14423854 NR Description: Profilin
  misc_feature (1)..(134): Homolog of NCBI NO: 28393116 NR Description: putative profilin 3 [Arabidopsis thaliana]
  misc_feature (1)..(134): Homolog of NCBI NO: 15233536 NR Description: profilin 3; protein id: At4g29340.1, supported by
  misc_feature (1)..(134): Homolog of NCBI NO: 15224839 NR Description: profilin 4; protein id: At2g19770.1, supported by

SEQ ID NO: 33659 - protein, 123 aa, Arabidopsis thaliana; identical to SEQ ID NO: 30069
  peptide (1)..(123): Ceres Seq. ID no. 12482059
  misc_feature (1)..(118): Pfam Name: Profilin Pfam Description: Profilin
  misc_feature (1)..(122): Homolog of NCBI NO: 2129962 NR Description: profilin - common tobacco
  misc_feature (1)..(122): Homolog of NCBI NO: 6469497 NR Description: profilin [Nicotiana tabacum]
  misc_feature (1)..(123): Homolog of NCBI NO: 464471 NR Description: PROFILIN 1 (POLLEN ALLERGEN PHL P 11) (PHL P XI)
  misc_feature (1)..(123): Homolog of NCBI NO: 3914432 NR Description: PROFILIN 2/4 (POLLEN ALLERGEN PHL P 11) (PHL P
  misc_feature (1)..(123): Homolog of NCBI NO: 1942360 NR Description: Birch Pollen Profilin
  misc_feature (1)..(123): Homolog of NCBI NO: 3914446 NR Description: Profilin (Pollen allergen Mer a 1)
  misc_feature (1)..(123): Homolog of NCBI NO: 14423854 NR Description: Profilin
  misc_feature (1)..(123): Homolog of NCBI NO: 28393116 NR Description: putative profilin 3 [Arabidopsis thaliana]
  misc_feature (1)..(123): Homolog of NCBI NO: 15233536 NR Description: profilin 3; protein id: At4g29340.1, supported by
  misc_feature (1)..(123): Homolog of NCBI NO: 15224839 NR Description: profilin 4; protein id: At2g19770.1, supported by

SEQ ID NO: 33660 - protein, 81 aa, Arabidopsis thaliana; identical to SEQ ID NO: 30070
  peptide (1)..(81): Ceres Seq. ID no. 12482060
  misc_feature (1)..(76): Pfam Name: Profilin Pfam Description: Profilin
  misc_feature (1)..(80): Homolog of NCBI NO: 2129962 NR Description: profilin - common tobacco
  misc_feature (1)..(80): Homolog of NCBI NO: 6469497 NR Description: profilin [Nicotiana tabacum]
  misc_feature (1)..(81): Homolog of NCBI NO: 464471 NR Description: PROFILIN 1 (POLLEN ALLERGEN PHL P 11) (PHL P XI)
  misc_feature (1)..(81): Homolog of NCBI NO: 3914432 NR Description: PROFILIN 2/4 (POLLEN ALLERGEN PHL P 11) (PHL P
  misc_feature (1)..(81): Homolog of NCBI NO: 1942360 NR Description: Birch Pollen Profilin
  misc_feature (1)..(81): Homolog of NCBI NO: 3914446 NR Description: Profilin (Pollen allergen Mer a 1)
  misc_feature (1)..(81): Homolog of NCBI NO: 14423854 NR Description: Profilin
  misc_feature (1)..(81): Homolog of NCBI NO: 28393116 NR Description: putative profilin 3 [Arabidopsis thaliana]
  misc_feature (1)..(81): Homolog of NCBI NO: 15233536 NR Description: profilin 3; protein id: At4g29340.1, supported by
  misc_feature (1)..(81): Homolog of NCBI NO: 15224839 NR Description: profilin 4; protein id: At2g19770.1, supported by

SEQ ID NO: 33661 - DNA, 1787 bp, Arabidopsis thaliana; identical to SEQ ID NO: 30071
  misc_feature (1)..(1787): Ceres Seq. ID no. 13500097
  misc_feature: MA Experiment ID: 108462 Result: Up-regulated in Transcription
  misc_feature: MA Experiment 108462 PARAMETER Experiment Name: At_Germinating_Seeds_cDNA_P Parameter: Age (day) Value: 2 vs. 0
  misc_feature: MA Experiment 108462 PARAMETER Experiment Name: At_Germinating_Seeds_cDNA_P Parameter: Tissue Value: Germinating Seeds
  misc_feature: MA Experiment ID: 108464 Result: Up-regulated in Transcription
  misc_feature: MA Experiment 108464 PARAMETER Experiment Name: At_Germinating_Seeds_cDNA_P Parameter: Age (day) Value: 4 vs. 0
  misc_feature: MA Experiment 108464 PARAMETER Experiment Name: At_Germinating_Seeds_cDNA_P Parameter: Tissue Value: Germinating Seeds
  misc_feature: MA Experiment ID: 20000185 Result: Up-regulated in Transcription
  misc_feature: MA Experiment 20000185 PARAMETER Experiment Name: At_Roots__P Parameter: Age (day) Value: 7 vs. 21
  misc_feature: MA Experiment 20000185 PARAMETER Experiment Name: At_Roots__P Parameter: Organism Value: A. thaliana
  misc_feature: MA Experiment 20000185 PARAMETER Experiment Name: At_Roots__P Parameter: Tissue Value: Roots vs. Whole Plant
  misc_feature: MA Experiment ID: 20000439 Result: Up-regulated in Transcription
  misc_feature: MA Experiment 20000439 PARAMETER Experiment Name: At_Roots__P Parameter: Age (day) Value: 14 vs. 21
  misc_feature: MA Experiment 20000439 PARAMETER Experiment Name: At_Roots__P Parameter: Organism Value: A. thaliana
  misc_feature: MA Experiment 20000439 PARAMETER Experiment Name: At_Roots__P Parameter: Tissue Value: Roots vs. Whole Plant
  misc_feature: MA Experiment ID: 20000496 Result: Up-regulated in Transcription
  misc_feature: MA Experiment 20000496 PARAMETER Experiment Name: At_Guard_Cells_P Parameter: Harvest Date Value: 7/19/2002
  misc_feature: MA Experiment 20000496 PARAMETER Experiment Name: At_Guard_Cells_P Parameter: Organism Value: Canola
  misc_feature: MA Experiment 20000496 PARAMETER Experiment Name: At_Guard_Cells_P Parameter: Tissue Value: Guard Cells vs. Leaves
  misc_feature: MA Experiment ID: 20000794 Result: Up-regulated in Transcription
  misc_feature: MA Experiment 20000794 PARAMETER Experiment Name: At_Petals_P Parameter: Age (day) Value: 23-25 days
  misc_feature: MA Experiment 20000794 PARAMETER Experiment Name: At_Petals_P Parameter: Plant Line Value: WS
  misc_feature: MA Experiment 20000794 PARAMETER Experiment Name: At_Petals_P Parameter: Tissue Value: Petals vs. Whole plant
  misc_feature: MA Experiment ID: 20001451 Result: Down-regulated in Transcription
  misc_feature: MA Experiment 20001451 PARAMETER Experiment Name: At_Far-red-induction_P Parameter: Age (day) Value: 7
  misc_feature: MA Experiment 20001451 PARAMETER Experiment Name: At_Far-red-induction_P Parameter: Light Value: Far-red vs. White
  misc_feature: MA Experiment 20001451 PARAMETER Experiment Name: At_Far-red-induction_P Parameter: Organism Value: A. thaliana
  misc_feature: MA Experiment 20001451 PARAMETER Experiment Name: At_Far-red-induction_P Parameter: Plant Line Value: Columbia
  misc_feature: MA Experiment 20001451 PARAMETER Experiment Name: At_Far-red-induction_P Parameter: Timepoint (hr) Value: 24
  misc_feature: MA Experiment 20001451 PARAMETER Experiment Name: At_Far-red-induction_P Parameter: Tissue Value: Whole Plant
  misc_feature: MA Experiment ID: 20001905 Result: Up-regulated in Transcription
  misc_feature: MA Experiment 20001905 PARAMETER Experiment Name: At_Drought_Reproduction_P Parameter: Age (day) Value: 40
  misc_feature: MA Experiment 20001905 PARAMETER Experiment Name: At_Drought_Reproduction_P Parameter: Organism Value: A. thaliana
  misc_feature: MA Experiment 20001905 PARAMETER Experiment Name: At_Drought_Reproduction_P Parameter: Plant Line Value: WS
  misc_feature: MA Experiment 20001905 PARAMETER Experiment Name: At_Drought_Reproduction_P Parameter: Timepoint (day) Value: 10
  misc_feature: MA Experiment 20001905 PARAMETER Experiment Name: At_Drought_Reproduction_P Parameter: Tissue Value: Rosettes
  misc_feature: MA Experiment 20001905 PARAMETER Experiment Name: At_Drought_Reproduction_P Parameter: Treatment Value: Drought vs. No Drought

SEQ ID NO: 33662 - protein, 473 aa, Arabidopsis thaliana; identical to SEQ ID NO: 30072
  peptide (1)..(473): Ceres Seq. ID no. 13500098
  misc_feature (78)..(455): Pfam Name: Citrate synthase Pfam Description: Citrate synthase
  misc_feature (1)..(473): Homolog of NCBI NO: 68230 NR Description: citrate (si)-synthase (EC 4.1.3.7) precursor,
  misc_feature (1)..(470): Homolog of NCBI NO: 1556429 NR Description: citrate synthase [Nicotiana tabacum]
  misc_feature (1)..(473): Homolog of NCBI NO: 15982952 NR Description: citrate synthase [Prunus persica]
  misc_feature (1)..(472): Homolog of NCBI NO: 11066954 NR Description: citrate synthase [Oryza sativa]
  misc_feature (1)..(471): Homolog of NCBI NO: 1352088 NR Description: Citrate synthase, mitochondrial precursor
  misc_feature (1)..(464): Homolog of NCBI NO: 40646744 NR Description: mitochondrial citrate synthase precursor [Citrus
  misc_feature (1)..(471): Homolog of NCBI NO: 8928010 NR Description: Citrate synthase, mitochondrial precursor
  misc_feature (1)..(473): Homolog of NCBI NO: 30689693 NR Description: citrate synthase [Arabidopsis thaliana]
  misc_feature (1)..(473): Homolog of NCBI NO: 21553775 NR Description: citrate synthase [Arabidopsis thaliana]
  misc_feature (1)..(473): Homolog of NCBI NO: 18406515 NR Description: citrate synthase [Arabidopsis thaliana]

SEQ ID NO: 33663 - protein, 442 aa, Arabidopsis thaliana; identical to SEQ ID NO: 30073
  peptide (1)..(442): Ceres Seq. ID no. 13500099
  misc_feature (47)..(424): Pfam Name: Citrate synthase Pfam Description: Citrate synthase
  misc_feature (1)..(442): Homolog of NCBI NO: 68230 NR Description: citrate (si)-synthase (EC 4.1.3.7) precursor,
  misc_feature (1)..(439): Homolog of NCBI NO: 1556429 NR Description: citrate synthase [Nicotiana tabacum]
  misc_feature (1)..(442): Homolog of NCBI NO: 15982952 NR Description: citrate synthase [Prunus persica]
  misc_feature (1)..(441): Homolog of NCBI NO: 11066954 NR Description: citrate synthase [Oryza sativa]
  misc_feature (1)..(440): Homolog of NCBI NO: 1352088 NR Description: Citrate synthase, mitochondrial precursor
  misc_feature (1)..(433): Homolog of NCBI NO: 40646744 NR Description: mitochondrial citrate synthase precursor [Citrus
  misc_feature (1)..(440): Homolog of NCBI NO: 8928010 NR Description: Citrate synthase, mitochondrial precursor
  misc_feature (1)..(442): Homolog of NCBI NO: 30689693 NR Description: citrate synthase [Arabidopsis thaliana]
  misc_feature (1)..(442): Homolog of NCBI NO: 21553775 NR Description: citrate synthase [Arabidopsis thaliana]
  misc_feature (1)..(442): Homolog of NCBI NO: 18406515 NR Description: citrate synthase [Arabidopsis thaliana]

SEQ ID NO: 33664 - protein, 400 aa, Arabidopsis thaliana; identical to SEQ ID NO: 30074
  peptide (1)..(400): Ceres Seq. ID no. 13500100
  misc_feature (5)..(382): Pfam Name: Citrate synthase Pfam Description: Citrate synthase
  misc_feature (1)..(400): Homolog of NCBI NO: 68230 NR Description: citrate (si)-synthase (EC 4.1.3.7) precursor,
  misc_feature (1)..(397): Homolog of NCBI NO: 1556429 NR Description: citrate synthase [Nicotiana tabacum]
  misc_feature (1)..(400): Homolog of NCBI NO: 15982952 NR Description: citrate synthase [Prunus persica]
  misc_feature (1)..(399): Homolog of NCBI NO: 11066954 NR Description: citrate synthase [Oryza sativa]
  misc_feature (1)..(398): Homolog of NCBI NO: 1352088 NR Description: Citrate synthase, mitochondrial precursor
  misc_feature (1)..(391): Homolog of NCBI NO: 40646744 NR Description: mitochondrial citrate synthase precursor [Citrus
  misc_feature (1)..(398): Homolog of NCBI NO: 8928010 NR Description: Citrate synthase, mitochondrial precursor
  misc_feature (1)..(400): Homolog of NCBI NO: 30689693 NR Description: citrate synthase [Arabidopsis thaliana]
  misc_feature (1)..(400): Homolog of NCBI NO: 21553775 NR Description: citrate synthase [Arabidopsis thaliana]
  misc_feature (1)..(400): Homolog of NCBI NO: 18406515 NR Description: citrate synthase [Arabidopsis thaliana]

SEQ ID NO: 33665 - DNA, 1556 bp, Arabidopsis thaliana; identical to SEQ ID NO: 30075
  misc_feature (1)..(1556): Ceres Seq. ID no. 12334251
  misc_feature: MA Experiment ID: 108462 Result: Up-regulated in Transcription
  misc_feature: MA Experiment 108462 PARAMETER Experiment Name: At_Germinating_Seeds_cDNA_P Parameter: Age (day) Value: 2 vs. 0
  misc_feature: MA Experiment 108462 PARAMETER Experiment Name: At_Germinating_Seeds_cDNA_P Parameter: Tissue Value: Germinating Seeds
  misc_feature: MA Experiment ID: 108488 Result: Down-regulated in Transcription
  misc_feature: MA Experiment ID: 108594 Result: Up-regulated in Transcription
  misc_feature: MA Experiment 108594 PARAMETER Experiment Name: At_Ler-rhl_Root_cDNA_P Parameter: Plant Line Value: null
  misc_feature: MA Experiment ID: 108608 Result: Up-regulated in Transcription
  misc_feature: MA Experiment 108608 PARAMETER Experiment Name: At_100uM_ABA_cDNA_P Parameter: Timepoint (hr) Value: 1
  misc_feature: MA Experiment 108608 PARAMETER Experiment Name: At_100uM_ABA_cDNA_P Parameter: Tissue Value: Aerial
  misc_feature: MA Experiment 108608 PARAMETER Experiment Name: At_100uM_ABA_cDNA_P Parameter: Treatment Value: 100uM ABA vs. No Treatment
  misc_feature: MA Experiment ID: 20000069 Result: Up-regulated in Transcription
  misc_feature: MA Experiment 20000069 PARAMETER Experiment Name: At_100uM_ABA_Mutants_cDNA_P Parameter: Plant Line Value: CS23
  misc_feature: MA Experiment 20000069 PARAMETER Experiment Name: At_100uM_ABA_Mutants_cDNA_P Parameter: Timepoint (hr) Value: 6
  misc_feature: MA Experiment 20000069 PARAMETER Experiment Name: At_100uM_ABA_Mutants_cDNA_P Parameter: Tissue Value: Aerial
  misc_feature: MA Experiment 20000069 PARAMETER Experiment Name: At_100uM_ABA_Mutants_cDNA_P Parameter: Treatment Value: 100uM ABA vs. No Treatment
  misc_feature: MA Experiment ID: 20000070 Result: Up-regulated in Transcription
  misc_feature: MA Experiment 20000070 PARAMETER Experiment Name: At_100uM_ABA_Mutants_cDNA_P Parameter: Plant Line Value: CS24
  misc_feature: MA Experiment 20000070 PARAMETER Experiment Name: At_100uM_ABA_Mutants_cDNA_P Parameter: Timepoint (hr) Value: 6
  misc_feature: MA Experiment 20000070 PARAMETER Experiment Name: At_100uM_ABA_Mutants_cDNA_P Parameter: Tissue Value: Aerial
  misc_feature: MA Experiment 20000070 PARAMETER Experiment Name: At_100uM_ABA_Mutants_cDNA_P Parameter: Treatment Value: 100uM ABA vs. No Treatment
  misc_feature: MA Experiment ID: 20000086 Result: Up-regulated in Transcription
  misc_feature: MA Experiment 20000086 PARAMETER Experiment Name: At_100uM_ABA_Mutants_cDNA_P Parameter: Plant Line Value: CS22
  misc_feature: MA Experiment 20000086 PARAMETER Experiment Name: At_100uM_ABA_Mutants_cDNA_P Parameter: Timepoint (hr) Value: 6
  misc_feature: MA Experiment 20000086 PARAMETER Experiment Name: At_100uM_ABA_Mutants_cDNA_P Parameter: Tissue Value: Aerial
  misc_feature: MA Experiment 20000086 PARAMETER Experiment Name: At_100uM_ABA_Mutants_cDNA_P Parameter: Treatment Value: 100uM ABA vs. No Treatment
  misc_feature: MA Experiment ID: 20000093 Result: Up-regulated in Transcription
  misc_feature: MA Experiment 20000093 PARAMETER Experiment Name: At_42deg_Heat_cDNA_P Parameter: Temperature (deg C) Value: 42 vs. 22
  misc_feature: MA Experiment 20000093 PARAMETER Experiment Name: At_42deg_Heat_cDNA_P Parameter: Timepoint (hr) Value: 0.5
  misc_feature: MA Experiment 20000093 PARAMETER Experiment Name: At_42deg_Heat_cDNA_P Parameter: Tissue Value: Aerial
  misc_feature: MA Experiment ID: 20000113 Result: Up-regulated in Transcription
  misc_feature: MA Experiment 20000113 PARAMETER Experiment Name: At_42deg_Heat_cDNA_P Parameter: Temperature (deg C) Value: 42 vs. 22
  misc_feature: MA Experiment 20000113 PARAMETER Experiment Name: At_42deg_Heat_cDNA_P Parameter: Timepoint (hr) Value: 8
  misc_feature: MA Experiment 20000113 PARAMETER Experiment Name: At_42deg_Heat_cDNA_P Parameter: Tissue Value: Aerial
  misc_feature: MA Experiment ID: 20000166 Result: Up-regulated in Transcription
  misc_feature: MA Experiment 20000166 PARAMETER Experiment Name: At_100uM_ABA_P Parameter: Age (day) Value: 14
  misc_feature: MA Experiment 20000166 PARAMETER Experiment Name: At_100uM_ABA_P Parameter: Organism Value: A. thaliana
  misc_feature: MA Experiment 20000166 PARAMETER Experiment Name: At_100uM_ABA_P Parameter: Plant Line Value: WS
  misc_feature: MA Experiment 20000166 PARAMETER Experiment Name: At_100uM_ABA_P Parameter: Timepoint (hr) Value: 1
  misc_feature: MA Experiment 20000166 PARAMETER Experiment Name: At_100uM_ABA_P Parameter: Tissue Value: Aerial
  misc_feature: MA Experiment 20000166 PARAMETER Experiment Name: At_100uM_ABA_P Parameter: Treatment Value: 100uM ABA vs. No Treatment
  misc_feature: MA Experiment ID: 20000184 Result: Down-regulated in Transcription
  misc_feature: MA Experiment 20000184 PARAMETER Experiment Name: At_Shoots__P Parameter: Age (day) Value: 7
  misc_feature: MA Experiment 20000184 PARAMETER Experiment Name: At_Shoots__P Parameter: Tissue Value: Shoots vs. Whole Plant
  misc_feature: MA Experiment ID: 20000234 Result: Down-regulated in Transcription
  misc_feature: MA Experiment 20000234 PARAMETER Experiment Name: At_Siliques_P Parameter: Age (day) Value: 21
  misc_feature: MA Experiment 20000234 PARAMETER Experiment Name: At_Siliques_P Parameter: Organism Value: A. thaliana
  misc_feature: MA Experiment 20000234 PARAMETER Experiment Name: At_Siliques_P Parameter: Plant Line Value: WS
  misc_feature: MA Experiment 20000234 PARAMETER Experiment Name: At_Siliques_P Parameter: Tissue Value: Less Than 5mm Siliques vs. Whole Plant
  misc_feature: MA Experiment ID: 20000235 Result: Down-regulated in Transcription
  misc_feature: MA Experiment 20000235 PARAMETER Experiment Name: At_Siliques_P Parameter: Age (day) Value: 21
  misc_feature: MA Experiment 20000235 PARAMETER Experiment Name: At_Siliques_P Parameter: Organism Value: A. thaliana
  misc_feature: MA Experiment 20000235 PARAMETER Experiment Name: At_Siliques_P Parameter: Plant Line Value: WS
  misc_feature: MA Experiment 20000235 PARAMETER Experiment Name: At_Siliques_P Parameter: Tissue Value: 5-10mm Siliques vs. Whole Plant
  misc_feature: MA Experiment ID: 20000264 Result: Down-regulated in Transcription
  misc_feature: MA Experiment 20000264 PARAMETER Experiment Name: At_Open_Flower_P Parameter: Age (day) Value: 21
  misc_feature: MA Experiment 20000264 PARAMETER Experiment Name: At_Open_Flower_P Parameter: Plant Line Value: WS
  misc_feature: MA Experiment 20000264 PARAMETER Experiment Name: At_Open_Flower_P Parameter: Tissue Value: Open Flower vs. Whole Plant
  misc_feature: MA Experiment ID: 20000265 Result: Down-regulated in Transcription
  misc_feature: MA Experiment 20000265 PARAMETER Experiment Name: At_Open_Flower_P Parameter: Age (day) Value: 21
  misc_feature: MA Experiment 20000265 PARAMETER Experiment Name: At_Open_Flower_P Parameter: Plant Line Value: WS
  misc_feature: MA Experiment 20000265 PARAMETER Experiment Name: At_Open_Flower_P Parameter: Tissue Value: Closed Flower vs. Whole Plant
  misc_feature: MA Experiment ID: 20000286 Result: Down-regulated in Transcription
  misc_feature: MA Experiment 20000286 PARAMETER Experiment Name: At_Open_Flower_P Parameter: Age (day) Value: 21
  misc_feature: MA Experiment 20000286 PARAMETER Experiment Name: At_Open_Flower_P Parameter: Plant Line Value: WS
  misc_feature: MA Experiment 20000286 PARAMETER Experiment Name: At_Open_Flower_P Parameter: Tissue Value: Half Open vs. Whole Plant
  misc_feature: MA Experiment ID: 20000436 Result: Up-regulated in Transcription
  misc_feature: MA Experiment 20000436 PARAMETER Experiment Name: At_Drought_P Parameter: Age (day) Value: 7
  misc_feature: MA Experiment 20000436 PARAMETER Experiment Name: At_Drought_P Parameter: Organism Value: A. thaliana
  misc_feature: MA Experiment 20000436 PARAMETER Experiment Name: At_Drought_P Parameter: Plant Line Value: WS
  misc_feature: MA Experiment 20000436 PARAMETER Experiment Name: At_Drought_P Parameter: Timepoint (hr) Value: 12
  misc_feature: MA Experiment 20000436 PARAMETER Experiment Name: At_Drought_P Parameter: Tissue Value: Whole Plant
  misc_feature: MA Experiment 20000436 PARAMETER Experiment Name: At_Drought_P Parameter: Treatment Value: Drought vs. No Drought
  misc_feature: MA Experiment ID: 20000437 Result: Up-regulated in Transcription
  misc_feature: MA Experiment 20000437 PARAMETER Experiment Name: At_Drought_P Parameter: Age (day) Value: 8
  misc_feature: MA Experiment 20000437 PARAMETER Experiment Name: At_Drought_P Parameter: Organism Value: A. thaliana
  misc_feature: MA Experiment 20000437 PARAMETER Experiment Name: At_Drought_P Parameter: Plant Line Value: WS
  misc_feature: MA Experiment 20000437 PARAMETER Experiment Name: At_Drought_P Parameter: Timepoint (hr) Value: 24
  misc_feature: MA Experiment 20000437 PARAMETER Experiment Name: At_Drought_P Parameter: Tissue Value: Whole Plant
  misc_feature: MA Experiment 20000437 PARAMETER Experiment Name: At_Drought_P Parameter: Treatment Value: Drought vs. No Drought
  misc_feature: MA Experiment ID: 20000438 Result: Down-regulated in Transcription
  misc_feature: MA Experiment 20000438 PARAMETER Experiment Name: At_Shoots__P Parameter: Age (day) Value: 14
  misc_feature: MA Experiment 20000438 PARAMETER Experiment Name: At_Shoots__P Parameter: Tissue Value: Shoots vs. Whole Plant
  misc_feature: MA Experiment ID: 20001248 Result: Up-regulated in Transcription
  misc_feature: MA Experiment 20001248 PARAMETER Experiment Name: At_Far-red-induction_P Parameter: Age (day) Value: 7
  misc_feature: MA Experiment 20001248 PARAMETER Experiment Name: At_Far-red-induction_P Parameter: Light Value: Far-red vs. White
  misc_feature: MA Experiment 20001248 PARAMETER Experiment Name: At_Far-red-induction_P Parameter: Organism Value: A. thaliana
  misc_feature: MA Experiment 20001248 PARAMETER Experiment Name: At_Far-red-induction_P Parameter: Plant Line Value: Columbia
  misc_feature: MA Experiment 20001248 PARAMETER Experiment Name: At_Far-red-induction_P Parameter: Timepoint (hr) Value: 4
  misc_feature: MA Experiment 20001248 PARAMETER Experiment Name: At_Far-red-induction_P Parameter: Tissue Value: Whole Plant
  misc_feature: MA Experiment ID: 20001450 Result: Up-regulated in Transcription
  misc_feature: MA Experiment 20001450 PARAMETER Experiment Name: At_Far-red-induction_P Parameter: Age (day) Value: 7
  misc_feature: MA Experiment 20001450 PARAMETER Experiment Name: At_Far-red-induction_P Parameter: Light Value: Far-red vs. White
  misc_feature: MA Experiment 20001450 PARAMETER Experiment Name: At_Far-red-induction_P Parameter: Organism Value: A. thaliana
  misc_feature: MA Experiment 20001450 PARAMETER Experiment Name: At_Far-red-induction_P Parameter: Plant Line Value: Columbia
  misc_feature: MA Experiment 20001450 PARAMETER Experiment Name: At_Far-red-induction_P Parameter: Timepoint (hr) Value: 8
  misc_feature: MA Experiment 20001450 PARAMETER Experiment Name: At_Far-red-induction_P Parameter: Tissue Value: Whole Plant
  misc_feature: MA Experiment ID: 20001451 Result: Up-regulated in Transcription
  misc_feature: MA Experiment 20001451 PARAMETER Experiment Name: At_Far-red-induction_P Parameter: Age (day) Value: 7
  misc_feature: MA Experiment 20001451 PARAMETER Experiment Name: At_Far-red-induction_P Parameter: Light Value: Far-red vs. White
  misc_feature: MA Experiment 20001451 PARAMETER Experiment Name: At_Far-red-induction_P Parameter: Organism Value: A. thaliana
  misc_feature: MA Experiment 20001451 PARAMETER Experiment Name: At_Far-red-induction_P Parameter: Plant Line Value: Columbia
  misc_feature: MA Experiment 20001451 PARAMETER Experiment Name: At_Far-red-induction_P Parameter: Timepoint (hr) Value: 24
  misc_feature: MA Experiment 20001451 PARAMETER Experiment Name: At_Far-red-induction_P Parameter: Tissue Value: Whole Plant
  misc_feature: MA Experiment ID: 20001757 Result: Down-regulated in Transcription
  misc_feature: MA Experiment 20001757 PARAMETER Experiment Name: At_50mM_NH4NO3_L-to-H_P Parameter: Timepoint (hr) Value: 6
  misc_feature: MA Experiment 20001757 PARAMETER Experiment Name: At_50mM_NH4NO3_L-to-H_P Parameter: Tissue Value: Leaf
  misc_feature: MA Experiment 20001757 PARAMETER Experiment Name: At_50mM_NH4NO3_L-to-H_P Parameter: Treatment Value: 50mM NH4NO3 vs 100mM Mannitol

SEQ ID NO: 33666 - protein, 360 aa, Arabidopsis thaliana; identical to SEQ ID NO: 30076
  peptide (1)..(360): Ceres Seq. ID no. 12334252
  misc_feature (247)..(311): Pfam Name: bZIP transcription factor Pfam Description: bZIP transcription factor
  misc_feature (1)..(341): Homolog of NCBI NO: 600863 NR Description: G-box binding factor
  misc_feature (1)..(359): Homolog of NCBI NO: 30690290 NR Description: G-box binding bZIP transcription factor
  misc_feature (1)..(359): Homolog of NCBI NO: 15225953 NR Description: G-box binding bZIP transcription factor
  misc_feature (1)..(217): Homolog of NCBI NO: 7484967 NR Description: G box-binding factor 2 - Arabidopsis thaliana
  misc_feature (13)..(360): Homolog of NCBI NO: 7488605 NR Description: G-Box binding protein - radish (fragment)
  misc_feature (1)..(350): Homolog of NCBI NO: 7488454 NR Description: G-box binding factor 2A - rape
  misc_feature (1)..(360): Homolog of NCBI NO: 7488609 NR Description: G-box binding protein 2A - white mustard
  misc_feature (70)..(360): Homolog of NCBI NO: 7484967 NR Description: G box-binding factor 2 - Arabidopsis thaliana
  misc_feature (1)..(360): Homolog of NCBI NO: 21553776 NR Description: GBF2, G-box binding factor [Arabidopsis thaliana]
  misc_feature (1)..(360): Homolog of NCBI NO: 15234069 NR Description: G-box binding factor(bZIP protein), putative

SEQ ID NO: 33667 - protein, 324 aa, Arabidopsis thaliana; identical to SEQ ID NO: 30077
  peptide (1)..(324): Ceres Seq. ID no. 12334253
  misc_feature (211)..(275): Pfam Name: bZIP transcription factor Pfam Description: bZIP transcription factor
  misc_feature (1)..(305): Homolog of NCBI NO: 600863 NR Description: G-box binding factor
  misc_feature (1)..(323): Homolog of NCBI NO: 30690290 NR Description: G-box binding bZIP transcription factor
  misc_feature (1)..(323): Homolog of NCBI NO: 15225953 NR Description: G-box binding bZIP transcription factor
  misc_feature (1)..(181): Homolog of NCBI NO: 7484967 NR Description: G box-binding factor 2 - Arabidopsis thaliana
  misc_feature (1)..(324): Homolog of NCBI NO: 7488605 NR Description: G-Box binding protein - radish (fragment)
  misc_feature (1)..(314): Homolog of NCBI NO: 7488454 NR Description: G-box binding factor 2A - rape
  misc_feature (1)..(324): Homolog of NCBI NO: 7488609 NR Description: G-box binding protein 2A - white mustard
  misc_feature (34)..(324): Homolog of NCBI NO: 7484967 NR Description: G box-binding factor 2 - Arabidopsis thaliana
  misc_feature (1)..(324): Homolog of NCBI NO: 21553776 NR Description: GBF2, G-box binding factor [Arabidopsis thaliana]
  misc_feature (1)..(324): Homolog of NCBI NO: 15234069 NR Description: G-box binding factor(bZIP protein), putative

SEQ ID NO: 33668 - protein, 296 aa, Arabidopsis thaliana; identical to SEQ ID NO: 30078
  peptide (1)..(296): Ceres Seq. ID no. 12334254
  misc_feature (183)..(247): Pfam Name: bZIP transcription factor Pfam Description: bZIP transcription factor
  misc_feature (1)..(277): Homolog of NCBI NO: 600863 NR Description: G-box binding factor
  misc_feature (1)..(295): Homolog of NCBI NO: 30690290 NR Description: G-box binding bZIP transcription factor
  misc_feature (1)..(295): Homolog of NCBI NO: 15225953 NR Description: G-box binding bZIP transcription factor
  misc_feature (1)..(153): Homolog of NCBI NO: 7484967 NR Description: G box-binding factor 2 - Arabidopsis thaliana
  misc_feature (1)..(296): Homolog of NCBI NO: 7488605 NR Description: G-Box binding protein - radish (fragment)
  misc_feature (1)..(286): Homolog of NCBI NO: 7488454 NR Description: G-box binding factor 2A - rape
  misc_feature (1)..(296): Homolog of NCBI NO: 7488609 NR Description: G-box binding protein 2A - white mustard
  misc_feature (6)..(296): Homolog of NCBI NO: 7484967 NR Description: G box-binding factor 2 - Arabidopsis thaliana
  misc_feature (1)..(296): Homolog of NCBI NO: 21553776 NR Description: GBF2, G-box binding factor [Arabidopsis thaliana]
  misc_feature (1)..(296): Homolog of NCBI NO: 15234069 NR Description: G-box binding factor(bZIP protein), putative

SEQ ID NO: 33669 - DNA, 465 bp, Arabidopsis thaliana; identical to SEQ ID NO: 30079
  misc_feature (1)..(465): Ceres Seq. ID no. 12558719
  misc_feature: MA Experiment ID: 108434 Result: Up-regulated in Transcription
  misc_feature: MA Experiment 108434 PARAMETER Experiment Name: At_Root_Tips_cDNA_P Parameter: Tissue Value: Root Tips
  misc_feature: MA Experiment ID: 108463 Result: Down-regulated in Transcription
  misc_feature: MA Experiment 108463 PARAMETER Experiment Name: At_Germinating_Seeds_cDNA_P Parameter: Age (day) Value: 3 vs. 0
  misc_feature: MA Experiment 108463 PARAMETER Experiment Name: At_Germinating_Seeds_cDNA_P Parameter: Tissue Value: Germinating Seeds
  misc_feature: MA Experiment ID: 108561 Result: Down-regulated in Transcription
  misc_feature: MA Experiment 108561 PARAMETER Experiment Name: At_100uM_ABA_cDNA_P Parameter: Timepoint (hr) Value: 6
  misc_feature: MA Experiment 108561 PARAMETER Experiment Name: At_100uM_ABA_cDNA_P Parameter: Tissue Value: Aerial
  misc_feature: MA Experiment 108561 PARAMETER Experiment Name: At_100uM_ABA_cDNA_P Parameter: Treatment Value: 100uM ABA vs. No Treatment
  misc_feature: MA Experiment ID: 108573 Result: Down-regulated in Transcription
  misc_feature: MA Experiment 108573 PARAMETER Experiment Name: At_Drought_cDNA_P Parameter: Timepoint (hr) Value: 6
  misc_feature: MA Experiment 108573 PARAMETER Experiment Name: At_Drought_cDNA_P Parameter: Tissue Value: Aerial
  misc_feature: MA Experiment 108573 PARAMETER Experiment Name: At_Drought_cDNA_P Parameter: Treatment Value: Drought vs. No Drought
  misc_feature: MA Experiment ID: 20000071 Result: Down-regulated in Transcription
  misc_feature: MA Experiment 20000071 PARAMETER Experiment Name: At_100uM_ABA_Mutants_cDNA_P Parameter: Plant Line Value: CS8104
  misc_feature: MA Experiment 20000071 PARAMETER Experiment Name: At_100uM_ABA_Mutants_cDNA_P Parameter: Timepoint (hr) Value: 6
  misc_feature: MA Experiment 20000071 PARAMETER Experiment Name: At_100uM_ABA_Mutants_cDNA_P Parameter: Tissue Value: Aerial
  misc_feature: MA Experiment 20000071 PARAMETER Experiment Name: At_100uM_ABA_Mutants_cDNA_P Parameter: Treatment Value: 100uM ABA vs. No Treatment
  misc_feature: MA Experiment ID: 20000117 Result: Down-regulated in Transcription
  misc_feature: MA Experiment 20000117 PARAMETER Experiment Name: At_100uM_ABA_Mutants_cDNA_P Parameter: Plant Line Value: Columbia
  misc_feature: MA Experiment 20000117 PARAMETER Experiment Name: At_100uM_ABA_Mutants_cDNA_P Parameter: Timepoint (hr) Value: 6
  misc_feature: MA Experiment 20000117 PARAMETER Experiment Name: At_100uM_ABA_Mutants_cDNA_P Parameter: Tissue Value: Aerial
  misc_feature: MA Experiment 20000117 PARAMETER Experiment Name: At_100uM_ABA_Mutants_cDNA_P Parameter: Treatment Value: 100uM ABA vs. No Treatment
  misc_feature: MA Experiment ID: 20000184 Result: Up-regulated in Transcription
  misc_feature: MA Experiment 20000184 PARAMETER Experiment Name: At_Shoots__P Parameter: Age (day) Value: 7
  misc_feature: MA Experiment 20000184 PARAMETER Experiment Name: At_Shoots__P Parameter: Tissue Value: Shoots vs. Whole Plant
  misc_feature: MA Experiment ID: 20000227 Result: Up-regulated in Transcription
  misc_feature: MA Experiment 20000227 PARAMETER Experiment Name: At_Root-Tips-vs-Tops_P Parameter: Tissue Value: Root Tips vs. Root Tops
  misc_feature: MA Experiment ID: 20000234 Result: Up-regulated in Transcription
  misc_feature: MA Experiment 20000234 PARAMETER Experiment Name: At_Siliques_P Parameter: Age (day) Value: 21
  misc_feature: MA Experiment 20000234 PARAMETER Experiment Name: At_Siliques_P Parameter: Organism Value: A. thaliana
  misc_feature: MA Experiment 20000234 PARAMETER Experiment Name: At_Siliques_P Parameter: Plant Line Value: WS
  misc_feature: MA Experiment 20000234 PARAMETER Experiment Name: At_Siliques_P Parameter: Tissue Value: Less Than 5mm Siliques vs. Whole Plant
  misc_feature: MA Experiment ID: 20000235 Result: Up-regulated in Transcription
  misc_feature: MA Experiment 20000235 PARAMETER Experiment Name: At_Siliques_P Parameter: Age (day) Value: 21
  misc_feature: MA Experiment 20000235 PARAMETER Experiment Name: At_Siliques_P Parameter: Organism Value: A. thaliana
  misc_feature: MA Experiment 20000235 PARAMETER Experiment Name: At_Siliques_P Parameter: Plant Line Value: WS
  misc_feature: MA Experiment 20000235 PARAMETER Experiment Name: At_Siliques_P Parameter: Tissue Value: 5-10mm Siliques vs. Whole Plant
  misc_feature: MA Experiment ID: 20000264 Result: Up-regulated in Transcription
  misc_feature: MA Experiment 20000264 PARAMETER Experiment Name: At_Open_Flower_P Parameter: Age (day) Value: 21
  misc_feature: MA Experiment 20000264 PARAMETER Experiment Name: At_Open_Flower_P Parameter: Plant Line Value: WS
  misc_feature: MA Experiment 20000264 PARAMETER Experiment Name: At_Open_Flower_P Parameter: Tissue Value: Open Flower vs. Whole Plant
  misc_feature: MA Experiment ID: 20000437 Result: Down-regulated in Transcription
  misc_feature: MA Experiment 20000437 PARAMETER Experiment Name: At_Drought_P Parameter: Age (day) Value: 8
  misc_feature: MA Experiment 20000437 PARAMETER Experiment Name: At_Drought_P Parameter: Organism Value: A. thaliana
  misc_feature: MA Experiment 20000437 PARAMETER Experiment Name: At_Drought_P Parameter: Plant Line Value: WS
  misc_feature: MA Experiment 20000437 PARAMETER Experiment Name: At_Drought_P Parameter: Timepoint (hr) Value: 24
  misc_feature: MA Experiment 20000437 PARAMETER Experiment Name: At_Drought_P Parameter: Tissue Value: Whole Plant
  misc_feature: MA Experiment 20000437 PARAMETER Experiment Name: At_Drought_P Parameter: Treatment Value: Drought vs. No Drought
  misc_feature: MA Experiment ID: 20000794 Result: Down-regulated in Transcription
  misc_feature: MA Experiment 20000794 PARAMETER Experiment Name: At_Petals_P Parameter: Age (day) Value: 23-25 days
  misc_feature: MA Experiment 20000794 PARAMETER Experiment Name: At_Petals_P Parameter: Plant Line Value: WS
  misc_feature: MA Experiment 20000794 PARAMETER Experiment Name: At_Petals_P Parameter: Tissue Value: Petals vs. Whole plant
  misc_feature: MA Experiment ID: 20001557 Result: Up-regulated in Transcription
  misc_feature: MA Experiment 20001557 PARAMETER Experiment Name: At_Drought_Soil_Dry_P Parameter: Age (day) Value: 27
  misc_feature: MA Experiment 20001557 PARAMETER Experiment Name: At_Drought_Soil_Dry_P Parameter: Organism Value: A. thaliana
  misc_feature: MA Experiment 20001557 PARAMETER Experiment Name: At_Drought_Soil_Dry_P Parameter: Plant Line Value: WS
  misc_feature: MA Experiment 20001557 PARAMETER Experiment Name: At_Drought_Soil_Dry_P Parameter: Post Timepoint (hr) Value: 3
  misc_feature: MA Experiment 20001557 PARAMETER Experiment Name: At_Drought_Soil_Dry_P Parameter: Post-Treatment Value: Re-Water vs. No Drought
  misc_feature: MA Experiment 20001557 PARAMETER Experiment Name: At_Drought_Soil_Dry_P Parameter: Timepoint (day) Value: 13
  misc_feature: MA Experiment 20001557 PARAMETER Experiment Name: At_Drought_Soil_Dry_P Parameter: Treatment Value: Drought vs. No Drought
  misc_feature: MA Experiment ID: 20001558 Result: Up-regulated in Transcription
  misc_feature: MA Experiment 20001558 PARAMETER Experiment Name: At_Drought_Soil_Dry_P Parameter: Age (day) Value: 27
  misc_feature: MA Experiment 20001558 PARAMETER Experiment Name: At_Drought_Soil_Dry_P Parameter: Organism Value: A. thaliana
  misc_feature: MA Experiment 20001558 PARAMETER Experiment Name: At_Drought_Soil_Dry_P Parameter: Plant Line Value: WS
  misc_feature: MA Experiment 20001558 PARAMETER Experiment Name: At_Drought_Soil_Dry_P Parameter: Post Timepoint (hr) Value: 6
  misc_feature: MA Experiment 20001558 PARAMETER Experiment Name: At_Drought_Soil_Dry_P Parameter: Post-Treatment Value: Re-Water vs. No Drought
  misc_feature: MA Experiment 20001558 PARAMETER Experiment Name: At_Drought_Soil_Dry_P Parameter: Timepoint (day) Value: 13
  misc_feature: MA Experiment 20001558 PARAMETER Experiment Name: At_Drought_Soil_Dry_P Parameter: Treatment Value: Drought vs. No Drought
  misc_feature: MA Experiment ID: 20001560 Result: Up-regulated in Transcription
  misc_feature: MA Experiment 20001560 PARAMETER Experiment Name: At_Drought_Soil_Dry_P Parameter: Age (day) Value: 28
  misc_feature: MA Experiment 20001560 PARAMETER Experiment Name: At_Drought_Soil_Dry_P Parameter: Organism Value: A. thaliana
  misc_feature: MA Experiment 20001560 PARAMETER Experiment Name: At_Drought_Soil_Dry_P Parameter: Plant Line Value: WS
  misc_feature: MA Experiment 20001560 PARAMETER Experiment Name: At_Drought_Soil_Dry_P Parameter: Post Timepoint (hr) Value: None
  misc_feature: MA Experiment 20001560 PARAMETER Experiment Name: At_Drought_Soil_Dry_P Parameter: Post-Treatment Value: None
  misc_feature: MA Experiment 20001560 PARAMETER Experiment Name: At_Drought_Soil_Dry_P Parameter: Timepoint (day) Value: 14
  misc_feature: MA Experiment 20001560 PARAMETER Experiment Name: At_Drought_Soil_Dry_P Parameter: Treatment Value: Drought vs. No Drought
  misc_feature: MA Experiment ID: 20001757 Result: Up-regulated in Transcription
  misc_feature: MA Experiment 20001757 PARAMETER Experiment Name: At_50mM_NH4NO3_L-to-H_P Parameter: Timepoint (hr) Value: 6
  misc_feature: MA Experiment 20001757 PARAMETER Experiment Name: At_50mM_NH4NO3_L-to-H_P Parameter: Tissue Value: Leaf
  misc_feature: MA Experiment 20001757 PARAMETER Experiment Name: At_50mM_NH4NO3_L-to-H_P Parameter: Treatment Value: 50mM NH4NO3 vs 100mM Mannitol

SEQ ID NO: 33670 - protein, 92 aa, Arabidopsis thaliana [sequence omitted]

SEQ ID NO: 33671 - protein, 65 aa, Arabidopsis thaliana; identical to SEQ ID NO: 30081
  peptide (1)..(65): Ceres Seq. ID no. 12558721

SEQ ID NO: 33672 - protein, 64 aa, Arabidopsis thaliana; identical to SEQ ID NO: 30082
  peptide (1)..(64): Ceres Seq. ID no. 12558722
  misc_feature (1)..(61): Homolog of NCBI NO: 33637090 NR Description: N1 [Toxoplasma gondii]
  misc_feature (1)..(60): Homolog of NCBI NO: 7441206 NR Description: ribosomal protein L37a
  misc_feature (1)..(63): Homolog of NCBI NO: 6093889 NR Description: 60S RIBOSOMAL PROTEIN L37A
  misc_feature (1)..(64): Homolog of NCBI NO: 11358898 NR Description: translation initiation factor eIF-4 gamma homolog
  misc_feature (1)..(63): Homolog of NCBI NO: 15228411 NR Description: putative 60S ribosomal protein L37a; protein id:
  misc_feature (1)..(63): Homolog of NCBI NO: 6831602 NR Description: 60S RIBOSOMAL PROTEIN L37A
  misc_feature (1)..(64): Homolog of NCBI NO: 6831607 NR Description: 60S ribosomal protein L37a
  misc_feature (1)..(63): Homolog of NCBI NO: 34911166 NR Description: putative 60S ribosomal protein L37a
  misc_feature (1)..(64): Homolog of NCBI NO: 1173045 NR Description: 60S RIBOSOMAL PROTEIN L37A
  misc_feature (1)..(64): Homolog of NCBI NO: 18411538 NR Description: Expressed protein
  misc_feature (1)..(61): Homolog of NCBI NO: 33637090 NR Description: N1 [Toxoplasma gondii]
  misc_feature (1)..(60): Homolog of NCBI NO: 7441206 NR Description: ribosomal protein L37a
  misc_feature (1)..(63): Homolog of NCBI NO: 6093889 NR Description: 60S RIBOSOMAL PROTEIN L37A
  misc_feature (1)..(64): Homolog of NCBI NO: 11358898 NR Description: translation initiation factor eIF-4 gamma homolog
  misc_feature (1)..(63): Homolog of NCBI NO: 15228411 NR Description: putative 60S ribosomal protein L37a; protein id:
  misc_feature (1)..(63): Homolog of NCBI NO: 6831602 NR Description: 60S RIBOSOMAL PROTEIN L37A
  misc_feature (1)..(64): Homolog of NCBI NO: 6831607 NR Description: 60S ribosomal protein L37a
  misc_feature (1)..(63): Homolog of NCBI NO: 34911166 NR Description: putative 60S ribosomal protein L37a
  misc_feature (1)..(64): Homolog of NCBI NO: 1173045 NR Description: 60S RIBOSOMAL PROTEIN L37A
  misc_feature (1)..(64): Homolog of NCBI NO: 18411538 NR Description: Expressed protein

SEQ ID NO: 33673 - DNA, 1120 bp, Arabidopsis thaliana; identical to SEQ ID NO: 30083
  misc_feature (1)..(1120): Ceres Seq. ID no. 12335201
  misc_feature: MA Experiment ID: 108463 Result: Up-regulated in Transcription
  misc_feature: MA Experiment 108463 PARAMETER Experiment Name: At_Germinating_Seeds_cDNA_P Parameter: Age (day) Value: 3 vs. 0
  misc_feature: MA Experiment 108463 PARAMETER Experiment Name: At_Germinating_Seeds_cDNA_P Parameter: Tissue Value: Germinating Seeds
  misc_feature: MA Experiment ID: 108464 Result: Up-regulated in Transcription
  misc_feature: MA Experiment 108464 PARAMETER Experiment Name: At_Germinating_Seeds_cDNA_P Parameter: Age (day) Value: 4 vs. 0
  misc_feature: MA Experiment 108464 PARAMETER Experiment Name: At_Germinating_Seeds_cDNA_P Parameter: Tissue Value: Germinating Seeds
  misc_feature: MA Experiment ID: 108501 Result: Up-regulated in Transcription
  misc_feature: MA Experiment 108501 PARAMETER Experiment Name: At_ap2_floral_buds_cDNA_P Parameter: Plant Line Value: ap2 (Ler.)
  misc_feature: MA Experiment 108501 PARAMETER Experiment Name: At_ap2_floral_buds_cDNA_P Parameter: Tissue Value: Closed Flower
  misc_feature: MA Experiment ID: 108607 Result: Down-regulated in Transcription
  misc_feature: MA Experiment 108607 PARAMETER Experiment Name: At_100uM_ABA_cDNA_P Parameter: Timepoint (hr) Value: 4
  misc_feature: MA Experiment 108607 PARAMETER Experiment Name: At_100uM_ABA_cDNA_P Parameter: Tissue Value: Aerial
  misc_feature: MA Experiment 108607 PARAMETER Experiment Name: At_100uM_ABA_cDNA_P Parameter: Treatment Value: 100uM ABA vs. No Treatment
  misc_feature: MA Experiment ID: 108668 Result: Down-regulated in Transcription
  misc_feature: MA Experiment 108668 PARAMETER Experiment Name: At_2mM_SA_cDNA_P Parameter: Plant Line Value: WS
  misc_feature: MA Experiment 108668 PARAMETER Experiment Name: At_2mM_SA_cDNA_P Parameter: Timepoint (hr) Value: 6
  misc_feature: MA Experiment 108668 PARAMETER Experiment Name: At_2mM_SA_cDNA_P Parameter: Treatment Value: 2mM SA vs. No Treatment
  misc_feature: MA Experiment ID: 20000112 Result: Down-regulated in Transcription
  misc_feature: MA Experiment 20000112 PARAMETER Experiment Name: At_42deg_Heat_cDNA_P Parameter: Temperature (deg C) Value: 42 vs. 22
  misc_feature: MA Experiment 20000112 PARAMETER Experiment Name: At_42deg_Heat_cDNA_P Parameter: Timepoint (hr) Value: 2
  misc_feature: MA Experiment 20000112 PARAMETER Experiment Name: At_42deg_Heat_cDNA_P Parameter: Tissue Value: Aerial
  misc_feature: MA Experiment ID: 20000117 Result: Down-regulated in Transcription
  misc_feature: MA Experiment 20000117 PARAMETER Experiment Name: At_100uM_ABA_Mutants_cDNA_P Parameter: Plant Line Value: Columbia
  misc_feature: MA Experiment 20000117 PARAMETER Experiment Name: At_100uM_ABA_Mutants_cDNA_P Parameter: Timepoint (hr) Value: 6
  misc_feature: MA Experiment 20000117 PARAMETER Experiment Name: At_100uM_ABA_Mutants_cDNA_P Parameter: Tissue Value: Aerial
  misc_feature: MA Experiment 20000117 PARAMETER Experiment Name: At_100uM_ABA_Mutants_cDNA_P Parameter: Treatment Value: 100uM ABA vs. No Treatment
  misc_feature: MA Experiment ID: 20000144 Result: Down-regulated in Transcription
  misc_feature: MA Experiment 20000144 PARAMETER Experiment Name: At_42deg_Heat_cDNA_P Parameter: Temperature (deg C) Value: 42 vs. 22
  misc_feature: MA Experiment 20000144 PARAMETER Experiment Name: At_42deg_Heat_cDNA_P Parameter: Timepoint (hr) Value: 1
  misc_feature: MA Experiment 20000144 PARAMETER Experiment Name: At_42deg_Heat_cDNA_P Parameter: Tissue Value: Aerial
  misc_feature: MA Experiment ID: 20000171 Result: Down-regulated in Transcription
  misc_feature: MA Experiment 20000171 PARAMETER Experiment Name: At_42deg_Heat_P Parameter: Age (day) Value: 14
  misc_feature: MA Experiment 20000171 PARAMETER Experiment Name: At_42deg_Heat_P Parameter: Organism Value: A. thaliana
  misc_feature: MA Experiment 20000171 PARAMETER Experiment Name: At_42deg_Heat_P Parameter: Plant Line Value: WS
  misc_feature: MA Experiment 20000171 PARAMETER Experiment Name: At_42deg_Heat_P Parameter: Temperature (deg C) Value: 42 vs. 22
  misc_feature: MA Experiment 20000171 PARAMETER Experiment Name: At_42deg_Heat_P Parameter: Timepoint (hr) Value: 1
  misc_feature: MA Experiment 20000171 PARAMETER Experiment Name: At_42deg_Heat_P Parameter: Tissue Value: Aerial
  misc_feature: MA Experiment ID: 20000173 Result: Down-regulated in Transcription
  misc_feature: MA Experiment 20000173 PARAMETER Experiment Name: At_42deg_Heat_P Parameter: Age (day) Value: 14
  misc_feature: MA Experiment 20000173 PARAMETER Experiment Name: At_42deg_Heat_P Parameter: Organism Value: A. thaliana
  misc_feature: MA Experiment 20000173 PARAMETER Experiment Name: At_42deg_Heat_P Parameter: Plant Line Value: WS
  misc_feature: MA Experiment 20000173 PARAMETER Experiment Name: At_42deg_Heat_P Parameter: Temperature (deg C) Value: 42 vs. 22
  misc_feature: MA Experiment 20000173 PARAMETER Experiment Name: At_42deg_Heat_P Parameter: Timepoint (hr) Value: 6
  misc_feature: MA Experiment 20000173 PARAMETER Experiment Name: At_42deg_Heat_P Parameter: Tissue Value: Aerial
  misc_feature: MA Experiment ID: 20000182 Result: Down-regulated in Transcription
  misc_feature: MA Experiment 20000182 PARAMETER Experiment Name: At_2mM_SA_P Parameter: Age (day) Value: 14
  misc_feature: MA Experiment 20000182 PARAMETER Experiment Name: At_2mM_SA_P Parameter: Organism Value: A. thaliana
  misc_feature: MA Experiment 20000182 PARAMETER Experiment Name: At_2mM_SA_P Parameter: Plant Line Value: WS
  misc_feature: MA Experiment 20000182 PARAMETER Experiment Name: At_2mM_SA_P Parameter: Timepoint (hr) Value: 6
  misc_feature: MA Experiment 20000182 PARAMETER Experiment Name: At_2mM_SA_P Parameter: Tissue Value: Aerial
  misc_feature: MA Experiment 20000182 PARAMETER Experiment Name: At_2mM_SA_P Parameter: Treatment Value: 2mM SA vs. No Treatment
  misc_feature: MA Experiment ID: 20000184 Result: Up-regulated in Transcription
  misc_feature: MA Experiment 20000184 PARAMETER Experiment Name: At_Shoots__P Parameter: Age (day) Value: 7
  misc_feature: MA Experiment 20000184 PARAMETER Experiment Name: At_Shoots__P Parameter: Tissue Value: Shoots vs. Whole Plant
  misc_feature: MA Experiment ID: 20000224 Result: Down-regulated in Transcription
  misc_feature: MA Experiment ID: 20000264 Result: Down-regulated in Transcription
  misc_feature: MA Experiment 20000264 PARAMETER Experiment Name: At_Open_Flower_P Parameter: Age (day) Value: 21
  misc_feature: MA Experiment 20000264 PARAMETER Experiment Name: At_Open_Flower_P Parameter: Plant Line Value: WS
  misc_feature: MA Experiment 20000264 PARAMETER Experiment Name: At_Open_Flower_P Parameter: Tissue Value: Open Flower vs. Whole Plant
  misc_feature: MA Experiment ID: 20000265 Result: Down-regulated in Transcription
  misc_feature: MA Experiment 20000265 PARAMETER Experiment Name: At_Open_Flower_P Parameter: Age (day) Value: 21
  misc_feature: MA Experiment 20000265 PARAMETER Experiment Name: At_Open_Flower_P Parameter: Plant Line Value: WS
  misc_feature: MA Experiment 20000265 PARAMETER Experiment Name: At_Open_Flower_P Parameter: Tissue Value: Closed Flower vs. Whole Plant
  misc_feature: MA Experiment ID: 20000286 Result: Down-regulated in Transcription
  misc_feature: MA Experiment 20000286 PARAMETER Experiment Name: At_Open_Flower_P Parameter: Age (day) Value: 21
  misc_feature: MA Experiment 20000286 PARAMETER Experiment Name: At_Open_Flower_P Parameter: Plant Line Value: WS
  misc_feature: MA Experiment 20000286 PARAMETER Experiment Name: At_Open_Flower_P Parameter: Tissue Value: Half Open vs. Whole Plant
  misc_feature: MA Experiment ID: 20000445 Result: Up-regulated in Transcription
  misc_feature: MA Experiment 20000445 PARAMETER Experiment Name: At_100uM_NAA__P Parameter: Age (day) Value: 14
  misc_feature: MA Experiment 20000445 PARAMETER Experiment Name: At_100uM_NAA__P Parameter: Organism Value: A. thaliana
  misc_feature: MA Experiment 20000445 PARAMETER Experiment Name: At_100uM_NAA__P Parameter: Plant Line Value: WS
  misc_feature: MA Experiment 20000445 PARAMETER Experiment Name: At_100uM_NAA__P Parameter: Timepoint (hr) Value: 6
  misc_feature: MA Experiment 20000445 PARAMETER Experiment Name: At_100uM_NAA__P Parameter: Tissue Value: Aerial
  misc_feature: MA Experiment 20000445 PARAMETER Experiment Name: At_100uM_NAA__P Parameter: Treatment Value: 100uM NAA vs. No Treatment
  misc_feature: MA Experiment ID: 20000495 Result: Down-regulated in Transcription
  misc_feature: MA Experiment 20000495 PARAMETER Experiment Name: At_Guard_Cells_P Parameter: Harvest Date Value: 8/2/2002
  misc_feature: MA Experiment 20000495 PARAMETER Experiment Name: At_Guard_Cells_P Parameter: Organism Value: A. thaliana
  misc_feature: MA Experiment 20000495 PARAMETER Experiment Name: At_Guard_Cells_P Parameter: Tissue Value: Guard Cells vs. Leaves
  misc_feature: MA Experiment ID: 20000573 Result: Down-regulated in Transcription
  misc_feature: MA Experiment 20000573 PARAMETER Experiment Name: At_100uM_ABA_Mutants__P Parameter: Organism Value: A. thaliana
  misc_feature: MA Experiment 20000573 PARAMETER Experiment Name: At_100uM_ABA_Mutants__P Parameter: Plant Line Value: CS22 vs. Ler wt
  misc_feature: MA Experiment 20000573 PARAMETER Experiment Name: At_100uM_ABA_Mutants__P Parameter: Timepoint (hr) Value: N/A
  misc_feature: MA Experiment 20000573 PARAMETER Experiment Name: At_100uM_ABA_Mutants__P Parameter: Tissue Value: Whole Plant
  misc_feature: MA Experiment 20000573 PARAMETER Experiment Name: At_100uM_ABA_Mutants__P Parameter: Treatment Value: None
  misc_feature: MA Experiment ID: 20000574 Result: Down-regulated in Transcription
  misc_feature: MA Experiment 20000574 PARAMETER Experiment Name: At_100uM_ABA_Mutants__P Parameter: Organism Value: A. thaliana
  misc_feature: MA Experiment 20000574 PARAMETER Experiment Name: At_100uM_ABA_Mutants__P Parameter: Plant Line Value: CS23 vs. Ler wt
  misc_feature: MA Experiment 20000574 PARAMETER Experiment Name: At_100uM_ABA_Mutants__P Parameter: Timepoint (hr) Value: N/A
  misc_feature: MA Experiment 20000574 PARAMETER Experiment Name: At_100uM_ABA_Mutants__P Parameter: Tissue Value: Whole Plant
  misc_feature: MA Experiment 20000574 PARAMETER Experiment Name: At_100uM_ABA_Mutants__P Parameter: Treatment Value: None
  misc_feature: MA Experiment ID: 20000794 Result: Down-regulated in Transcription
  misc_feature: MA Experiment 20000794 PARAMETER Experiment Name: At_Petals_P Parameter: Age (day) Value: 23-25 days
  misc_feature: MA Experiment 20000794 PARAMETER Experiment Name: At_Petals_P Parameter: Plant Line Value: WS
  misc_feature: MA Experiment 20000794 PARAMETER Experiment Name: At_Petals_P Parameter: Tissue Value: Petals vs. Whole plant
  misc_feature: MA Experiment ID: 20001247 Result: Up-regulated in Transcription
  misc_feature: MA Experiment 20001247 PARAMETER Experiment Name: At_Far-red-induction_P Parameter: Age (day) Value: 7
  misc_feature: MA Experiment 20001247 PARAMETER Experiment Name: At_Far-red-induction_P Parameter: Light Value: Far-red vs. White
  misc_feature: MA Experiment 20001247 PARAMETER Experiment Name: At_Far-red-induction_P Parameter: Organism Value: A. thaliana
  misc_feature: MA Experiment 20001247 PARAMETER Experiment Name: At_Far-red-induction_P Parameter: Plant Line Value: Columbia
  misc_feature: MA Experiment 20001247 PARAMETER Experiment Name: At_Far-red-induction_P Parameter: Timepoint (hr) Value: 1
  misc_feature: MA Experiment 20001247 PARAMETER Experiment Name: At_Far-red-induction_P Parameter: Tissue Value: Whole Plant
  misc_feature: MA Experiment ID: 20001557 Result: Up-regulated in Transcription
  misc_feature: MA Experiment 20001557 PARAMETER Experiment Name: At_Drought_Soil_Dry_P Parameter: Age (day) Value: 27
  misc_feature: MA Experiment 20001557 PARAMETER Experiment Name: At_Drought_Soil_Dry_P Parameter: Organism Value: A. thaliana
  misc_feature: MA Experiment 20001557 PARAMETER Experiment Name: At_Drought_Soil_Dry_P Parameter: Plant Line Value: WS
  misc_feature: MA Experiment 20001557 PARAMETER Experiment Name: At_Drought_Soil_Dry_P Parameter: Post Timepoint (hr) Value: 3
  misc_feature: MA Experiment 20001557 PARAMETER Experiment Name: At_Drought_Soil_Dry_P Parameter: Post-Treatment Value: Re-Water vs. No Drought
  misc_feature: MA Experiment 20001557 PARAMETER Experiment Name: At_Drought_Soil_Dry_P Parameter: Timepoint (day) Value: 13
  misc_feature: MA Experiment 20001557 PARAMETER Experiment Name: At_Drought_Soil_Dry_P Parameter: Treatment Value: Drought vs. No Drought
  misc_feature: MA Experiment ID: 20001558 Result: Up-regulated in Transcription
  misc_feature: MA Experiment 20001558 PARAMETER Experiment Name: At_Drought_Soil_Dry_P Parameter: Age (day) Value: 27
  misc_feature: MA Experiment 20001558 PARAMETER Experiment Name: At_Drought_Soil_Dry_P Parameter: Organism Value: A. thaliana
  misc_feature: MA Experiment 20001558 PARAMETER Experiment Name: At_Drought_Soil_Dry_P Parameter: Plant Line Value: WS
  misc_feature: MA Experiment 20001558 PARAMETER Experiment Name: At_Drought_Soil_Dry_P Parameter: Post Timepoint (hr) Value: 6
  misc_feature: MA Experiment 20001558 PARAMETER Experiment Name: At_Drought_Soil_Dry_P Parameter: Post-Treatment Value: Re-Water vs. No Drought
  misc_feature: MA Experiment 20001558 PARAMETER Experiment Name: At_Drought_Soil_Dry_P Parameter: Timepoint (day) Value: 13
  misc_feature: MA Experiment 20001558 PARAMETER Experiment Name: At_Drought_Soil_Dry_P Parameter: Treatment Value: Drought vs. No Drought
  misc_feature: MA Experiment ID: 20001560 Result: Up-regulated in Transcription
  misc_feature: MA Experiment 20001560 PARAMETER Experiment Name: At_Drought_Soil_Dry_P Parameter: Age (day) Value: 28
  misc_feature: MA Experiment 20001560 PARAMETER Experiment Name: At_Drought_Soil_Dry_P Parameter: Organism Value: A. thaliana
  misc_feature: MA Experiment 20001560 PARAMETER Experiment Name: At_Drought_Soil_Dry_P Parameter: Plant Line Value: WS
  misc_feature: MA Experiment 20001560 PARAMETER Experiment Name: At_Drought_Soil_Dry_P Parameter: Post Timepoint (hr) Value: None
  misc_feature: MA Experiment 20001560 PARAMETER Experiment Name: At_Drought_Soil_Dry_P Parameter: Post-Treatment Value: None
  misc_feature: MA Experiment 20001560 PARAMETER Experiment Name: At_Drought_Soil_Dry_P Parameter: Timepoint (day) Value: 14
  misc_feature: MA Experiment 20001560 PARAMETER Experiment Name: At_Drought_Soil_Dry_P Parameter: Treatment Value: Drought vs. No Drought
  misc_feature: MA Experiment ID: 20001906 Result: Down-regulated in Transcription
  misc_feature: MA Experiment 20001906 PARAMETER Experiment Name: At_Drought_Reproduction_P Parameter: Age (day) Value: 35
  misc_feature: MA Experiment 20001906 PARAMETER Experiment Name: At_Drought_Reproduction_P Parameter: Organism Value: A. thaliana
  misc_feature: MA Experiment 20001906 PARAMETER Experiment Name: At_Drought_Reproduction_P Parameter: Plant Line Value: WS
  misc_feature: MA Experiment 20001906 PARAMETER Experiment Name: At_Drought_Reproduction_P Parameter: Timepoint (day) Value: 5
  misc_feature: MA Experiment 20001906 PARAMETER Experiment Name: At_Drought_Reproduction_P Parameter: Tissue Value: Siliques
  misc_feature: MA Experiment 20001906 PARAMETER Experiment Name: At_Drought_Reproduction_P Parameter: Treatment Value: Drought vs. No Drought
  misc_feature: MA Experiment ID: 20001911 Result: Down-regulated in Transcription
  misc_feature: MA Experiment 20001911 PARAMETER Experiment Name: At_Drought_Reproduction_P Parameter: Age (day) Value: 40
  misc_feature: MA Experiment 20001911 PARAMETER Experiment Name: At_Drought_Reproduction_P Parameter: Organism Value: A. thaliana
  misc_feature: MA Experiment 20001911 PARAMETER Experiment Name: At_Drought_Reproduction_P Parameter: Plant Line Value: WS
  misc_feature: MA Experiment 20001911 PARAMETER Experiment Name: At_Drought_Reproduction_P Parameter: Timepoint (day) Value: 10
  misc_feature: MA Experiment 20001911 PARAMETER Experiment Name: At_Drought_Reproduction_P Parameter: Tissue Value: Flowers
  misc_feature: MA Experiment 20001911 PARAMETER Experiment Name: At_Drought_Reproduction_P Parameter: Treatment Value: Drought vs. No Drought

SEQ ID NO: 33674 - protein, 328 aa, Arabidopsis thaliana; identical to SEQ ID NO: 30084
  peptide (1)..(328): Ceres Seq. ID no. 12335202
  misc_feature (49)..(292): Pfam Name: Peroxidase Pfam Description: Peroxidase
  misc_feature (29)..(327): Homolog of NCBI NO: 32489883 NR Description: OSJNBa0060P14.16 [Oryza sativa (japonica
  misc_feature (19)..(328): Homolog of NCBI NO: 15221670 NR Description: peroxidase, putative; protein id: At1g24110.1
  misc_feature (13)..(328): Homolog of NCBI NO: 15236620 NR Description: peroxidase, putative; protein id: At4g17690.1
  misc_feature (33)..(328): Homolog of NCBI NO: 21593687 NR Description: peroxidase [Arabidopsis thaliana]
  misc_feature (33)..(328): Homolog of NCBI NO: 18422742 NR Description: peroxidase, putative
  misc_feature (33)..(328): Homolog of NCBI NO: 9759442 NR Description: peroxidase [Arabidopsis thaliana]
  misc_feature (54)..(328): Homolog of NCBI NO: 1890317 NR Description: peroxidase ATP26a [Arabidopsis thaliana]
  misc_feature (19)..(328): Homolog of NCBI NO: 15242580 NR Description: peroxidase, putative; protein id: At5g40150.1
  misc_feature (13)..(328): Homolog of NCBI NO: 14334600 NR Description: putative peroxidase [Arabidopsis thaliana]
  misc_feature (13)..(328): Homolog of NCBI NO: 15232929 NR Description: peroxidase, putative

SEQ ID NO: 33675 - protein, 316 aa, Arabidopsis thaliana; identical to SEQ ID NO: 30085
  peptide (1)..(316): Ceres Seq. ID no. 12335203
  misc_feature (37)..(280): Pfam Name: Peroxidase Pfam Description: Peroxidase
  misc_feature (17)..(315): Homolog of NCBI NO: 32489883 NR Description: OSJNBa0060P14.16 [Oryza sativa (japonica
  misc_feature (7)..(316): Homolog of NCBI NO: 15221670 NR Description: peroxidase, putative; protein id: At1g24110.1
  misc_feature (1)..(316): Homolog of NCBI NO: 15236620 NR Description: peroxidase, putative; protein id: At4g17690.1
  misc_feature (21)..(316): Homolog of NCBI NO: 18422742 NR Description: peroxidase, putative
  misc_feature (21)..(316): Homolog of NCBI NO: 21593687 NR Description: peroxidase [Arabidopsis thaliana]
  misc_feature (21)..(316): Homolog of NCBI NO: 9759442 NR Description: peroxidase [Arabidopsis thaliana]
  misc_feature (42)..(316): Homolog of NCBI NO: 1890317 NR Description: peroxidase ATP26a [Arabidopsis thaliana]
  misc_feature (7)..(316): Homolog of NCBI NO: 15242580 NR Description: peroxidase, putative; protein id: At5g40150.1
  misc_feature (1)..(316): Homolog of NCBI NO: 14334600 NR Description: putative peroxidase [Arabidopsis thaliana]
  misc_feature (1)..(316): Homolog of NCBI NO: 15232929 NR Description: peroxidase, putative

SEQ ID NO: 33676 - DNA, 1441 bp, Arabidopsis thaliana; identical to SEQ ID NO: 30086
  misc_feature (1)..(1441): Ceres Seq. ID no. 12385648
  misc_feature: MA Experiment ID: 108577 Result: Up-regulated in Transcription
  misc_feature: MA Experiment 108577 PARAMETER Experiment Name: At_42deg_Heat_cDNA_P Parameter: Temperature (deg C) Value: 42 vs. 22
  misc_feature: MA Experiment 108577 PARAMETER Experiment Name: At_42deg_Heat_cDNA_P Parameter: Timepoint (hr) Value: 6
  misc_feature: MA Experiment 108577 PARAMETER Experiment Name: At_42deg_Heat_cDNA_P Parameter: Tissue Value: Aerial
  misc_feature: MA Experiment ID: 108595 Result: Down-regulated in Transcription
  misc_feature: MA Experiment 108595 PARAMETER Experiment Name: At_Ler-pi_Ovule_cDNA_P Parameter: Plant Line Value: null
  misc_feature: MA Experiment ID: 20000173 Result: Up-regulated in Transcription
  misc_feature: MA Experiment 20000173 PARAMETER Experiment Name: At_42deg_Heat_P Parameter: Age (day) Value: 14
  misc_feature: MA Experiment 20000173 PARAMETER Experiment Name: At_42deg_Heat_P Parameter: Organism Value: A. thaliana
  misc_feature: MA Experiment 20000173 PARAMETER Experiment Name: At_42deg_Heat_P Parameter: Plant Line Value: WS
  misc_feature: MA Experiment 20000173 PARAMETER Experiment Name: At_42deg_Heat_P Parameter: Temperature (deg C) Value: 42 vs. 22
  misc_feature: MA Experiment 20000173 PARAMETER Experiment Name: At_42deg_Heat_P Parameter: Timepoint (hr) Value: 6
  misc_feature: MA Experiment 20000173 PARAMETER Experiment Name: At_42deg_Heat_P Parameter: Tissue Value: Aerial
  misc_feature: MA Experiment ID: 20000184 Result: Down-regulated in Transcription
  misc_feature: MA Experiment 20000184 PARAMETER Experiment Name: At_Shoots__P Parameter: Age (day) Value: 7
  misc_feature: MA Experiment 20000184 PARAMETER Experiment Name: At_Shoots__P Parameter: Tissue Value: Shoots vs. Whole Plant
  misc_feature: MA Experiment ID: 20000235 Result: Down-regulated in Transcription
  misc_feature: MA Experiment 20000235 PARAMETER Experiment Name: At_Siliques_P Parameter: Age (day) Value: 21
  misc_feature: MA Experiment 20000235 PARAMETER Experiment Name: At_Siliques_P Parameter: Organism Value: A. thaliana
  misc_feature: MA Experiment 20000235 PARAMETER Experiment Name: At_Siliques_P Parameter: Plant Line Value: WS
  misc_feature: MA Experiment 20000235 PARAMETER Experiment Name: At_Siliques_P Parameter: Tissue Value: 5-10mm Siliques vs. Whole Plant
  misc_feature: MA Experiment ID: 20000496 Result: Up-regulated in Transcription
  misc_feature: MA Experiment 20000496 PARAMETER Experiment Name: At_Guard_Cells_P Parameter: Harvest Date Value: 7/19/2002
  misc_feature: MA Experiment 20000496 PARAMETER Experiment Name: At_Guard_Cells_P Parameter: Organism Value: Canola
  misc_feature: MA Experiment 20000496 PARAMETER Experiment Name: At_Guard_Cells_P Parameter: Tissue Value: Guard Cells vs. Leaves

SEQ ID NO: 33677 - protein, 296 aa, Arabidopsis thaliana; identical to SEQ ID NO: 30087
  peptide (1)..(296): Ceres Seq. ID no. 12385649
  misc_feature (141)..(289): Homolog of NCBI NO: 34896110 NR Description: P0701D05.9 [Oryza sativa (japonica
  misc_feature (174)..(285): Homolog of NCBI NO: 7488804 NR Description: gda-1 protein - garden pea
  misc_feature (37)..(283): Homolog of NCBI NO: 34913876 NR Description: B1156H12.22 [Oryza sativa (japonica
  misc_feature (87)..(289): Homolog of NCBI NO: 9757950 NR Description: gene_id:MJC20.15~similar to unknown
  misc_feature (47)..(289): Homolog of NCBI NO: 18422167 NR Description: putative protein
  misc_feature (113)..(292): Homolog of NCBI NO: 584825 NR Description: B2 PROTEIN
  misc_feature (82)..(296): Homolog of NCBI NO: 21665866 NR Description: GDA2 protein [Pisum sativum]
  misc_feature (1)..(296): Homolog of NCBI NO: 2369766 NR Description: hypothetical protein [Citrus x paradisi]
  misc_feature (1)..(296): Homolog of NCBI NO: 21592623 NR Description: gda-1, putative [Arabidopsis thaliana]
  misc_feature (1)..(296): Homolog of NCBI NO: 15232081 NR Description: gda-1, putative

SEQ ID NO: 33678 - protein, 261 aa, Arabidopsis thaliana; identical to SEQ ID NO: 30088
  peptide (1)..(261): Ceres Seq. ID no. 12385650
  misc_feature (106)..(254): Homolog of NCBI NO: 34896110 NR Description: P0701D05.9 [Oryza sativa (japonica
  misc_feature (139)..(250): Homolog of NCBI NO: 7488804 NR Description: gda-1 protein - garden pea
  misc_feature (2)..(248): Homolog of NCBI NO: 34913876 NR Description: B1156H12.22 [Oryza sativa (japonica
  misc_feature (52)..(254): Homolog of NCBI NO: 9757950 NR Description: gene_id:MJC20.15~similar to unknown
  misc_feature (12)..(254): Homolog of NCBI NO: 18422167 NR Description: putative protein
  misc_feature (78)..(257): Homolog of NCBI NO: 584825 NR Description: B2 PROTEIN
  misc_feature (47)..(261): Homolog of NCBI NO: 21665866 NR Description: GDA2 protein [Pisum sativum]
  misc_feature (1)..(261): Homolog of NCBI NO: 2369766 NR Description: hypothetical protein [Citrus x paradisi]
  misc_feature (1)..(261): Homolog of NCBI NO: 21592623 NR Description: gda-1, putative [Arabidopsis thaliana]
  misc_feature (1)..(261): Homolog of NCBI NO: 15232081 NR Description: gda-1, putative

SEQ ID NO: 33679 - protein, 256 aa, Arabidopsis thaliana; identical to SEQ ID NO: 30089
  peptide (1)..(256): Ceres Seq. ID no. 12385651
  misc_feature (101)..(249): Homolog of NCBI NO: 34896110 NR Description: P0701D05.9 [Oryza sativa (japonica
  misc_feature (134)..(245): Homolog of NCBI NO: 7488804 NR Description: gda-1 protein - garden pea
  misc_feature (1)..(243): Homolog of NCBI NO: 34913876 NR Description: B1156H12.22 [Oryza sativa (japonica
  misc_feature (47)..(249): Homolog of NCBI NO: 9757950 NR Description: gene_id:MJC20.15~similar to unknown
  misc_feature (7)..(249): Homolog of NCBI NO: 18422167 NR Description: putative protein
  misc_feature (73)..(252): Homolog of NCBI NO: 584825 NR Description: B2 PROTEIN
  misc_feature (42)..(256): Homolog of NCBI NO: 21665866 NR Description: GDA2 protein [Pisum sativum]
  misc_feature (1)..(256): Homolog of NCBI NO: 2369766 NR Description: hypothetical protein [Citrus x paradisi]
  misc_feature (1)..(256): Homolog of NCBI NO: 21592623 NR Description: gda-1, putative [Arabidopsis thaliana]
  misc_feature (1)..(256): Homolog of NCBI NO: 15232081 NR Description: gda-1, putative

SEQ ID NO: 33680 - DNA, 893 bp, Arabidopsis thaliana; identical to SEQ ID NO: 30090
  misc_feature (1)..(893): Ceres Seq. ID no. 12322897
  misc_feature: MA Experiment ID: 108434 Result: Up-regulated in Transcription
  misc_feature: MA Experiment 108434 PARAMETER Experiment Name: At_Root_Tips_cDNA_P Parameter: Tissue Value: Root Tips
  misc_feature: MA Experiment ID: 108462 Result: Down-regulated in Transcription
  misc_feature: MA Experiment 108462 PARAMETER Experiment Name: At_Germinating_Seeds_cDNA_P Parameter: Age (day) Value: 2 vs. 0
  misc_feature: MA Experiment 108462 PARAMETER Experiment Name: At_Germinating_Seeds_cDNA_P Parameter: Tissue Value: Germinating Seeds
  misc_feature: MA Experiment ID: 108463 Result: Down-regulated in Transcription
  misc_feature: MA Experiment 108463 PARAMETER Experiment Name: At_Germinating_Seeds_cDNA_P Parameter: Age (day) Value: 3 vs. 0
  misc_feature: MA Experiment 108463 PARAMETER Experiment Name: At_Germinating_Seeds_cDNA_P Parameter: Tissue Value: Germinating Seeds
  misc_feature: MA Experiment ID: 20000111 Result: Up-regulated in Transcription
  misc_feature: MA Experiment 20000111 PARAMETER Experiment Name: At_42deg_Heat_cDNA_P Parameter: Temperature (deg C) Value: 42 vs. 22
  misc_feature: MA Experiment 20000111 PARAMETER Experiment Name: At_42deg_Heat_cDNA_P Parameter: Timepoint (hr) Value: 6
  misc_feature: MA Experiment 20000111 PARAMETER Experiment Name: At_42deg_Heat_cDNA_P Parameter: Tissue Value: Aerial
  misc_feature: MA Experiment ID: 20000113 Result: Up-regulated in Transcription
  misc_feature: MA Experiment 20000113 PARAMETER Experiment Name: At_42deg_Heat_cDNA_P Parameter: Temperature (deg C) Value: 42 vs. 22
  misc_feature: MA Experiment 20000113 PARAMETER Experiment Name: At_42deg_Heat_cDNA_P Parameter: Timepoint (hr) Value: 8
  misc_feature: MA Experiment 20000113 PARAMETER Experiment Name: At_42deg_Heat_cDNA_P Parameter: Tissue Value: Aerial
  misc_feature: MA Experiment ID: 20000173 Result: Up-regulated in Transcription
  misc_feature: MA Experiment 20000173 PARAMETER Experiment Name: At_42deg_Heat_P Parameter: Age (day) Value: 14
  misc_feature: MA Experiment 20000173 PARAMETER Experiment Name: At_42deg_Heat_P Parameter: Organism Value: A. thaliana
  misc_feature: MA Experiment 20000173 PARAMETER Experiment Name: At_42deg_Heat_P Parameter: Plant Line Value: WS
  misc_feature: MA Experiment 20000173 PARAMETER Experiment Name: At_42deg_Heat_P Parameter: Temperature (deg C) Value: 42 vs. 22
  misc_feature: MA Experiment 20000173 PARAMETER Experiment Name: At_42deg_Heat_P Parameter: Timepoint (hr) Value: 6
  misc_feature: MA Experiment 20000173 PARAMETER Experiment Name: At_42deg_Heat_P Parameter: Tissue Value: Aerial
  misc_feature: MA Experiment ID: 20000794 Result: Down-regulated in Transcription
  misc_feature: MA Experiment 20000794 PARAMETER Experiment Name: At_Petals_P Parameter: Age (day) Value: 23-25 days
  misc_feature: MA Experiment 20000794 PARAMETER Experiment Name: At_Petals_P Parameter: Plant Line Value: WS
  misc_feature: MA Experiment 20000794 PARAMETER Experiment Name: At_Petals_P Parameter: Tissue Value: Petals vs. Whole plant
  misc_feature: MA Experiment ID: 20001560 Result: Up-regulated in Transcription
  misc_feature: MA Experiment 20001560 PARAMETER Experiment Name: At_Drought_Soil_Dry_P Parameter: Age (day) Value: 28
  misc_feature: MA Experiment 20001560 PARAMETER Experiment Name: At_Drought_Soil_Dry_P Parameter: Organism Value: A. thaliana
  misc_feature: MA Experiment 20001560 PARAMETER Experiment Name: At_Drought_Soil_Dry_P Parameter: Plant Line Value: WS
  misc_feature: MA Experiment 20001560 PARAMETER Experiment Name: At_Drought_Soil_Dry_P Parameter: Post Timepoint (hr) Value: None
  misc_feature: MA Experiment 20001560 PARAMETER Experiment Name: At_Drought_Soil_Dry_P Parameter: Post-Treatment Value: None
  misc_feature: MA Experiment 20001560 PARAMETER Experiment Name: At_Drought_Soil_Dry_P Parameter: Timepoint (day) Value: 14
  misc_feature: MA Experiment 20001560 PARAMETER Experiment Name: At_Drought_Soil_Dry_P Parameter: Treatment Value: Drought vs. No Drought

SEQ ID NO: 33681 - protein, 246 aa, Arabidopsis thaliana; identical to SEQ ID NO: 30091
  peptide (1)..(246): Ceres Seq. ID no. 12322898
  misc_feature (15)..(243): Homolog of NCBI NO: 15230785 NR Description: DAG protein, putative; protein id: At3g06790.1
  misc_feature (15)..(243): Homolog of NCBI NO: 27754695 NR Description: putative DAG protein [Arabidopsis thaliana]
  misc_feature (72)..(244): Homolog of NCBI NO: 38344141 NR Description: OSJNBa0041A02.8 [Oryza sativa (japonica
  misc_feature (64)..(246): Homolog of NCBI NO: 34897972 NR Description: putative plastid protein [Oryza sativa (japonica
  misc_feature (55)..(246): Homolog of NCBI NO: 2440029 NR Description: DAL1 protein [Arabidopsis thaliana]
  misc_feature (55)..(246): Homolog of NCBI NO: 21617909 NR Description: plastid protein [Arabidopsis thaliana]
  misc_feature (55)..(246): Homolog of NCBI NO: 25370552 NR Description: DAG protein homolog [imported] - Arabidopsis
  misc_feature (55)..(246): Homolog of NCBI NO: 15226108 NR Description: plastid protein
  misc_feature (15)..(246): Homolog of NCBI NO: 15223247 NR Description: plastid protein, putative
  misc_feature (15)..(246): Homolog of NCBI NO: 15226934 NR Description: unknown protein

SEQ ID NO: 33682 - protein, 232 aa, Arabidopsis thaliana; identical to SEQ ID NO: 30092
  peptide (1)..(232): Ceres Seq. ID no. 12322899
  misc_feature (1)..(229): Homolog of NCBI NO: 15230785 NR Description: DAG protein, putative; protein id: At3g06790.1
  misc_feature (1)..(229): Homolog of NCBI NO: 27754695 NR Description: putative DAG protein [Arabidopsis thaliana]
  misc_feature (58)..(230): Homolog of NCBI NO: 38344141 NR Description: OSJNBa0041A02.8 [Oryza sativa (japonica
  misc_feature (50)..(232): Homolog of NCBI NO: 34897972 NR Description: putative plastid protein [Oryza sativa (japonica
  misc_feature (41)..(232): Homolog of NCBI NO: 2440029 NR Description: DAL1 protein [Arabidopsis thaliana]
  misc_feature (41)..(232): Homolog of NCBI NO: 21617909 NR Description: plastid protein [Arabidopsis thaliana]
  misc_feature (41)..(232): Homolog of NCBI NO: 25370552 NR Description: DAG protein homolog [imported] - Arabidopsis
  misc_feature (41)..(232): Homolog of NCBI NO: 15226108 NR Description: plastid protein
  misc_feature (1)..(232): Homolog of NCBI NO: 15223247 NR Description: plastid protein, putative
  misc_feature (1)..(232): Homolog of NCBI NO: 15226934 NR Description: unknown protein

SEQ ID NO: 33683 - protein, 170 aa, Arabidopsis thaliana; identical to SEQ ID NO: 30093
  peptide (1)..(170): Ceres Seq. ID no. 12322900
  misc_feature (1)..(167): Homolog of NCBI NO: 15230785 NR Description: DAG protein, putative; protein id: At3g06790.1
  misc_feature (1)..(167): Homolog of NCBI NO: 27754695 NR Description: putative DAG protein [Arabidopsis thaliana]
  misc_feature (1)..(168): Homolog of NCBI NO: 38344141 NR Description: OSJNBa0041A02.8 [Oryza sativa (japonica
  misc_feature (1)..(170): Homolog of NCBI NO: 34897972 NR Description: putative plastid protein [Oryza sativa (japonica
  misc_feature (1)..(170): Homolog of NCBI NO: 2440029 NR Description: DAL1 protein [Arabidopsis thaliana]
  misc_feature (1)..(170): Homolog of NCBI NO: 21617909 NR Description: plastid protein [Arabidopsis thaliana]
  misc_feature (1)..(170): Homolog of NCBI NO: 25370552 NR Description: DAG protein homolog [imported] - Arabidopsis
  misc_feature (1)..(170): Homolog of NCBI NO: 15226108 NR Description: plastid protein
  misc_feature (1)..(170): Homolog of NCBI NO: 15223247 NR Description: plastid protein, putative
  misc_feature (1)..(170): Homolog of NCBI NO: 15226934 NR Description: unknown protein

SEQ ID NO: 33684 - DNA, 866 bp, Arabidopsis thaliana; identical to SEQ ID NO: 30094
  misc_feature (1)..(866): Ceres Seq. ID no. 12396917
  misc_feature: MA Experiment ID: 108573 Result: Down-regulated in Transcription
  misc_feature: MA Experiment 108573 PARAMETER Experiment Name: At_Drought_cDNA_P Parameter: Timepoint (hr) Value: 6
  misc_feature: MA Experiment 108573 PARAMETER Experiment Name: At_Drought_cDNA_P Parameter: Tissue Value: Aerial
  misc_feature: MA Experiment 108573 PARAMETER Experiment Name: At_Drought_cDNA_P Parameter: Treatment Value: Drought vs. No Drought
  misc_feature: MA Experiment ID: 20000224 Result: Up-regulated in Transcription
  misc_feature: MA Experiment ID: 20000235 Result: Up-regulated in Transcription
  misc_feature: MA Experiment 20000235 PARAMETER Experiment Name: At_Siliques_P Parameter: Age (day) Value: 21
  misc_feature: MA Experiment 20000235 PARAMETER Experiment Name: At_Siliques_P Parameter: Organism Value: A. thaliana
  misc_feature: MA Experiment 20000235 PARAMETER Experiment Name: At_Siliques_P Parameter: Plant Line Value: WS
  misc_feature: MA Experiment 20000235 PARAMETER Experiment Name: At_Siliques_P Parameter: Tissue Value: 5-10mm Siliques vs. Whole Plant
  misc_feature: MA Experiment ID: 20001905 Result: Down-regulated in Transcription
  misc_feature: MA Experiment 20001905 PARAMETER Experiment Name: At_Drought_Reproduction_P Parameter: Age (day) Value: 40
  misc_feature: MA Experiment 20001905 PARAMETER Experiment Name: At_Drought_Reproduction_P Parameter: Organism Value: A. thaliana
  misc_feature: MA Experiment 20001905 PARAMETER Experiment Name: At_Drought_Reproduction_P Parameter: Plant Line Value: WS
  misc_feature: MA Experiment 20001905 PARAMETER Experiment Name: At_Drought_Reproduction_P Parameter: Timepoint (day) Value: 10
  misc_feature: MA Experiment 20001905 PARAMETER Experiment Name: At_Drought_Reproduction_P Parameter: Tissue Value: Rosettes
  misc_feature: MA Experiment 20001905 PARAMETER Experiment Name: At_Drought_Reproduction_P Parameter: Treatment Value: Drought vs. No Drought
  misc_feature: MA Experiment ID: 20001911 Result: Down-regulated in Transcription
  misc_feature: MA Experiment 20001911 PARAMETER Experiment Name: At_Drought_Reproduction_P Parameter: Age (day) Value: 40
  misc_feature: MA Experiment 20001911 PARAMETER Experiment Name: At_Drought_Reproduction_P Parameter: Organism Value: A. thaliana
  misc_feature: MA Experiment 20001911 PARAMETER Experiment Name: At_Drought_Reproduction_P Parameter: Plant Line Value: WS
  misc_feature: MA Experiment 20001911 PARAMETER Experiment Name: At_Drought_Reproduction_P Parameter: Timepoint (day) Value: 10
  misc_feature: MA Experiment 20001911 PARAMETER Experiment Name: At_Drought_Reproduction_P Parameter: Tissue Value: Flowers
  misc_feature: MA Experiment 20001911 PARAMETER Experiment Name: At_Drought_Reproduction_P Parameter: Treatment Value: Drought vs. No Drought

SEQ ID NO: 33685 - protein, 183 aa, Arabidopsis thaliana; identical to SEQ ID NO: 30095
  peptide (1)..(183): Ceres Seq. ID no. 12396918
  misc_feature (14)..(166): Homolog of NCBI NO: 18400504 NR Description: expressed protein
  misc_feature (12)..(166): Homolog of NCBI NO: 25407700 NR Description: hypothetical protein AT4g30990 [imported] -
  misc_feature (12)..(166): Homolog of NCBI NO: 18417716 NR Description: Expressed protein
  misc_feature (1)..(171): Homolog of NCBI NO: 34897026 NR Description: unknown protein [Oryza sativa (japonica
  misc_feature (8)..(177): Homolog of NCBI NO: 27922919 NR Description: unknown protein [Phytophthora sojae]
  misc_feature (1)..(183): Homolog of NCBI NO: 25364108 NR Description: hypothetical protein [imported] - Arabidopsis
  misc_feature (1)..(183): Homolog of NCBI NO: 18390477 NR Description: expressed protein
  misc_feature (1)..(183): Homolog of NCBI NO: 7487433 NR Description: hypothetical protein At2g32580 [imported] -
  misc_feature (1)..(183): Homolog of NCBI NO: 21553781 NR Description: unknown [Arabidopsis thaliana]
  misc_feature (1)..(183): Homolog of NCBI NO: 18403016 NR Description: expressed protein

SEQ ID NO: 33686 - protein, 165 aa, Arabidopsis thaliana; identical to SEQ ID NO: 30096
  peptide (1)..(165): Ceres Seq. ID no. 12396919
  misc_feature (1)..(148): Homolog of NCBI NO: 18400504 NR Description: expressed protein
  misc_feature (1)..(148): Homolog of NCBI NO: 25407700 NR Description: hypothetical protein AT4g30990 [imported] -
  misc_feature (1)..(148): Homolog of NCBI NO: 18417716 NR Description: Expressed protein
  misc_feature (1)..(153): Homolog of NCBI NO: 34897026 NR Description: unknown protein [Oryza sativa (japonica
  misc_feature (1)..(159): Homolog of NCBI NO: 27922919 NR Description: unknown protein [Phytophthora sojae]
  misc_feature (1)..(165): Homolog of NCBI NO: 25364108 NR Description: hypothetical protein [imported] - Arabidopsis
  misc_feature (1)..(165): Homolog of NCBI NO: 18390477 NR Description: expressed protein
  misc_feature (1)..(165): Homolog of NCBI NO: 7487433 NR Description: hypothetical protein At2g32580 [imported] -
  misc_feature (1)..(165): Homolog of NCBI NO: 21553781 NR Description: unknown [Arabidopsis thaliana]
  misc_feature (1)..(165): Homolog of NCBI NO: 18403016 NR Description: expressed protein

SEQ ID NO: 33687 - DNA, 783 bp, Arabidopsis thaliana; identical to SEQ ID NO: 30097
  misc_feature (1)..(783): Ceres Seq. ID no. 12323067
  misc_feature: MA Experiment ID: 108474 Result: Down-regulated in Transcription
  misc_feature: MA Experiment 108474 PARAMETER Experiment Name: At_Drought_Flowers_cDNA_P Parameter: Timepoint (hr) Value: null
  misc_feature: MA Experiment 108474 PARAMETER Experiment Name: At_Drought_Flowers_cDNA_P Parameter: Treatment Value: Drought vs. No Drought
  misc_feature: MA Experiment ID: 108501 Result: Down-regulated in Transcription
  misc_feature: MA Experiment 108501 PARAMETER Experiment Name: At_ap2_floral_buds_cDNA_P Parameter: Plant Line Value: ap2 (Ler.)
  misc_feature: MA Experiment 108501 PARAMETER Experiment Name: At_ap2_floral_buds_cDNA_P Parameter: Tissue Value: Closed Flower
  misc_feature: MA Experiment ID: 20000087 Result: Up-regulated in Transcription
  misc_feature: MA Experiment 20000087 PARAMETER Experiment Name: At_100uM_ABA_Mutants_cDNA_P Parameter: Plant Line Value: WS
  misc_feature: MA Experiment 20000087 PARAMETER Experiment Name: At_100uM_ABA_Mutants_cDNA_P Parameter: Timepoint (hr) Value: 6
  misc_feature: MA Experiment 20000087 PARAMETER Experiment Name: At_100uM_ABA_Mutants_cDNA_P Parameter: Tissue Value: Aerial
  misc_feature: MA Experiment 20000087 PARAMETER Experiment Name: At_100uM_ABA_Mutants_cDNA_P Parameter: Treatment Value: 100uM ABA vs. No Treatment
  misc_feature: MA Experiment ID: 20000314 Result: Down-regulated in Transcription
  misc_feature: MA Experiment 20000314 PARAMETER Experiment Name: At_14day_Shoots-Roots_Sub_P Parameter: Age (day) Value: 14
  misc_feature: MA Experiment 20000314 PARAMETER Experiment Name: At_14day_Shoots-Roots_Sub_P Parameter: Organism Value: A. thaliana
  misc_feature: MA Experiment 20000314 PARAMETER Experiment Name: At_14day_Shoots-Roots_Sub_P Parameter: Plant Line Value: WS
  misc_feature: MA Experiment 20000314 PARAMETER Experiment Name: At_14day_Shoots-Roots_Sub_P Parameter: Tissue Value: Roots vs. Whole Plant
  misc_feature: MA Experiment ID: 20000315 Result: Down-regulated in Transcription
  misc_feature: MA Experiment 20000315 PARAMETER Experiment Name: At_14day_Shoots-Roots_Sub_P Parameter: Age (day) Value: 14
  misc_feature: MA Experiment 20000315 PARAMETER Experiment Name: At_14day_Shoots-Roots_Sub_P Parameter: Organism Value: A. thaliana
  misc_feature: MA Experiment 20000315 PARAMETER Experiment Name: At_14day_Shoots-Roots_Sub_P Parameter: Plant Line Value: WS
  misc_feature: MA Experiment 20000315 PARAMETER Experiment Name: At_14day_Shoots-Roots_Sub_P Parameter: Tissue Value: Shoots vs. Whole Plant
  misc_feature: MA Experiment ID: 20000355 Result: Down-regulated in Transcription
  misc_feature: MA Experiment 20000355 PARAMETER Experiment Name: At_Siliques_Sub_P Parameter: Age (day) Value: 21
  misc_feature: MA Experiment 20000355 PARAMETER Experiment Name: At_Siliques_Sub_P Parameter: Organism Value: A. thaliana
  misc_feature: MA Experiment 20000355 PARAMETER Experiment Name: At_Siliques_Sub_P Parameter: Plant Line Value: WS
  misc_feature: MA Experiment 20000355 PARAMETER Experiment Name: At_Siliques_Sub_P Parameter: Tissue Value: Less Than 5mm Siliques vs. Whole Plant
  misc_feature: MA Experiment ID: 20000440 Result: Up-regulated in Transcription
  misc_feature: MA Experiment 20000440 PARAMETER Experiment Name: At_Closed-Flower__Sub_P Parameter: Tissue Value: Closed Flower vs. Whole Plant

SEQ ID NO: 33688 - protein, 184 aa, Arabidopsis thaliana; identical to SEQ ID NO: 30098
  peptide (1)..(184): Ceres Seq. ID no. 12323068
  misc_feature (1)..(169): Pfam Name: Caleosin related protein Pfam Description: Caleosin related protein
  misc_feature (1)..(171): Homolog of NCBI NO: 34538473 NR Description: caleosin 1 [Hordeum vulgare]
  misc_feature (1)..(174): Homolog of NCBI NO: 34902470 NR Description: Putative abscisic acid-induced protein - rice
  misc_feature (1)..(177): Homolog of NCBI NO: 37652831 NR Description: calcium binding protein [Fagus sylvatica]
  misc_feature (26)..(184): Homolog of NCBI NO: 15220688 NR Description: Ca2+-binding EF-hand common family protein,
  misc_feature (1)..(175): Homolog of NCBI NO: 21617961 NR Description: unknown [Arabidopsis thaliana]
  misc_feature (1)..(175): Homolog of NCBI NO: 18409651 NR Description: Ca2+-binding EF-hand common family protein,
  misc_feature (1)..(177): Homolog of NCBI NO: 21593851 NR Description: unknown [Arabidopsis thaliana]
  misc_feature (1)..(177): Homolog of NCBI NO: 18409649 NR Description: Ca2+-binding EF-hand common family protein,
  misc_feature (1)..(184): Homolog of NCBI NO: 9295714 NR Description: F26F24.9 [Arabidopsis thaliana]
  misc_feature (1)..(184): Homolog of NCBI NO: 15220687 NR Description: pollen coat EF-hand protein

SEQ ID NO: 33689 - protein, 138 aa, Arabidopsis thaliana; identical to SEQ ID NO: 30099
  peptide (1)..(138): Ceres Seq. ID no. 12323069
  misc_feature (1)..(123): Pfam Name: Caleosin related protein Pfam Description: Caleosin related protein
  misc_feature (1)..(125): Homolog of NCBI NO: 34538473 NR Description: caleosin 1 [Hordeum vulgare]
  misc_feature (1)..(128): Homolog of NCBI NO: 34902470 NR Description: Putative abscisic acid-induced protein - rice
  misc_feature (1)..(131): Homolog of NCBI NO: 37652831 NR Description: calcium binding protein [Fagus sylvatica]
  misc_feature (1)..(138): Homolog of NCBI NO: 15220688 NR Description: Ca2+-binding EF-hand common family protein,
  misc_feature (1)..(129): Homolog of NCBI NO: 21617961 NR Description: unknown [Arabidopsis thaliana]
  misc_feature (1)..(129): Homolog of NCBI NO: 18409651 NR Description: Ca2+-binding EF-hand common family protein,
  misc_feature (1)..(131): Homolog of NCBI NO: 21593851 NR Description: unknown [Arabidopsis thaliana]
  misc_feature (1)..(131): Homolog of NCBI NO: 18409649 NR Description: Ca2+-binding EF-hand common family protein,
  misc_feature (1)..(138): Homolog of NCBI NO: 9295714 NR Description: F26F24.9 [Arabidopsis thaliana]
  misc_feature (1)..(138): Homolog of NCBI NO: 15220687 NR Description: pollen coat EF-hand protein

SEQ ID NO: 33690 - protein, 111 aa, Arabidopsis thaliana; identical to SEQ ID NO: 30100
  peptide (1)..(111): Ceres Seq. ID no. 12323070
  misc_feature (1)..(96): Pfam Name: Caleosin related protein Pfam Description: Caleosin related protein
  misc_feature (1)..(98): Homolog of NCBI NO: 34538473 NR Description: caleosin 1 [Hordeum vulgare]
  misc_feature (1)..(101): Homolog of NCBI NO: 34902470 NR Description: Putative abscisic acid-induced protein - rice
  misc_feature (1)..(104): Homolog of NCBI NO: 37652831 NR Description: calcium binding protein [Fagus sylvatica]
  misc_feature (1)..(111): Homolog of NCBI NO: 15220688 NR Description: Ca2+-binding EF-hand common family protein,
  misc_feature (1)..(102): Homolog of NCBI NO: 21617961 NR Description: unknown [Arabidopsis thaliana]
  misc_feature (1)..(102): Homolog of NCBI NO: 18409651 NR Description: Ca2+-binding EF-hand common family protein,
  misc_feature (1)..(104): Homolog of NCBI NO: 21593851 NR Description: unknown [Arabidopsis thaliana]
  misc_feature (1)..(104): Homolog of NCBI NO: 18409649 NR Description: Ca2+-binding EF-hand common family protein,
  misc_feature (1)..(111): Homolog of NCBI NO: 9295714 NR Description: F26F24.9 [Arabidopsis thaliana]
  misc_feature (1)..(111): Homolog of NCBI NO: 15220687 NR Description: pollen coat EF-hand protein

SEQ ID NO: 33691 - DNA, 1493 bp, Arabidopsis thaliana; identical to SEQ ID NO: 30101
  misc_feature (1)..(1493): Ceres Seq. ID no. 13648561
  misc_feature: MA Experiment ID: 20000179 Result: Up-regulated in Transcription
  misc_feature: MA Experiment 20000179 PARAMETER Experiment Name: At_Germinating_Seeds_P Parameter: Age (hr) Value: 6 vs. 0
  misc_feature: MA Experiment 20000179 PARAMETER Experiment Name: At_Germinating_Seeds_P Parameter: Tissue Value: Germinating Seeds
  misc_feature: MA Experiment ID: 20000180 Result: Up-regulated in Transcription
  misc_feature: MA Experiment 20000180 PARAMETER Experiment Name: At_Germinating_Seeds_P Parameter: Age (hr) Value: 24 vs. 0
  misc_feature: MA Experiment 20000180 PARAMETER Experiment Name: At_Germinating_Seeds_P Parameter: Tissue Value: Germinating Seeds
  misc_feature: MA Experiment ID: 20000227 Result: Up-regulated in Transcription
  misc_feature: MA Experiment 20000227 PARAMETER Experiment Name: At_Root-Tips-vs-Tops_P Parameter: Tissue Value: Root Tips vs. Root Tops
  misc_feature: MA Experiment ID: 20000794 Result: Down-regulated in Transcription
  misc_feature: MA Experiment 20000794 PARAMETER Experiment Name: At_Petals_P Parameter: Age (day) Value: 23-25 days
  misc_feature: MA Experiment 20000794 PARAMETER Experiment Name: At_Petals_P Parameter: Plant Line Value: WS
  misc_feature: MA Experiment 20000794 PARAMETER Experiment Name: At_Petals_P Parameter: Tissue Value: Petals vs. Whole plant
  misc_feature: MA Experiment ID: 20001559 Result: Down-regulated in Transcription
  misc_feature: MA Experiment 20001559 PARAMETER Experiment Name: At_Drought_Soil_Dry_P Parameter: Age (day) Value: 28
  misc_feature: MA Experiment 20001559 PARAMETER Experiment Name: At_Drought_Soil_Dry_P Parameter: Organism Value: A. thaliana
  misc_feature: MA Experiment 20001559 PARAMETER Experiment Name: At_Drought_Soil_Dry_P Parameter: Plant Line Value: WS
  misc_feature: MA Experiment 20001559 PARAMETER Experiment Name: At_Drought_Soil_Dry_P Parameter: Post Timepoint (hr) Value: 29
  misc_feature: MA Experiment 20001559 PARAMETER Experiment Name: At_Drought_Soil_Dry_P Parameter: Post-Treatment Value: Re-Water vs. No Drought
  misc_feature: MA Experiment 20001559 PARAMETER Experiment Name: At_Drought_Soil_Dry_P Parameter: Timepoint (day) Value: 14
  misc_feature: MA Experiment 20001559 PARAMETER Experiment Name: At_Drought_Soil_Dry_P Parameter: Treatment Value: Drought vs. No Drought
  misc_feature: MA Experiment ID: 20001906 Result: Down-regulated in Transcription
  misc_feature: MA Experiment 20001906 PARAMETER Experiment Name: At_Drought_Reproduction_P Parameter: Age (day) Value: 35
  misc_feature: MA Experiment 20001906 PARAMETER Experiment Name: At_Drought_Reproduction_P Parameter: Organism Value: A. thaliana
  misc_feature: MA Experiment 20001906 PARAMETER Experiment Name: At_Drought_Reproduction_P Parameter: Plant Line Value: WS
  misc_feature: MA Experiment 20001906 PARAMETER Experiment Name: At_Drought_Reproduction_P Parameter: Timepoint (day) Value: 5
  misc_feature: MA Experiment 20001906 PARAMETER Experiment Name: At_Drought_Reproduction_P Parameter: Tissue Value: Siliques
  misc_feature: MA Experiment 20001906 PARAMETER Experiment Name: At_Drought_Reproduction_P Parameter: Treatment Value: Drought vs. No Drought
  misc_feature: MA Experiment ID: 20001908 Result: Down-regulated in Transcription
  misc_feature: MA Experiment 20001908 PARAMETER Experiment Name: At_Drought_Reproduction_P Parameter: Age (day) Value: 40
  misc_feature: MA Experiment 20001908 PARAMETER Experiment Name: At_Drought_Reproduction_P Parameter: Organism Value: A. thaliana
  misc_feature: MA Experiment 20001908 PARAMETER Experiment Name: At_Drought_Reproduction_P Parameter: Plant Line Value: WS
  misc_feature: MA Experiment 20001908 PARAMETER Experiment Name: At_Drought_Reproduction_P Parameter: Timepoint (day) Value: 10
  misc_feature: MA Experiment 20001908 PARAMETER Experiment Name: At_Drought_Reproduction_P Parameter: Tissue Value: Siliques
  misc_feature: MA Experiment 20001908 PARAMETER Experiment Name: At_Drought_Reproduction_P Parameter: Treatment Value: Drought vs. No Drought
  misc_feature: MA Experiment ID: 20001911 Result: Down-regulated in Transcription
  misc_feature: MA Experiment 20001911 PARAMETER Experiment Name: At_Drought_Reproduction_P Parameter: Age (day) Value: 40
  misc_feature: MA Experiment 20001911 PARAMETER Experiment Name: At_Drought_Reproduction_P Parameter: Organism Value: A. thaliana
  misc_feature: MA Experiment 20001911 PARAMETER Experiment Name: At_Drought_Reproduction_P Parameter: Plant Line Value: WS
  misc_feature: MA Experiment 20001911 PARAMETER Experiment Name: At_Drought_Reproduction_P Parameter: Timepoint (day) Value: 10
  misc_feature: MA Experiment 20001911 PARAMETER Experiment Name: At_Drought_Reproduction_P Parameter: Tissue Value: Flowers
  misc_feature: MA Experiment 20001911 PARAMETER Experiment Name: At_Drought_Reproduction_P Parameter: Treatment Value: Drought vs. No Drought

SEQ ID NO: 33692 - protein, 384 aa, Arabidopsis thaliana; identical to SEQ ID NO: 30102
  peptide (1)..(384): Ceres Seq. ID no. 13648562
  misc_feature (76)..(347): Pfam Name: Polyprenyl synthetase Pfam Description: Polyprenyl synthetase
  misc_feature (76)..(347): Pfam Name: Polyprenyl synthetase Pfam Description: Polyprenyl synthetase
  misc_feature (44)..(384): Homolog of NCBI NO: 14488053 NR Description: farnesyl diphosphate synthase [Mentha x piperita]
  misc_feature (45)..(384): Homolog of NCBI NO: 1922251 NR Description: farnesyl pyrophosphate synthase [Gossypium
  misc_feature (45)..(384): Homolog of NCBI NO: 7433992 NR Description: farnesyl-pyrophosphate synthetase - Para rubber
  misc_feature (45)..(384): Homolog of NCBI NO: 1346029 NR Description: Farnesyl pyrophosphate synthetase 2 (FPP
  misc_feature (45)..(384): Homolog of NCBI NO: 20135548 NR Description: farnesyl pyrophosphate synthase [Malus x
  misc_feature (44)..(384): Homolog of NCBI NO: 14488053 NR Description: farnesyl diphosphate synthase [Mentha x piperita]
  misc_feature (45)..(384): Homolog of NCBI NO: 7433992 NR Description: farnesyl-pyrophosphate synthetase - Para rubber
  misc_feature (45)..(384): Homolog of NCBI NO: 20135548 NR Description: farnesyl pyrophosphate synthase [Malus x
  misc_feature (1)..(384): Homolog of NCBI NO: 15238801 NR Description: farnesyl pyrophosphate synthetase 1 (FPS1)
  misc_feature (42)..(384): Homolog of NCBI NO: 1146159 NR Description: farnesyl diphosphate synthase short form
  misc_feature (42)..(384): Homolog of NCBI NO: 1076319 NR Description: farnesyl-pyrophosphate synthetase FPS1 -
  misc_feature (45)..(384): Homolog of NCBI NO: 15236002 NR Description: farnesyl pyrophosphate synthetase 2 (FPS2)
  misc_feature (45)..(384): Homolog of NCBI NO: 1346028 NR Description: Farnesyl pyrophosphate synthetase 1 (FPP
  misc_feature (45)..(384): Homolog of NCBI NO: 1346029 NR Description: Farnesyl pyrophosphate synthetase 2 (FPP
  misc_feature (45)..(384): Homolog of NCBI NO: 1922251 NR Description: farnesyl pyrophosphate synthase [Gossypium
  misc_feature (45)..(384): Homolog of NCBI NO: 1346028 NR Description: Farnesyl pyrophosphate synthetase 1 (FPP
  misc_feature (45)..(384): Homolog of NCBI NO: 15236002 NR Description: farnesyl pyrophosphate synthetase 2 (FPS2)
  misc_feature (42)..(384): Homolog of NCBI NO: 1076319 NR Description: farnesyl-pyrophosphate synthetase FPS1 -
  misc_feature (42)..(384): Homolog of NCBI NO: 1146159 NR Description: farnesyl diphosphate synthase short form
  misc_feature (1)..(384): Homolog of NCBI NO: 15238801 NR Description: farnesyl pyrophosphate synthetase 1 (FPS1)

SEQ ID NO: 33693 - protein, 343 aa, Arabidopsis thaliana; identical to SEQ ID NO: 30103
  peptide (1)..(343): Ceres Seq. ID no. 13648563
  misc_feature (35)..(306): Pfam Name: Polyprenyl synthetase Pfam Description: Polyprenyl synthetase
  misc_feature (35)..(306): Pfam Name: Polyprenyl synthetase Pfam Description: Polyprenyl synthetase
  misc_feature (3)..(343): Homolog of NCBI NO: 14488053 NR Description: farnesyl diphosphate synthase [Mentha x piperita]
  misc_feature (4)..(343): Homolog of NCBI NO: 1922251 NR Description: farnesyl pyrophosphate synthase [Gossypium
  misc_feature (4)..(343): Homolog of NCBI NO: 7433992 NR Description: farnesyl-pyrophosphate synthetase - Para rubber
  misc_feature (4)..(343): Homolog of NCBI NO: 1346029 NR Description: Farnesyl pyrophosphate synthetase 2 (FPP
  misc_feature (4)..(343): Homolog of NCBI NO: 20135548 NR Description: farnesyl pyrophosphate synthase [Malus x
  misc_feature (3)..(343): Homolog of NCBI NO: 14488053 NR Description: farnesyl diphosphate synthase [Mentha x piperita]
  misc_feature (4)..(343): Homolog of NCBI NO: 7433992 NR Description: farnesyl-pyrophosphate synthetase - Para rubber
  misc_feature (4)..(343): Homolog of NCBI NO: 20135548 NR Description: farnesyl pyrophosphate synthase [Malus x
  misc_feature (1)..(343): Homolog of NCBI NO: 15238801 NR Description: farnesyl pyrophosphate synthetase 1 (FPS1)
  misc_feature (1)..(343): Homolog of NCBI NO: 1146159 NR Description: farnesyl diphosphate synthase short form
  misc_feature (1)..(343): Homolog of NCBI NO: 1076319 NR Description: farnesyl-pyrophosphate synthetase FPS1 -
  misc_feature (4)..(343): Homolog of NCBI NO: 15236002 NR Description: farnesyl pyrophosphate synthetase 2 (FPS2)
  misc_feature (4)..(343): Homolog of NCBI NO: 1346028 NR Description: Farnesyl pyrophosphate synthetase 1 (FPP
  misc_feature (4)..(343): Homolog of NCBI NO: 1346029 NR Description: Farnesyl pyrophosphate synthetase 2 (FPP
  misc_feature (4)..(343): Homolog of NCBI NO: 1922251 NR Description: farnesyl pyrophosphate synthase [Gossypium
  misc_feature (4)..(343): Homolog of NCBI NO: 1346028 NR Description: Farnesyl pyrophosphate synthetase 1 (FPP
  misc_feature (4)..(343): Homolog of NCBI NO: 15236002 NR Description: farnesyl pyrophosphate synthetase 2 (FPS2)
  misc_feature (1)..(343): Homolog of NCBI NO: 1076319 NR Description: farnesyl-pyrophosphate synthetase FPS1 -
  misc_feature (1)..(343): Homolog of NCBI NO: 1146159 NR Description: farnesyl diphosphate synthase short form
  misc_feature (1)..(343): Homolog of NCBI NO: 15238801 NR Description: farnesyl pyrophosphate synthetase 1 (FPS1)

SEQ ID NO: 33694 - protein, 305 aa, Arabidopsis thaliana; identical to SEQ ID NO: 30104
  peptide (1)..(305): Ceres Seq. ID no. 13648564
  misc_feature (1)..(268): Pfam Name: Polyprenyl synthetase Pfam Description: Polyprenyl synthetase
  misc_feature (1)..(268): Pfam Name: Polyprenyl synthetase Pfam Description: Polyprenyl synthetase
  misc_feature (1)..(305): Homolog of NCBI NO: 14488053 NR Description: farnesyl diphosphate synthase [Mentha x piperita]
  misc_feature (1)..(305): Homolog of NCBI NO: 1922251 NR Description: farnesyl pyrophosphate synthase [Gossypium
  misc_feature (1)..(305): Homolog of NCBI NO: 7433992 NR Description: farnesyl-pyrophosphate synthetase - Para rubber
  misc_feature (1)..(305): Homolog of NCBI NO: 1346029 NR Description: Farnesyl pyrophosphate synthetase 2 (FPP
  misc_feature (1)..(305): Homolog of NCBI NO: 20135548 NR Description: farnesyl pyrophosphate synthase [Malus x
  misc_feature (1)..(305): Homolog of NCBI NO: 14488053 NR Description: farnesyl diphosphate synthase [Mentha x piperita]
  misc_feature (1)..(305): Homolog of NCBI NO: 7433992 NR Description: farnesyl-pyrophosphate synthetase - Para rubber
  misc_feature (1)..(305): Homolog of NCBI NO: 20135548 NR Description: farnesyl pyrophosphate synthase [Malus x
  misc_feature (1)..(305): Homolog of NCBI NO: 15238801 NR Description: farnesyl pyrophosphate synthetase 1 (FPS1)
  misc_feature (1)..(305): Homolog of NCBI NO: 1146159 NR Description: farnesyl diphosphate synthase short form
  misc_feature (1)..(305): Homolog of NCBI NO: 1076319 NR Description: farnesyl-pyrophosphate synthetase FPS1 -
  misc_feature (1)..(305): Homolog of NCBI NO: 15236002 NR Description: farnesyl pyrophosphate synthetase 2 (FPS2)
  misc_feature (1)..(305): Homolog of NCBI NO: 1346028 NR Description: Farnesyl pyrophosphate synthetase 1 (FPP
  misc_feature (1)..(305): Homolog of NCBI NO: 1346029 NR Description: Farnesyl pyrophosphate synthetase 2 (FPP
  misc_feature (1)..(305): Homolog of NCBI NO: 1922251 NR Description: farnesyl pyrophosphate synthase [Gossypium
  misc_feature (1)..(305): Homolog of NCBI NO: 1346028 NR Description: Farnesyl pyrophosphate synthetase 1 (FPP
  misc_feature (1)..(305): Homolog of NCBI NO: 15236002 NR Description: farnesyl pyrophosphate synthetase 2 (FPS2)
  misc_feature (1)..(305): Homolog of NCBI NO: 1076319 NR Description: farnesyl-pyrophosphate synthetase FPS1 -
  misc_feature (1)..(305): Homolog of NCBI NO: 1146159 NR Description: farnesyl diphosphate synthase short form
  misc_feature (1)..(305): Homolog of NCBI NO: 15238801 NR Description: farnesyl pyrophosphate synthetase 1 (FPS1)

SEQ ID NO: 33695 - DNA, 716 bp, Arabidopsis thaliana; identical to SEQ ID NO: 30105
  misc_feature (1)..(716): Ceres Seq. ID no. 12396924
  misc_feature: MA Experiment ID: 108488 Result: Down-regulated in Transcription
  misc_feature: MA Experiment ID: 108595 Result: Up-regulated in Transcription
  misc_feature: MA Experiment 108595 PARAMETER Experiment Name: At_Ler-pi_Ovule_cDNA_P Parameter: Plant Line Value: null
  misc_feature: MA Experiment ID: 20000069 Result: Up-regulated in Transcription
  misc_feature: MA Experiment 20000069 PARAMETER Experiment Name: At_100uM_ABA_Mutants_cDNA_P Parameter: Plant Line Value: CS23
  misc_feature: MA Experiment 20000069 PARAMETER Experiment Name: At_100uM_ABA_Mutants_cDNA_P Parameter: Timepoint (hr) Value: 6
  misc_feature: MA Experiment 20000069 PARAMETER Experiment Name: At_100uM_ABA_Mutants_cDNA_P Parameter: Tissue Value: Aerial
  misc_feature: MA Experiment 20000069 PARAMETER Experiment Name: At_100uM_ABA_Mutants_cDNA_P Parameter: Treatment Value: 100uM ABA vs. No Treatment
  misc_feature: MA Experiment ID: 20000070 Result: Up-regulated in Transcription
  misc_feature: MA Experiment 20000070 PARAMETER Experiment Name: At_100uM_ABA_Mutants_cDNA_P Parameter: Plant Line Value: CS24
  misc_feature: MA Experiment 20000070 PARAMETER Experiment Name: At_100uM_ABA_Mutants_cDNA_P Parameter: Timepoint (hr) Value: 6
  misc_feature: MA Experiment 20000070 PARAMETER Experiment Name: At_100uM_ABA_Mutants_cDNA_P Parameter: Tissue Value: Aerial
  misc_feature: MA Experiment 20000070 PARAMETER Experiment Name: At_100uM_ABA_Mutants_cDNA_P Parameter: Treatment Value: 100uM ABA vs. No Treatment
  misc_feature: MA Experiment ID: 20000071 Result: Up-regulated in Transcription
  misc_feature: MA Experiment 20000071 PARAMETER Experiment Name: At_100uM_ABA_Mutants_cDNA_P Parameter: Plant Line Value: CS8104
  misc_feature: MA Experiment 20000071 PARAMETER Experiment Name: At_100uM_ABA_Mutants_cDNA_P Parameter: Timepoint (hr) Value: 6
  misc_feature: MA Experiment 20000071 PARAMETER Experiment Name: At_100uM_ABA_Mutants_cDNA_P Parameter: Tissue Value: Aerial
  misc_feature: MA Experiment 20000071 PARAMETER Experiment Name: At_100uM_ABA_Mutants_cDNA_P Parameter: Treatment Value: 100uM ABA vs. No Treatment
  misc_feature: MA Experiment ID: 20000072 Result: Up-regulated in Transcription
  misc_feature: MA Experiment 20000072 PARAMETER Experiment Name: At_100uM_ABA_Mutants_cDNA_P Parameter: Plant Line Value: CS8105
  misc_feature: MA Experiment 20000072 PARAMETER Experiment Name: At_100uM_ABA_Mutants_cDNA_P Parameter: Timepoint (hr) Value: 6
  misc_feature: MA Experiment 20000072 PARAMETER Experiment Name: At_100uM_ABA_Mutants_cDNA_P Parameter: Tissue Value: Aerial
  misc_feature: MA Experiment 20000072 PARAMETER Experiment Name: At_100uM_ABA_Mutants_cDNA_P Parameter: Treatment Value: 100uM ABA vs. No Treatment
  misc_feature: MA Experiment ID: 20000086 Result: Up-regulated in Transcription
  misc_feature: MA Experiment 20000086 PARAMETER Experiment Name: At_100uM_ABA_Mutants_cDNA_P Parameter: Plant Line Value: CS22
  misc_feature: MA Experiment 20000086 PARAMETER Experiment Name: At_100uM_ABA_Mutants_cDNA_P Parameter: Timepoint (hr) Value: 6
  misc_feature: MA Experiment 20000086 PARAMETER Experiment Name: At_100uM_ABA_Mutants_cDNA_P Parameter: Tissue Value: Aerial
  misc_feature: MA Experiment 20000086 PARAMETER Experiment Name: At_100uM_ABA_Mutants_cDNA_P Parameter: Treatment Value: 100uM ABA vs. No Treatment
  misc_feature: MA Experiment ID: 20000087 Result: Up-regulated in Transcription
  misc_feature: MA Experiment 20000087 PARAMETER Experiment Name: At_100uM_ABA_Mutants_cDNA_P Parameter: Plant Line Value: WS
  misc_feature: MA Experiment 20000087 PARAMETER Experiment Name: At_100uM_ABA_Mutants_cDNA_P Parameter: Timepoint (hr) Value: 6
  misc_feature: MA Experiment 20000087 PARAMETER Experiment Name: At_100uM_ABA_Mutants_cDNA_P Parameter: Tissue Value: Aerial
  misc_feature: MA Experiment 20000087 PARAMETER Experiment Name: At_100uM_ABA_Mutants_cDNA_P Parameter: Treatment Value: 100uM ABA vs. No Treatment
  misc_feature: MA Experiment ID: 20000088 Result: Up-regulated in Transcription
  misc_feature: MA Experiment 20000088 PARAMETER Experiment Name: At_100uM_ABA_Mutants_cDNA_P Parameter: Plant Line Value: Landsberg
  misc_feature: MA Experiment 20000088 PARAMETER Experiment Name: At_100uM_ABA_Mutants_cDNA_P Parameter: Timepoint (hr) Value: 6
  misc_feature: MA Experiment 20000088 PARAMETER Experiment Name: At_100uM_ABA_Mutants_cDNA_P Parameter: Tissue Value: Aerial
  misc_feature: MA Experiment 20000088 PARAMETER Experiment Name: At_100uM_ABA_Mutants_cDNA_P Parameter: Treatment Value: 100uM ABA vs. No Treatment
  misc_feature: MA Experiment ID: 20000089 Result: Up-regulated in Transcription
  misc_feature: MA Experiment ID: 20000090 Result: Up-regulated in Transcription
  misc_feature: MA Experiment ID: 20000184 Result: Down-regulated in Transcription
  misc_feature: MA Experiment 20000184 PARAMETER Experiment Name: At_Shoots__P Parameter: Age (day) Value: 7
  misc_feature: MA Experiment 20000184 PARAMETER Experiment Name: At_Shoots__P Parameter: Tissue Value: Shoots vs. Whole Plant
  misc_feature: MA Experiment ID: 20000438 Result: Down-regulated in Transcription
  misc_feature: MA Experiment 20000438 PARAMETER Experiment Name: At_Shoots__P Parameter: Age (day) Value: 14
  misc_feature: MA Experiment 20000438 PARAMETER Experiment Name: At_Shoots__P Parameter: Tissue Value: Shoots vs. Whole Plant

SEQ ID NO: 33696 - protein, 149 aa, Arabidopsis thaliana; identical to SEQ ID NO: 27678
  peptide (1)..(149): Ceres Seq. ID no. 12396925
  misc_feature (12)..(40): Pfam Name: EF hand Pfam Description: EF hand
  misc_feature (3)..(149): Homolog of NCBI NO: 29150153 NR Description: calcium-sensing GFP analog [synthetic construct]
  misc_feature (1)..(149): Homolog of NCBI NO: 3121848 NR Description: CALMODULIN
  misc_feature (1)..(149): Homolog of NCBI NO: 1076793 NR Description: calmodulin cam2 - maize
  misc_feature (1)..(149): Homolog of NCBI NO: 34304715 NR Description: calmodulin 4 [Daucus carota]
  misc_feature (1)..(149): Homolog of NCBI NO: 15229784 NR Description: calmodulin 7
  misc_feature (1)..(149): Homolog of NCBI NO: 20186 NR Description: calmodulin [Oryza sativa]
  misc_feature (1)..(149): Homolog of NCBI NO: 2809481 NR Description: calmodulin [Oryza sativa]
  misc_feature (1)..(149): Homolog of NCBI NO: 115515 NR Description: Calmodulin
  misc_feature (1)..(149): Homolog of NCBI NO: 479693 NR Description: calmodulin 4 - Arabidopsis thaliana
  misc_feature (1)..(149): Homolog of NCBI NO: 15219652 NR Description: calmodulin-4

SEQ ID NO: 33697 - protein, 113 aa, Arabidopsis thaliana; identical to SEQ ID NO: 27679
  peptide (1)..(113): Ceres Seq. ID no. 12396926
  misc_feature (1)..(113): Homolog of NCBI NO: 29150153 NR Description: calcium-sensing GFP analog [synthetic construct]
  misc_feature (1)..(113): Homolog of NCBI NO: 3121848 NR Description: CALMODULIN
  misc_feature (1)..(113): Homolog of NCBI NO: 1076793 NR Description: calmodulin cam2 - maize
  misc_feature (1)..(113): Homolog of NCBI NO: 34304715 NR Description: calmodulin 4 [Daucus carota]
  misc_feature (1)..(113): Homolog of NCBI NO: 15229784 NR Description: calmodulin 7
  misc_feature (1)..(113): Homolog of NCBI NO: 20186 NR Description: calmodulin [Oryza sativa]
  misc_feature (1)..(113): Homolog of NCBI NO: 2809481 NR Description: calmodulin [Oryza sativa]
  misc_feature (1)..(113): Homolog of NCBI NO: 115515 NR Description: Calmodulin
  misc_feature (1)..(113): Homolog of NCBI NO: 479693 NR Description: calmodulin 4 - Arabidopsis thaliana
  misc_feature (1)..(113): Homolog of NCBI NO: 15219652 NR Description: calmodulin-4

SEQ ID NO: 33698 - protein, 98 aa, Arabidopsis thaliana; identical to SEQ ID NO: 27680
  peptide (1)..(98): Ceres Seq. ID no. 12396927
  misc_feature (1)..(98): Homolog of NCBI NO: 29150153 NR Description: calcium-sensing GFP analog [synthetic construct]
  misc_feature (1)..(98): Homolog of NCBI NO: 3121848 NR Description: CALMODULIN
  misc_feature (1)..(98): Homolog of NCBI NO: 1076793 NR Description: calmodulin cam2 - maize
  misc_feature (1)..(98): Homolog of NCBI NO: 34304715 NR Description: calmodulin 4 [Daucus carota]
  misc_feature (1)..(98): Homolog of NCBI NO: 15229784 NR Description: calmodulin 7
  misc_feature (1)..(98): Homolog of NCBI NO: 20186 NR Description: calmodulin [Oryza sativa]
  misc_feature (1)..(98): Homolog of NCBI NO: 2809481 NR Description: calmodulin [Oryza sativa]
  misc_feature (1)..(98): Homolog of NCBI NO: 115515 NR Description: Calmodulin
  misc_feature (1)..(98): Homolog of NCBI NO: 479693 NR Description: calmodulin 4 - Arabidopsis thaliana
  misc_feature (1)..(98): Homolog of NCBI NO: 15219652 NR Description: calmodulin-4

SEQ ID NO: 33699 - DNA, 1578 bp, Arabidopsis thaliana; identical to SEQ ID NO: 30109
  misc_feature (1)..(1578): Ceres Seq. ID no. 13487069
  misc_feature: MA Experiment ID: 108473 Result: Down-regulated in Transcription
  misc_feature: MA Experiment 108473 PARAMETER Experiment Name: At_Drought_Flowers_cDNA_P Parameter: Timepoint (hr) Value: 7 d
  misc_feature: MA Experiment 108473 PARAMETER Experiment Name: At_Drought_Flowers_cDNA_P Parameter: Tissue Value: Flower
  misc_feature: MA Experiment 108473 PARAMETER Experiment Name: At_Drought_Flowers_cDNA_P Parameter: Treatment Value: Drought vs. No Drought
  misc_feature: MA Experiment ID: 108488 Result: Up-regulated in Transcription
  misc_feature: MA Experiment ID: 108561 Result: Down-regulated in Transcription
  misc_feature: MA Experiment 108561 PARAMETER Experiment Name: At_100uM_ABA_cDNA_P Parameter: Timepoint (hr) Value: 6
  misc_feature: MA Experiment 108561 PARAMETER Experiment Name: At_100uM_ABA_cDNA_P Parameter: Tissue Value: Aerial
  misc_feature: MA Experiment 108561 PARAMETER Experiment Name: At_100uM_ABA_cDNA_P Parameter: Treatment Value: 100uM ABA vs. No Treatment
  misc_feature: MA Experiment ID: 108576 Result: Down-regulated in Transcription
  misc_feature: MA Experiment 108576 PARAMETER Experiment Name: At_42deg_Heat_cDNA_P Parameter: Temperature (deg C) Value: 42 vs. 22
  misc_feature: MA Experiment 108576 PARAMETER Experiment Name: At_42deg_Heat_cDNA_P Parameter: Timepoint (hr) Value: 1
  misc_feature: MA Experiment 108576 PARAMETER Experiment Name: At_42deg_Heat_cDNA_P Parameter: Tissue Value: Aerial
  misc_feature: MA Experiment ID: 108577 Result: Down-regulated in Transcription
  misc_feature: MA Experiment 108577 PARAMETER Experiment Name: At_42deg_Heat_cDNA_P Parameter: Temperature (deg C) Value: 42 vs. 22
  misc_feature: MA Experiment 108577 PARAMETER Experiment Name: At_42deg_Heat_cDNA_P Parameter: Timepoint (hr) Value: 6
  misc_feature: MA Experiment 108577 PARAMETER Experiment Name: At_42deg_Heat_cDNA_P Parameter: Tissue Value: Aerial
  misc_feature: MA Experiment ID: 108595 Result: Down-regulated in Transcription
  misc_feature: MA Experiment 108595 PARAMETER Experiment Name: At_Ler-pi_Ovule_cDNA_P Parameter: Plant Line Value: null
  misc_feature: MA Experiment ID: 108605 Result: Down-regulated in Transcription
  misc_feature: MA Experiment 108605 PARAMETER Experiment Name: At_100uM_ABA_cDNA_P Parameter: Timepoint (hr) Value: 6
  misc_feature: MA Experiment 108605 PARAMETER Experiment Name: At_100uM_ABA_cDNA_P Parameter: Tissue Value: Aerial
  misc_feature: MA Experiment 108605 PARAMETER Experiment Name: At_100uM_ABA_cDNA_P Parameter: Treatment Value: 100uM ABA vs. No Treatment
  misc_feature: MA Experiment ID: 108607 Result: Down-regulated in Transcription
  misc_feature: MA Experiment 108607 PARAMETER Experiment Name: At_100uM_ABA_cDNA_P Parameter: Timepoint (hr) Value: 4
  misc_feature: MA Experiment 108607 PARAMETER Experiment Name: At_100uM_ABA_cDNA_P Parameter: Tissue Value: Aerial
  misc_feature: MA Experiment 108607 PARAMETER Experiment Name: At_100uM_ABA_cDNA_P Parameter: Treatment Value: 100uM ABA vs. No Treatment
  misc_feature: MA Experiment ID: 108668 Result: Down-regulated in Transcription
  misc_feature: MA Experiment 108668 PARAMETER Experiment Name: At_2mM_SA_cDNA_P Parameter: Plant Line Value: WS
  misc_feature: MA Experiment 108668 PARAMETER Experiment Name: At_2mM_SA_cDNA_P Parameter: Timepoint (hr) Value: 6
  misc_feature: MA Experiment 108668 PARAMETER Experiment Name: At_2mM_SA_cDNA_P Parameter: Treatment Value: 2mM SA vs. No Treatment
  misc_feature: MA Experiment ID: 20000069 Result: Down-regulated in Transcription
  misc_feature: MA Experiment 20000069 PARAMETER Experiment Name: At_100uM_ABA_Mutants_cDNA_P Parameter: Plant Line Value: CS23
  misc_feature: MA Experiment 20000069 PARAMETER Experiment Name: At_100uM_ABA_Mutants_cDNA_P Parameter: Timepoint (hr) Value: 6
  misc_feature: MA Experiment 20000069 PARAMETER Experiment Name: At_100uM_ABA_Mutants_cDNA_P Parameter: Tissue Value: Aerial
  misc_feature: MA Experiment 20000069 PARAMETER Experiment Name: At_100uM_ABA_Mutants_cDNA_P Parameter: Treatment Value: 100uM ABA vs. No Treatment
  misc_feature: MA Experiment ID: 20000070 Result: Down-regulated in Transcription
  misc_feature: MA Experiment 20000070 PARAMETER Experiment Name: At_100uM_ABA_Mutants_cDNA_P Parameter: Plant Line Value: CS24
  misc_feature: MA Experiment 20000070 PARAMETER Experiment Name: At_100uM_ABA_Mutants_cDNA_P Parameter: Timepoint (hr) Value: 6
  misc_feature: MA Experiment 20000070 PARAMETER Experiment Name: At_100uM_ABA_Mutants_cDNA_P Parameter: Tissue Value: Aerial
  misc_feature: MA Experiment 20000070 PARAMETER Experiment Name: At_100uM_ABA_Mutants_cDNA_P Parameter: Treatment Value: 100uM ABA vs. No Treatment
  misc_feature: MA Experiment ID: 20000071 Result: Down-regulated in Transcription
  misc_feature: MA Experiment 20000071 PARAMETER Experiment Name: At_100uM_ABA_Mutants_cDNA_P Parameter: Plant Line Value: CS8104
  misc_feature: MA Experiment 20000071 PARAMETER Experiment Name: At_100uM_ABA_Mutants_cDNA_P Parameter: Timepoint (hr) Value: 6
  misc_feature: MA Experiment 20000071 PARAMETER Experiment Name: At_100uM_ABA_Mutants_cDNA_P Parameter: Tissue Value: Aerial
  misc_feature: MA Experiment 20000071 PARAMETER Experiment Name: At_100uM_ABA_Mutants_cDNA_P Parameter: Treatment Value: 100uM ABA vs. No Treatment
  misc_feature: MA Experiment ID: 20000072 Result: Down-regulated in Transcription
  misc_feature: MA Experiment 20000072 PARAMETER Experiment Name: At_100uM_ABA_Mutants_cDNA_P Parameter: Plant Line Value: CS8105
  misc_feature: MA Experiment 20000072 PARAMETER Experiment Name: At_100uM_ABA_Mutants_cDNA_P Parameter: Timepoint (hr) Value: 6
  misc_feature: MA Experiment 20000072 PARAMETER Experiment Name: At_100uM_ABA_Mutants_cDNA_P Parameter: Tissue Value: Aerial
  misc_feature: MA Experiment 20000072 PARAMETER Experiment Name: At_100uM_ABA_Mutants_cDNA_P Parameter: Treatment Value: 100uM ABA vs. No Treatment
  misc_feature: MA Experiment ID: 20000086 Result: Down-regulated in Transcription
  misc_feature: MA Experiment 20000086 PARAMETER Experiment Name: At_100uM_ABA_Mutants_cDNA_P Parameter: Plant Line Value: CS22
  misc_feature: MA Experiment 20000086 PARAMETER Experiment Name: At_100uM_ABA_Mutants_cDNA_P Parameter: Timepoint (hr) Value: 6
  misc_feature: MA Experiment 20000086 PARAMETER Experiment Name: At_100uM_ABA_Mutants_cDNA_P Parameter: Tissue Value: Aerial
  misc_feature: MA Experiment 20000086 PARAMETER Experiment Name: At_100uM_ABA_Mutants_cDNA_P Parameter: Treatment Value: 100uM ABA vs. No Treatment
  misc_feature: MA Experiment ID: 20000087 Result: Down-regulated in Transcription
  misc_feature: MA Experiment 20000087 PARAMETER Experiment Name: At_100uM_ABA_Mutants_cDNA_P Parameter: Plant Line Value: WS
  misc_feature: MA Experiment 20000087 PARAMETER Experiment Name: At_100uM_ABA_Mutants_cDNA_P Parameter: Timepoint (hr) Value: 6
  misc_feature: MA Experiment 20000087 PARAMETER Experiment Name: At_100uM_ABA_Mutants_cDNA_P Parameter: Tissue Value: Aerial
  misc_feature: MA Experiment 20000087 PARAMETER Experiment Name: At_100uM_ABA_Mutants_cDNA_P Parameter: Treatment Value: 100uM ABA vs. No Treatment
  misc_feature: MA Experiment ID: 20000088 Result: Down-regulated in Transcription
  misc_feature: MA Experiment 20000088 PARAMETER Experiment Name: At_100uM_ABA_Mutants_cDNA_P Parameter: Plant Line Value: Landsberg
  misc_feature: MA Experiment 20000088 PARAMETER Experiment Name: At_100uM_ABA_Mutants_cDNA_P Parameter: Timepoint (hr) Value: 6
  misc_feature: MA Experiment 20000088 PARAMETER Experiment Name: At_100uM_ABA_Mutants_cDNA_P Parameter: Tissue Value: Aerial
  misc_feature: MA Experiment 20000088 PARAMETER Experiment Name: At_100uM_ABA_Mutants_cDNA_P Parameter: Treatment Value: 100uM ABA vs. No Treatment
  misc_feature: MA Experiment ID: 20000089 Result: Down-regulated in Transcription
  misc_feature: MA Experiment ID: 20000090 Result: Down-regulated in Transcription
  misc_feature: MA Experiment ID: 20000111 Result: Down-regulated in Transcription
  misc_feature: MA Experiment 20000111 PARAMETER Experiment Name: At_42deg_Heat_cDNA_P Parameter: Temperature (deg C) Value: 42 vs. 22
  misc_feature: MA Experiment 20000111 PARAMETER Experiment Name: At_42deg_Heat_cDNA_P Parameter: Timepoint (hr) Value: 6
  misc_feature: MA Experiment 20000111 PARAMETER Experiment Name: At_42deg_Heat_cDNA_P Parameter: Tissue Value: Aerial
  misc_feature: MA Experiment ID: 20000112 Result: Down-regulated in Transcription
  misc_feature: MA Experiment 20000112 PARAMETER Experiment Name: At_42deg_Heat_cDNA_P Parameter: Temperature (deg C) Value: 42 vs. 22
  misc_feature: MA Experiment 20000112 PARAMETER Experiment Name: At_42deg_Heat_cDNA_P Parameter: Timepoint (hr) Value: 2
  misc_feature: MA Experiment 20000112 PARAMETER Experiment Name: At_42deg_Heat_cDNA_P Parameter: Tissue Value: Aerial
  misc_feature: MA Experiment ID: 20000117 Result: Down-regulated in Transcription
  misc_feature: MA Experiment 20000117 PARAMETER Experiment Name: At_100uM_ABA_Mutants_cDNA_P Parameter: Plant Line Value: Columbia
  misc_feature: MA Experiment 20000117 PARAMETER Experiment Name: At_100uM_ABA_Mutants_cDNA_P Parameter: Timepoint (hr) Value: 6
  misc_feature: MA Experiment 20000117 PARAMETER Experiment Name: At_100uM_ABA_Mutants_cDNA_P Parameter: Tissue Value: Aerial
  misc_feature: MA Experiment 20000117 PARAMETER Experiment Name: At_100uM_ABA_Mutants_cDNA_P Parameter: Treatment Value: 100uM ABA vs. No Treatment
  misc_feature: MA Experiment ID: 20000144 Result: Down-regulated in Transcription
  misc_feature: MA Experiment 20000144 PARAMETER Experiment Name: At_42deg_Heat_cDNA_P Parameter: Temperature (deg C) Value: 42 vs. 22
  misc_feature: MA Experiment 20000144 PARAMETER Experiment Name: At_42deg_Heat_cDNA_P Parameter: Timepoint (hr) Value: 1
  misc_feature: MA Experiment 20000144 PARAMETER Experiment Name: At_42deg_Heat_cDNA_P Parameter: Tissue Value: Aerial
  misc_feature: MA Experiment ID: 20000171 Result: Down-regulated in Transcription
  misc_feature: MA Experiment 20000171 PARAMETER Experiment Name: At_42deg_Heat_P Parameter: Age (day) Value: 14
  misc_feature: MA Experiment 20000171 PARAMETER Experiment Name: At_42deg_Heat_P Parameter: Organism Value: A. thaliana
  misc_feature: MA Experiment 20000171 PARAMETER Experiment Name: At_42deg_Heat_P Parameter: Plant Line Value: WS
  misc_feature: MA Experiment 20000171 PARAMETER Experiment Name: At_42deg_Heat_P Parameter: Temperature (deg C) Value: 42 vs. 22
  misc_feature: MA Experiment 20000171 PARAMETER Experiment Name: At_42deg_Heat_P Parameter: Timepoint (hr) Value: 1
  misc_feature: MA Experiment 20000171 PARAMETER Experiment Name: At_42deg_Heat_P Parameter: Tissue Value: Aerial
  misc_feature: MA Experiment ID: 20000173 Result: Down-regulated in Transcription
  misc_feature: MA Experiment 20000173 PARAMETER Experiment Name: At_42deg_Heat_P Parameter: Age (day) Value: 14
  misc_feature: MA Experiment 20000173 PARAMETER Experiment Name: At_42deg_Heat_P Parameter: Organism Value: A. thaliana
  misc_feature: MA Experiment 20000173 PARAMETER Experiment Name: At_42deg_Heat_P Parameter: Plant Line Value: WS
  misc_feature: MA Experiment 20000173 PARAMETER Experiment Name: At_42deg_Heat_P Parameter: Temperature (deg C) Value: 42 vs. 22
  misc_feature: MA Experiment 20000173 PARAMETER Experiment Name: At_42deg_Heat_P Parameter: Timepoint (hr) Value: 6
  misc_feature: MA Experiment 20000173 PARAMETER Experiment Name: At_42deg_Heat_P Parameter: Tissue Value: Aerial
  misc_feature: MA Experiment ID: 20000182 Result: Down-regulated in Transcription
  misc_feature: MA Experiment 20000182 PARAMETER Experiment Name: At_2mM_SA_P Parameter: Age (day) Value: 14
  misc_feature: MA Experiment 20000182 PARAMETER Experiment Name: At_2mM_SA_P Parameter: Organism Value: A. thaliana
  misc_feature: MA Experiment 20000182 PARAMETER Experiment Name: At_2mM_SA_P Parameter: Plant Line Value: WS
  misc_feature: MA Experiment 20000182 PARAMETER Experiment Name: At_2mM_SA_P Parameter: Timepoint (hr) Value: 6
  misc_feature: MA Experiment 20000182 PARAMETER Experiment Name: At_2mM_SA_P Parameter: Tissue Value: Aerial
  misc_feature: MA Experiment 20000182 PARAMETER Experiment Name: At_2mM_SA_P Parameter: Treatment Value: 2mM SA vs. No Treatment
  misc_feature: MA Experiment ID: 20000234 Result: Up-regulated in Transcription
  misc_feature: MA Experiment 20000234 PARAMETER Experiment Name: At_Siliques_P Parameter: Age (day) Value: 21
  misc_feature: MA Experiment 20000234 PARAMETER Experiment Name: At_Siliques_P Parameter: Organism Value: A. thaliana
  misc_feature: MA Experiment 20000234 PARAMETER Experiment Name: At_Siliques_P Parameter: Plant Line Value: WS
  misc_feature: MA Experiment 20000234 PARAMETER Experiment Name: At_Siliques_P Parameter: Tissue Value: Less Than 5mm Siliques vs. Whole Plant
  misc_feature: MA Experiment ID: 20000235 Result: Up-regulated in Transcription
  misc_feature: MA Experiment 20000235 PARAMETER Experiment Name: At_Siliques_P Parameter: Age (day) Value: 21
  misc_feature: MA Experiment 20000235 PARAMETER Experiment Name: At_Siliques_P Parameter: Organism Value: A. thaliana
  misc_feature: MA Experiment 20000235 PARAMETER Experiment Name: At_Siliques_P Parameter: Plant Line Value: WS
  misc_feature: MA Experiment 20000235 PARAMETER Experiment Name: At_Siliques_P Parameter: Tissue Value: 5-10mm Siliques vs. Whole Plant
  misc_feature: MA Experiment ID: 20000436 Result: Down-regulated in Transcription
  misc_feature: MA Experiment 20000436 PARAMETER Experiment Name: At_Drought_P Parameter: Age (day) Value: 7
  misc_feature: MA Experiment 20000436 PARAMETER Experiment Name: At_Drought_P Parameter: Organism Value: A. thaliana
  misc_feature: MA Experiment 20000436 PARAMETER Experiment Name: At_Drought_P Parameter: Plant Line Value: WS
  misc_feature: MA Experiment 20000436 PARAMETER Experiment Name: At_Drought_P Parameter: Timepoint (hr) Value: 12
  misc_feature: MA Experiment 20000436 PARAMETER Experiment Name: At_Drought_P Parameter: Tissue Value: Whole Plant
  misc_feature: MA Experiment 20000436 PARAMETER Experiment Name: At_Drought_P Parameter: Treatment Value: Drought vs. No Drought
  misc_feature: MA Experiment ID: 20000437 Result: Down-regulated in Transcription
  misc_feature: MA Experiment 20000437 PARAMETER Experiment Name: At_Drought_P Parameter: Age (day) Value: 8
  misc_feature: MA Experiment 20000437 PARAMETER Experiment Name: At_Drought_P Parameter: Organism Value: A. thaliana
  misc_feature: MA Experiment 20000437 PARAMETER Experiment Name: At_Drought_P Parameter: Plant Line Value: WS
  misc_feature: MA Experiment 20000437 PARAMETER Experiment Name: At_Drought_P Parameter: Timepoint (hr) Value: 24
  misc_feature: MA Experiment 20000437 PARAMETER Experiment Name: At_Drought_P Parameter: Tissue Value: Whole Plant
  misc_feature: MA Experiment 20000437 PARAMETER Experiment Name: At_Drought_P Parameter: Treatment Value: Drought vs. No Drought
  misc_feature: MA Experiment ID: 20001247 Result: Up-regulated in Transcription
  misc_feature: MA Experiment 20001247 PARAMETER Experiment Name: At_Far-red-induction_P Parameter: Age (day) Value: 7
  misc_feature: MA Experiment 20001247 PARAMETER Experiment Name: At_Far-red-induction_P Parameter: Light Value: Far-red vs. White
  misc_feature: MA Experiment 20001247 PARAMETER Experiment Name: At_Far-red-induction_P Parameter: Organism Value: A. thaliana
  misc_feature: MA Experiment 20001247 PARAMETER Experiment Name: At_Far-red-induction_P Parameter: Plant Line Value: Columbia
  misc_feature: MA Experiment 20001247 PARAMETER Experiment Name: At_Far-red-induction_P Parameter: Timepoint (hr) Value: 1
  misc_feature: MA Experiment 20001247 PARAMETER Experiment Name: At_Far-red-induction_P Parameter: Tissue Value: Whole Plant
  misc_feature: MA Experiment ID: 20001248 Result: Down-regulated in Transcription
  misc_feature: MA Experiment 20001248 PARAMETER Experiment Name: At_Far-red-induction_P Parameter: Age (day) Value: 7
  misc_feature: MA Experiment 20001248 PARAMETER Experiment Name: At_Far-red-induction_P Parameter: Light Value: Far-red vs. White
  misc_feature: MA Experiment 20001248 PARAMETER Experiment Name: At_Far-red-induction_P Parameter: Organism Value: A. thaliana
  misc_feature: MA Experiment 20001248 PARAMETER Experiment Name: At_Far-red-induction_P Parameter: Plant Line Value: Columbia
  misc_feature: MA Experiment 20001248 PARAMETER Experiment Name: At_Far-red-induction_P Parameter: Timepoint (hr) Value: 4
  misc_feature: MA Experiment 20001248 PARAMETER Experiment Name: At_Far-red-induction_P Parameter: Tissue Value: Whole Plant
  misc_feature: MA Experiment ID: 20001757 Result: Up-regulated in Transcription
  misc_feature: MA Experiment 20001757 PARAMETER Experiment Name: At_50mM_NH4NO3_L-to-H_P Parameter: Timepoint (hr) Value: 6
  misc_feature: MA Experiment 20001757 PARAMETER Experiment Name: At_50mM_NH4NO3_L-to-H_P Parameter: Tissue Value: Leaf
  misc_feature: MA Experiment 20001757 PARAMETER Experiment Name: At_50mM_NH4NO3_L-to-H_P Parameter: Treatment Value: 50mM NH4NO3 vs 100mM Mannitol
  misc_feature: MA Experiment ID: 20001906 Result: Down-regulated in Transcription
  misc_feature: MA Experiment 20001906 PARAMETER Experiment Name: At_Drought_Reproduction_P Parameter: Age (day) Value: 35
  misc_feature: MA Experiment 20001906 PARAMETER Experiment Name: At_Drought_Reproduction_P Parameter: Organism Value: A. thaliana
  misc_feature: MA Experiment 20001906 PARAMETER Experiment Name: At_Drought_Reproduction_P Parameter: Plant Line Value: WS
  misc_feature: MA Experiment 20001906 PARAMETER Experiment Name: At_Drought_Reproduction_P Parameter: Timepoint (day) Value: 5
  misc_feature: MA Experiment 20001906 PARAMETER Experiment Name: At_Drought_Reproduction_P Parameter: Tissue Value: Siliques
  misc_feature: MA Experiment 20001906 PARAMETER Experiment Name: At_Drought_Reproduction_P Parameter: Treatment Value: Drought vs. No Drought
  misc_feature: MA Experiment ID: 20001911 Result: Down-regulated in Transcription
  misc_feature: MA Experiment 20001911 PARAMETER Experiment Name: At_Drought_Reproduction_P Parameter: Age (day) Value: 40
  misc_feature: MA Experiment 20001911 PARAMETER Experiment Name: At_Drought_Reproduction_P Parameter: Organism Value: A. thaliana
  misc_feature: MA Experiment 20001911 PARAMETER Experiment Name: At_Drought_Reproduction_P Parameter: Plant Line Value: WS
  misc_feature: MA Experiment 20001911 PARAMETER Experiment Name: At_Drought_Reproduction_P Parameter: Timepoint (day) Value: 10
  misc_feature: MA Experiment 20001911 PARAMETER Experiment Name: At_Drought_Reproduction_P Parameter: Tissue Value: Flowers
  misc_feature: MA Experiment 20001911 PARAMETER Experiment Name: At_Drought_Reproduction_P Parameter: Treatment Value: Drought vs. No Drought

SEQ ID NO: 33700 - protein, 361 aa, Arabidopsis thaliana; identical to SEQ ID NO: 30110
  peptide (1)..(361): Ceres Seq. ID no. 13487070
  misc_feature (73)..(196): Pfam Name: Integral membrane protein DUF6 Pfam Description: Integral membrane protein DUF6
  misc_feature (63)..(352): Homolog of NCBI NO: 18411611 NR Description: glucose-6-phosphate/phosphate
  misc_feature (59)..(307): Homolog of NCBI NO: 15229717 NR Description: phosphate translocator-related [Arabidopsis
  misc_feature (170)..(356): Homolog of NCBI NO: 15229717 NR Description: phosphate translocator-related [Arabidopsis
  misc_feature (48)..(354): Homolog of NCBI NO: 15228248 NR Description: phosphate translocator-related [Arabidopsis
  misc_feature (48)..(354): Homolog of NCBI NO: 17064798 NR Description: phosphate/phosphoenolpyruvate translocator-like
  misc_feature (48)..(354): Homolog of NCBI NO: 15237644 NR Description: phosphate translocator-related [Arabidopsis
  misc_feature (59)..(356): Homolog of NCBI NO: 30681126 NR Description: phosphate translocator-related [Arabidopsis
  misc_feature (59)..(356): Homolog of NCBI NO: 9759107 NR Description: phosphate/phosphoenolpyruvate translocator
  misc_feature (59)..(356): Homolog of NCBI NO: 27476065 NR Description: Putative phosphate/phosphoenolpyruvate
  misc_feature (1)..(361): Homolog of NCBI NO: 15221371 NR Description: phosphate translocator-related [Arabidopsis

SEQ ID NO: 33701 - protein, 350 aa, Arabidopsis thaliana; identical to SEQ ID NO: 30111
  peptide (1)..(350): Ceres Seq. ID no. 13487071
  misc_feature (62)..(185): Pfam Name: Integral membrane protein DUF6 Pfam Description: Integral membrane protein DUF6
  misc_feature (52)..(341): Homolog of NCBI NO: 18411611 NR Description: glucose-6-phosphate/phosphate
  misc_feature (48)..(296): Homolog of NCBI NO: 15229717 NR Description: phosphate translocator-related [Arabidopsis
  misc_feature (159)..(345): Homolog of NCBI NO: 15229717 NR Description: phosphate translocator-related [Arabidopsis
  misc_feature (37)..(343): Homolog of NCBI NO: 15228248 NR Description: phosphate translocator-related [Arabidopsis
  misc_feature (37)..(343): Homolog of NCBI NO: 17064798 NR Description: phosphate/phosphoenolpyruvate translocator-like
  misc_feature (37)..(343): Homolog of NCBI NO: 15237644 NR Description: phosphate translocator-related [Arabidopsis
  misc_feature (48)..(345): Homolog of NCBI NO: 30681126 NR Description: phosphate translocator-related [Arabidopsis
  misc_feature (48)..(345): Homolog of NCBI NO: 9759107 NR Description: phosphate/phosphoenolpyruvate translocator
  misc_feature (48)..(345): Homolog of NCBI NO: 27476065 NR Description: Putative phosphate/phosphoenolpyruvate
  misc_feature (1)..(350): Homolog of NCBI NO: 15221371 NR Description: phosphate translocator-related [Arabidopsis

SEQ ID NO: 33702 - protein, 268 aa, Arabidopsis thaliana; identical to SEQ ID NO: 30112
  peptide (1)..(268): Ceres Seq. ID no. 13487072
  misc_feature (1)..(103): Pfam Name: Integral membrane protein DUF6 Pfam Description: Integral membrane protein DUF6
  misc_feature (1)..(259): Homolog of NCBI NO: 18411611 NR Description: glucose-6-phosphate/phosphate
  misc_feature (1)..(214): Homolog of NCBI NO: 15229717 NR Description: phosphate translocator-related [Arabidopsis
  misc_feature (77)..(263): Homolog of NCBI NO: 15229717 NR Description: phosphate translocator-related [Arabidopsis
  misc_feature (1)..(261): Homolog of NCBI NO: 15228248 NR Description: phosphate translocator-related [Arabidopsis
  misc_feature (1)..(261): Homolog of NCBI NO: 17064798 NR Description: phosphate/phosphoenolpyruvate translocator-like
  misc_feature (1)..(261): Homolog of NCBI NO: 15237644 NR Description: phosphate translocator-related [Arabidopsis
  misc_feature (1)..(263): Homolog of NCBI NO: 30681126 NR Description: phosphate translocator-related [Arabidopsis
  misc_feature (1)..(263): Homolog of NCBI NO: 9759107 NR Description: phosphate/phosphoenolpyruvate translocator
  misc_feature (1)..(263): Homolog of NCBI NO: 27476065 NR Description: Putative phosphate/phosphoenolpyruvate
  misc_feature (1)..(268): Homolog of NCBI NO: 15221371 NR Description: phosphate translocator-related [Arabidopsis

SEQ ID NO: 33703 - DNA, 908 bp, Arabidopsis thaliana; identical to SEQ ID NO: 30113
  misc_feature (1)..(908): Ceres Seq. ID no. 12388520
  misc_feature: MA Experiment ID: 108462 Result: Up-regulated in Transcription
  misc_feature: MA Experiment 108462 PARAMETER Experiment Name: At_Germinating_Seeds_cDNA_P Parameter: Age (day) Value: 2 vs. 0
  misc_feature: MA Experiment 108462 PARAMETER Experiment Name: At_Germinating_Seeds_cDNA_P Parameter: Tissue Value: Germinating Seeds
  misc_feature: MA Experiment ID: 108464 Result: Up-regulated in Transcription
  misc_feature: MA Experiment 108464 PARAMETER Experiment Name: At_Germinating_Seeds_cDNA_P Parameter: Age (day) Value: 4 vs. 0
  misc_feature: MA Experiment 108464 PARAMETER Experiment Name: At_Germinating_Seeds_cDNA_P Parameter: Tissue Value: Germinating Seeds
  misc_feature: MA Experiment ID: 20000113 Result: Up-regulated in Transcription
  misc_feature: MA Experiment 20000113 PARAMETER Experiment Name: At_42deg_Heat_cDNA_P Parameter: Temperature (deg C) Value: 42 vs. 22
  misc_feature: MA Experiment 20000113 PARAMETER Experiment Name: At_42deg_Heat_cDNA_P Parameter: Timepoint (hr) Value: 8
  misc_feature: MA Experiment 20000113 PARAMETER Experiment Name: At_42deg_Heat_cDNA_P Parameter: Tissue Value: Aerial
  misc_feature: MA Experiment ID: 20000224 Result: Down-regulated in Transcription

SEQ ID NO: 33704 - protein, 149 aa, Arabidopsis thaliana; identical to SEQ ID NO: 29417
  peptide (1)..(149): Ceres Seq. ID no. 12388521
  misc_feature (12)..(40): Pfam Name: EF hand Pfam Description: EF hand
  misc_feature (1)..(149): Homolog of NCBI NO: 289525 NR Description: calmodulin
  misc_feature (1)..(149): Homolog of NCBI NO: 30688187 NR Description: calmodulin-6 (CAM6) [Arabidopsis thaliana]
  misc_feature (1)..(149): Homolog of NCBI NO: 3121849 NR Description: CALMODULIN
  misc_feature (1)..(149): Homolog of NCBI NO: 115515 NR Description: Calmodulin
  misc_feature (1)..(149): Homolog of NCBI NO: 34903134 NR Description: unnamed protein product [Oryza sativa (japonica
  misc_feature (1)..(149): Homolog of NCBI NO: 3121848 NR Description: CALMODULIN
  misc_feature (1)..(149): Homolog of NCBI NO: 34304715 NR Description: calmodulin 4 [Daucus carota]
  misc_feature (1)..(149): Homolog of NCBI NO: 15229784 NR Description: calmodulin 7
  misc_feature (1)..(149): Homolog of NCBI NO: 30683369 NR Description: calmodulin [Arabidopsis thaliana]
  misc_feature (1)..(149): Homolog of NCBI NO: 15225840 NR Description: calmodulin; protein id: At2g27030.1, supported by

SEQ ID NO: 33705 - protein, 113 aa, Arabidopsis thaliana; identical to SEQ ID NO: 29418
  peptide (1)..(113): Ceres Seq. ID no. 12388522
  misc_feature (1)..(113): Homolog of NCBI NO: 289525 NR Description: calmodulin
  misc_feature (1)..(113): Homolog of NCBI NO: 30688187 NR Description: calmodulin-6 (CAM6) [Arabidopsis thaliana]
  misc_feature (1)..(113): Homolog of NCBI NO: 3121849 NR Description: CALMODULIN
  misc_feature (1)..(113): Homolog of NCBI NO: 115515 NR Description: Calmodulin
  misc_feature (1)..(113): Homolog of NCBI NO: 34903134 NR Description: unnamed protein product [Oryza sativa (japonica
  misc_feature (1)..(113): Homolog of NCBI NO: 3121848 NR Description: CALMODULIN
  misc_feature (1)..(113): Homolog of NCBI NO: 34304715 NR Description: calmodulin 4 [Daucus carota]
  misc_feature (1)..(113): Homolog of NCBI NO: 15229784 NR Description: calmodulin 7
  misc_feature (1)..(113): Homolog of NCBI NO: 30683369 NR Description: calmodulin [Arabidopsis thaliana]
  misc_feature (1)..(113): Homolog of NCBI NO: 15225840 NR Description: calmodulin; protein id: At2g27030.1, supported by

SEQ ID NO: 33706 - protein, 98 aa, Arabidopsis thaliana; identical to SEQ ID NO: 29419
  peptide (1)..(98): Ceres Seq. ID no. 12388523
  misc_feature (1)..(98): Homolog of NCBI NO: 289525 NR Description: calmodulin
  misc_feature (1)..(98): Homolog of NCBI NO: 30688187 NR Description: calmodulin-6 (CAM6) [Arabidopsis thaliana]
  misc_feature (1)..(98): Homolog of NCBI NO: 3121849 NR Description: CALMODULIN
  misc_feature (1)..(98): Homolog of NCBI NO: 115515 NR Description: Calmodulin
  misc_feature (1)..(98): Homolog of NCBI NO: 34903134 NR Description: unnamed protein product [Oryza sativa (japonica
  misc_feature (1)..(98): Homolog of NCBI NO: 3121848 NR Description: CALMODULIN
  misc_feature (1)..(98): Homolog of NCBI NO: 34304715 NR Description: calmodulin 4 [Daucus carota]
  misc_feature (1)..(98): Homolog of NCBI NO: 15229784 NR Description: calmodulin 7
  misc_feature (1)..(98): Homolog of NCBI NO: 30683369 NR Description: calmodulin [Arabidopsis thaliana]
  misc_feature (1)..(98): Homolog of NCBI NO: 15225840 NR Description: calmodulin; protein id: At2g27030.1, supported by

SEQ ID NO: 33707 - DNA, 1356 bp, Arabidopsis thaliana; identical to SEQ ID NO: 30117
  misc_feature (1)..(1356): Ceres Seq. ID no. 13504985
  misc_feature: MA Experiment ID: 108461 Result: Up-regulated in Transcription
  misc_feature: MA Experiment 108461 PARAMETER Experiment Name: At_Germinating_Seeds_cDNA_P Parameter: Age (day) Value: 1 vs. 0
  misc_feature: MA Experiment 108461 PARAMETER Experiment Name: At_Germinating_Seeds_cDNA_P Parameter: Tissue Value: Germinating Seeds
  misc_feature: MA Experiment ID: 108462 Result: Up-regulated in Transcription
  misc_feature: MA Experiment 108462 PARAMETER Experiment Name: At_Germinating_Seeds_cDNA_P Parameter: Age (day) Value: 2 vs. 0
  misc_feature: MA Experiment 108462 PARAMETER Experiment Name: At_Germinating_Seeds_cDNA_P Parameter: Tissue Value: Germinating Seeds
  misc_feature: MA Experiment ID: 108463 Result: Up-regulated in Transcription
  misc_feature: MA Experiment 108463 PARAMETER Experiment Name: At_Germinating_Seeds_cDNA_P Parameter: Age (day) Value: 3 vs. 0
  misc_feature: MA Experiment 108463 PARAMETER Experiment Name: At_Germinating_Seeds_cDNA_P Parameter: Tissue Value: Germinating Seeds
  misc_feature: MA Experiment ID: 108464 Result: Up-regulated in Transcription
  misc_feature: MA Experiment 108464 PARAMETER Experiment Name: At_Germinating_Seeds_cDNA_P Parameter: Age (day) Value: 4 vs. 0
  misc_feature: MA Experiment 108464 PARAMETER Experiment Name: At_Germinating_Seeds_cDNA_P Parameter: Tissue Value: Germinating Seeds
  misc_feature: MA Experiment ID: 108501 Result: Down-regulated in Transcription
  misc_feature: MA Experiment 108501 PARAMETER Experiment Name: At_ap2_floral_buds_cDNA_P Parameter: Plant Line Value: ap2 (Ler.)
  misc_feature: MA Experiment 108501 PARAMETER Experiment Name: At_ap2_floral_buds_cDNA_P Parameter: Tissue Value: Closed Flower
  misc_feature: MA Experiment ID: 20000113 Result: Up-regulated in Transcription
  misc_feature: MA Experiment 20000113 PARAMETER Experiment Name: At_42deg_Heat_cDNA_P Parameter: Temperature (deg C) Value: 42 vs. 22
  misc_feature: MA Experiment 20000113 PARAMETER Experiment Name: At_42deg_Heat_cDNA_P Parameter: Timepoint (hr) Value: 8
  misc_feature: MA Experiment 20000113 PARAMETER Experiment Name: At_42deg_Heat_cDNA_P Parameter: Tissue Value: Aerial
  misc_feature: MA Experiment ID: 20000180 Result: Up-regulated in Transcription
  misc_feature: MA Experiment 20000180 PARAMETER Experiment Name: At_Germinating_Seeds_P Parameter: Age (hr) Value: 24 vs. 0
  misc_feature: MA Experiment 20000180 PARAMETER Experiment Name: At_Germinating_Seeds_P Parameter: Tissue Value: Germinating Seeds
  misc_feature: MA Experiment ID: 20000184 Result: Up-regulated in Transcription
  misc_feature: MA Experiment 20000184 PARAMETER Experiment Name: At_Shoots__P Parameter: Age (day) Value: 7
  misc_feature: MA Experiment 20000184 PARAMETER Experiment Name: At_Shoots__P Parameter: Tissue Value: Shoots vs. Whole Plant
  misc_feature: MA Experiment ID: 20000185 Result: Down-regulated in Transcription
  misc_feature: MA Experiment 20000185 PARAMETER Experiment Name: At_Roots__P Parameter: Age (day) Value: 7 vs. 21
  misc_feature: MA Experiment 20000185 PARAMETER Experiment Name: At_Roots__P Parameter: Organism Value: A. thaliana
  misc_feature: MA Experiment 20000185 PARAMETER Experiment Name: At_Roots__P Parameter: Tissue Value: Roots vs. Whole Plant
  misc_feature: MA Experiment ID: 20000234 Result: Up-regulated in Transcription
  misc_feature: MA Experiment 20000234 PARAMETER Experiment Name: At_Siliques_P Parameter: Age (day) Value: 21
  misc_feature: MA Experiment 20000234 PARAMETER Experiment Name: At_Siliques_P Parameter: Organism Value: A. thaliana
  misc_feature: MA Experiment 20000234 PARAMETER Experiment Name: At_Siliques_P Parameter: Plant Line Value: WS
  misc_feature: MA Experiment 20000234 PARAMETER Experiment Name: At_Siliques_P Parameter: Tissue Value: Less Than 5mm Siliques vs. Whole Plant
  misc_feature: MA Experiment ID: 20000235 Result: Up-regulated in Transcription
  misc_feature: MA Experiment 20000235 PARAMETER Experiment Name: At_Siliques_P Parameter: Age (day) Value: 21
  misc_feature: MA Experiment 20000235 PARAMETER Experiment Name: At_Siliques_P Parameter: Organism Value: A. thaliana
  misc_feature: MA Experiment 20000235 PARAMETER Experiment Name: At_Siliques_P Parameter: Plant Line Value: WS
  misc_feature: MA Experiment 20000235 PARAMETER Experiment Name: At_Siliques_P Parameter: Tissue Value: 5-10mm Siliques vs. Whole Plant
  misc_feature: MA Experiment ID: 20000264 Result: Up-regulated in Transcription
  misc_feature: MA Experiment 20000264 PARAMETER Experiment Name: At_Open_Flower_P Parameter: Age (day) Value: 21
  misc_feature: MA Experiment 20000264 PARAMETER Experiment Name: At_Open_Flower_P Parameter: Plant Line Value: WS
  misc_feature: MA Experiment 20000264 PARAMETER Experiment Name: At_Open_Flower_P Parameter: Tissue Value: Open Flower vs. Whole Plant
  misc_feature: MA Experiment ID: 20000265 Result: Up-regulated in Transcription
  misc_feature: MA Experiment 20000265 PARAMETER Experiment Name: At_Open_Flower_P Parameter: Age (day) Value: 21
  misc_feature: MA Experiment 20000265 PARAMETER Experiment Name: At_Open_Flower_P Parameter: Plant Line Value: WS
  misc_feature: MA Experiment 20000265 PARAMETER Experiment Name: At_Open_Flower_P Parameter: Tissue Value: Closed Flower vs. Whole Plant
  misc_feature: MA Experiment ID: 20000286 Result: Up-regulated in Transcription
  misc_feature: MA Experiment 20000286 PARAMETER Experiment Name: At_Open_Flower_P Parameter: Age (day) Value: 21
  misc_feature: MA Experiment 20000286 PARAMETER Experiment Name: At_Open_Flower_P Parameter: Plant Line Value: WS
  misc_feature: MA Experiment 20000286 PARAMETER Experiment Name: At_Open_Flower_P Parameter: Tissue Value: Half Open vs. Whole Plant
  misc_feature: MA Experiment ID: 20000438 Result: Up-regulated in Transcription
  misc_feature: MA Experiment 20000438 PARAMETER Experiment Name: At_Shoots__P Parameter: Age (day) Value: 14
  misc_feature: MA Experiment 20000438 PARAMETER Experiment Name: At_Shoots__P Parameter: Tissue Value: Shoots vs. Whole Plant
  misc_feature: MA Experiment ID: 20000439 Result: Down-regulated in Transcription
  misc_feature: MA Experiment 20000439 PARAMETER Experiment Name: At_Roots__P Parameter: Age (day) Value: 14 vs. 21
  misc_feature: MA Experiment 20000439 PARAMETER Experiment Name: At_Roots__P Parameter: Organism Value: A. thaliana
  misc_feature: MA Experiment 20000439 PARAMETER Experiment Name: At_Roots__P Parameter: Tissue Value: Roots vs. Whole Plant
  misc_feature: MA Experiment ID: 20000496 Result: Up-regulated in Transcription
  misc_feature: MA Experiment 20000496 PARAMETER Experiment Name: At_Guard_Cells_P Parameter: Harvest Date Value: 7/19/2002
  misc_feature: MA Experiment 20000496 PARAMETER Experiment Name: At_Guard_Cells_P Parameter: Organism Value: Canola
  misc_feature: MA Experiment 20000496 PARAMETER Experiment Name: At_Guard_Cells_P Parameter: Tissue Value: Guard Cells vs. Leaves
  misc_feature: MA Experiment ID: 20001247 Result: Down-regulated in Transcription
  misc_feature: MA Experiment 20001247 PARAMETER Experiment Name: At_Far-red-induction_P Parameter: Age (day) Value: 7
  misc_feature: MA Experiment 20001247 PARAMETER Experiment Name: At_Far-red-induction_P Parameter: Light Value: Far-red vs. White
  misc_feature: MA Experiment 20001247 PARAMETER Experiment Name: At_Far-red-induction_P Parameter: Organism Value: A. thaliana
  misc_feature: MA Experiment 20001247 PARAMETER Experiment Name: At_Far-red-induction_P Parameter: Plant Line Value: Columbia
  misc_feature: MA Experiment 20001247 PARAMETER Experiment Name: At_Far-red-induction_P Parameter: Timepoint (hr) Value: 1
  misc_feature: MA Experiment 20001247 PARAMETER Experiment Name: At_Far-red-induction_P Parameter: Tissue Value: Whole Plant
  misc_feature: MA Experiment ID: 20001248 Result: Down-regulated in Transcription
  misc_feature: MA Experiment 20001248 PARAMETER Experiment Name: At_Far-red-induction_P Parameter: Age (day) Value: 7
  misc_feature: MA Experiment 20001248 PARAMETER Experiment Name: At_Far-red-induction_P Parameter: Light Value: Far-red vs. White
  misc_feature: MA Experiment 20001248 PARAMETER Experiment Name: At_Far-red-induction_P Parameter: Organism Value: A. thaliana
  misc_feature: MA Experiment 20001248 PARAMETER Experiment Name: At_Far-red-induction_P Parameter: Plant Line Value: Columbia
  misc_feature: MA Experiment 20001248 PARAMETER Experiment Name: At_Far-red-induction_P Parameter: Timepoint (hr) Value: 4
  misc_feature: MA Experiment 20001248 PARAMETER Experiment Name: At_Far-red-induction_P Parameter: Tissue Value: Whole Plant
  misc_feature: MA Experiment ID: 20001450 Result: Down-regulated in Transcription
  misc_feature: MA Experiment 20001450 PARAMETER Experiment Name: At_Far-red-induction_P Parameter: Age (day) Value: 7
  misc_feature: MA Experiment 20001450 PARAMETER Experiment Name: At_Far-red-induction_P Parameter: Light Value: Far-red vs. White
  misc_feature: MA Experiment 20001450 PARAMETER Experiment Name: At_Far-red-induction_P Parameter: Organism Value: A. thaliana
  misc_feature: MA Experiment 20001450 PARAMETER Experiment Name: At_Far-red-induction_P Parameter: Plant Line Value: Columbia
  misc_feature: MA Experiment 20001450 PARAMETER Experiment Name: At_Far-red-induction_P Parameter: Timepoint (hr) Value: 8
  misc_feature: MA Experiment 20001450 PARAMETER Experiment Name: At_Far-red-induction_P Parameter: Tissue Value: Whole Plant
  misc_feature: MA Experiment ID: 20001911 Result: Down-regulated in Transcription
  misc_feature: MA Experiment 20001911 PARAMETER Experiment Name: At_Drought_Reproduction_P Parameter: Age (day) Value: 40
  misc_feature: MA Experiment 20001911 PARAMETER Experiment Name: At_Drought_Reproduction_P Parameter: Organism Value: A. thaliana
  misc_feature: MA Experiment 20001911 PARAMETER Experiment Name: At_Drought_Reproduction_P Parameter: Plant Line Value: WS
  misc_feature: MA Experiment 20001911 PARAMETER Experiment Name: At_Drought_Reproduction_P Parameter: Timepoint (day) Value: 10
  misc_feature: MA Experiment 20001911 PARAMETER Experiment Name: At_Drought_Reproduction_P Parameter: Tissue Value: Flowers
  misc_feature: MA Experiment 20001911 PARAMETER Experiment Name: At_Drought_Reproduction_P Parameter: Treatment Value: Drought vs. No Drought

SEQ ID NO: 33708 - protein, 379 aa, Arabidopsis thaliana; identical to SEQ ID NO: 30118
  peptide (1)..(379): Ceres Seq. ID no. 13504986
  misc_feature (37)..(365): Pfam Name: GDSL-like Lipase/Acylhydrolase Pfam Description: GDSL-like Lipase/Acylhydrolase
  misc_feature (37)..(365): Pfam Name: GDSL-like Lipase/Acylhydrolase Pfam Description: GDSL-like Lipase/Acylhydrolase
  misc_feature (34)..(372): Homolog of NCBI NO: 33147016 NR Description: putative early nodulin 8 precursor
  misc_feature (8)..(368): Homolog of NCBI NO: 15220550 NR Description: GDSL-motif lipase/hydrolase protein [Arabidopsis
  misc_feature (35)..(372): Homolog of NCBI NO: 15223585 NR Description: GDSL-motif lipase/hydrolase protein [Arabidopsis
  misc_feature (6)..(371): Homolog of NCBI NO: 15217506 NR Description: GDSL-motif lipase/hydrolase protein [Arabidopsis
  misc_feature (13)..(372): Homolog of NCBI NO: 21537184 NR Description: early nodule-specific protein, putative
  misc_feature (34)..(372): Homolog of NCBI NO: 33147016 NR Description: putative early nodulin 8 precursor
  misc_feature (35)..(372): Homolog of NCBI NO: 15223585 NR Description: GDSL-motif lipase/hydrolase protein [Arabidopsis
  misc_feature (13)..(372): Homolog of NCBI NO: 21537184 NR Description: early nodule-specific protein, putative
  misc_feature (1)..(379): Homolog of NCBI NO: 15229919 NR Description: GDSL-motif lipase/hydrolase protein [Arabidopsis
  misc_feature (1)..(379): Homolog of NCBI NO: 21553789 NR Description: putative nodulin [Arabidopsis thaliana]
  misc_feature (25)..(379): Homolog of NCBI NO: 23397291 NR Description: putative nodulin [Arabidopsis thaliana]
  misc_feature (9)..(372): Homolog of NCBI NO: 25405771 NR Description: hypothetical protein T22H22.20 [imported] -
  misc_feature (8)..(372): Homolog of NCBI NO: 18405064 NR Description: GDSL-motif lipase/hydrolase protein [Arabidopsis
  misc_feature (6)..(371): Homolog of NCBI NO: 15217506 NR Description: GDSL-motif lipase/hydrolase protein [Arabidopsis
  misc_feature (8)..(368): Homolog of NCBI NO: 15220550 NR Description: GDSL-motif lipase/hydrolase protein [Arabidopsis
  misc_feature (8)..(372): Homolog of NCBI NO: 18405064 NR Description: GDSL-motif lipase/hydrolase protein [Arabidopsis
  misc_feature (9)..(372): Homolog of NCBI NO: 25405771 NR Description: hypothetical protein T22H22.20 [imported] -
  misc_feature (25)..(379): Homolog of NCBI NO: 23397291 NR Description: putative nodulin [Arabidopsis thaliana]
  misc_feature (1)..(379): Homolog of NCBI NO: 21553789 NR Description: putative nodulin [Arabidopsis thaliana]
  misc_feature (1)..(379): Homolog of NCBI NO: 15229919 NR Description: GDSL-motif lipase/hydrolase protein [Arabidopsis

SEQ ID NO: 33709 - protein, 294 aa, Arabidopsis thaliana; identical to SEQ ID NO: 30119
  peptide (1)..(294): Ceres Seq. ID no. 13504987
  misc_feature (1)..(280): Pfam Name: GDSL-like Lipase/Acylhydrolase Pfam Description: GDSL-like Lipase/Acylhydrolase
  misc_feature (1)..(280): Pfam Name: GDSL-like Lipase/Acylhydrolase Pfam Description: GDSL-like Lipase/Acylhydrolase
  misc_feature (1)..(287): Homolog of NCBI NO: 33147016 NR Description: putative early nodulin 8 precursor
  misc_feature (1)..(283): Homolog of NCBI NO: 15220550 NR Description: GDSL-motif lipase/hydrolase protein [Arabidopsis
  misc_feature (1)..(287): Homolog of NCBI NO: 15223585 NR Description: GDSL-motif lipase/hydrolase protein [Arabidopsis
  misc_feature (1)..(286): Homolog of NCBI NO: 15217506 NR Description: GDSL-motif lipase/hydrolase protein [Arabidopsis
  misc_feature (1)..(287): Homolog of NCBI NO: 21537184 NR Description: early nodule-specific protein, putative
  misc_feature (1)..(287): Homolog of NCBI NO: 33147016 NR Description: putative early nodulin 8 precursor
  misc_feature (1)..(287): Homolog of NCBI NO: 15223585 NR Description: GDSL-motif lipase/hydrolase protein [Arabidopsis
  misc_feature (1)..(287): Homolog of NCBI NO: 21537184 NR Description: early nodule-specific protein, putative
  misc_feature (1)..(294): Homolog of NCBI NO: 15229919 NR Description: GDSL-motif lipase/hydrolase protein [Arabidopsis
  misc_feature (1)..(294): Homolog of NCBI NO: 21553789 NR Description: putative nodulin [Arabidopsis thaliana]
  misc_feature (1)..(294): Homolog of NCBI NO: 23397291 NR Description: putative nodulin [Arabidopsis thaliana]
  misc_feature (1)..(287): Homolog of NCBI NO: 25405771 NR Description: hypothetical protein T22H22.20 [imported] -
  misc_feature (1)..(287): Homolog of NCBI NO: 18405064 NR Description: GDSL-motif lipase/hydrolase protein [Arabidopsis
  misc_feature (1)..(286): Homolog of NCBI NO: 15217506 NR Description: GDSL-motif lipase/hydrolase protein [Arabidopsis
  misc_feature (1)..(283): Homolog of NCBI NO: 15220550 NR Description: GDSL-motif lipase/hydrolase protein [Arabidopsis
  misc_feature (1)..(287): Homolog of NCBI NO: 18405064 NR Description: GDSL-motif lipase/hydrolase protein [Arabidopsis
  misc_feature (1)..(287): Homolog of NCBI NO: 25405771 NR Description: hypothetical protein T22H22.20 [imported] -
  misc_feature (1)..(294): Homolog of NCBI NO: 23397291 NR Description: putative nodulin [Arabidopsis thaliana]
  misc_feature (1)..(294): Homolog of NCBI NO: 21553789 NR Description: putative nodulin [Arabidopsis thaliana]
  misc_feature (1)..(294): Homolog of NCBI NO: 15229919 NR Description: GDSL-motif lipase/hydrolase protein [Arabidopsis

SEQ ID NO: 33710 - protein, 208 aa, Arabidopsis thaliana; identical to SEQ ID NO: 30120
  peptide (1)..(208): Ceres Seq. ID no. 13504988
  misc_feature (1)..(194): Pfam Name: GDSL-like Lipase/Acylhydrolase Pfam Description: GDSL-like Lipase/Acylhydrolase
  misc_feature (1)..(194): Pfam Name: GDSL-like Lipase/Acylhydrolase Pfam Description: GDSL-like Lipase/Acylhydrolase
  misc_feature (1)..(201): Homolog of NCBI NO: 33147016 NR Description: putative early nodulin 8 precursor
  misc_feature (1)..(197): Homolog of NCBI NO: 15220550 NR Description: GDSL-motif lipase/hydrolase protein [Arabidopsis
  misc_feature (1)..(201): Homolog of NCBI NO: 15223585 NR Description: GDSL-motif lipase/hydrolase protein [Arabidopsis
  misc_feature (1)..(200): Homolog of NCBI NO: 15217506 NR Description: GDSL-motif lipase/hydrolase protein [Arabidopsis
  misc_feature (1)..(201): Homolog of NCBI NO: 21537184 NR Description: early nodule-specific protein, putative
  misc_feature (1)..(201): Homolog of NCBI NO: 33147016 NR Description: putative early nodulin 8 precursor
  misc_feature (1)..(201): Homolog of NCBI NO: 15223585 NR Description: GDSL-motif lipase/hydrolase protein [Arabidopsis
  misc_feature (1)..(201): Homolog of NCBI NO: 21537184 NR Description: early nodule-specific protein, putative
  misc_feature (1)..(208): Homolog of NCBI NO: 15229919 NR Description: GDSL-motif lipase/hydrolase protein [Arabidopsis
  misc_feature (1)..(208): Homolog of NCBI NO: 21553789 NR Description: putative nodulin [Arabidopsis thaliana]
  misc_feature (1)..(208): Homolog of NCBI NO: 23397291 NR Description: putative nodulin [Arabidopsis thaliana]
  misc_feature (1)..(201): Homolog of NCBI NO: 25405771 NR Description: hypothetical protein T22H22.20 [imported] -
  misc_feature (1)..(201): Homolog of NCBI NO: 18405064 NR Description: GDSL-motif lipase/hydrolase protein [Arabidopsis
  misc_feature (1)..(200): Homolog of NCBI NO: 15217506 NR Description: GDSL-motif lipase/hydrolase protein [Arabidopsis
  misc_feature (1)..(197): Homolog of NCBI NO: 15220550 NR Description: GDSL-motif lipase/hydrolase protein [Arabidopsis
  misc_feature (1)..(201): Homolog of NCBI NO: 18405064 NR Description: GDSL-motif lipase/hydrolase protein [Arabidopsis
  misc_feature (1)..(201): Homolog of NCBI NO: 25405771 NR Description: hypothetical protein T22H22.20 [imported] -
  misc_feature (1)..(208): Homolog of NCBI NO: 23397291 NR Description: putative nodulin [Arabidopsis thaliana]
  misc_feature (1)..(208): Homolog of NCBI NO: 21553789 NR Description: putative nodulin [Arabidopsis thaliana]
  misc_feature (1)..(208): Homolog of NCBI NO: 15229919 NR Description: GDSL-motif lipase/hydrolase protein [Arabidopsis

SEQ ID NO: 33711 - DNA, 747 bp, Arabidopsis thaliana; identical to SEQ ID NO: 30121
  misc_feature (1)..(747): Ceres Seq. ID no. 12397065
  misc_feature: MA Experiment ID: 108434 Result: Up-regulated in Transcription
  misc_feature: MA Experiment 108434 PARAMETER Experiment Name: At_Root_Tips_cDNA_P Parameter: Tissue Value: Root Tips
  misc_feature: MA Experiment ID: 108435 Result: Down-regulated in Transcription
  misc_feature: MA Experiment 108435 PARAMETER Experiment Name: At_stm_Mutants_cDNA_P Parameter: Plant Line Value: wt Landsburg vs stm
  misc_feature: MA Experiment 108435 PARAMETER Experiment Name: At_stm_Mutants_cDNA_P Parameter: Tissue Value: Shoot Apical Meristem Region
  misc_feature: MA Experiment ID: 108488 Result: Up-regulated in Transcription
  misc_feature: MA Experiment ID: 108595 Result: Down-regulated in Transcription
  misc_feature: MA Experiment 108595 PARAMETER Experiment Name: At_Ler-pi_Ovule_cDNA_P Parameter: Plant Line Value: null
  misc_feature: MA Experiment ID: 20000071 Result: Down-regulated in Transcription
  misc_feature: MA Experiment 20000071 PARAMETER Experiment Name: At_100uM_ABA_Mutants_cDNA_P Parameter: Plant Line Value: CS8104
  misc_feature: MA Experiment 20000071 PARAMETER Experiment Name: At_100uM_ABA_Mutants_cDNA_P Parameter: Timepoint (hr) Value: 6
  misc_feature: MA Experiment 20000071 PARAMETER Experiment Name: At_100uM_ABA_Mutants_cDNA_P Parameter: Tissue Value: Aerial
  misc_feature: MA Experiment 20000071 PARAMETER Experiment Name: At_100uM_ABA_Mutants_cDNA_P Parameter: Treatment Value: 100uM ABA vs. No Treatment
  misc_feature: MA Experiment ID: 20000072 Result: Down-regulated in Transcription
  misc_feature: MA Experiment 20000072 PARAMETER Experiment Name: At_100uM_ABA_Mutants_cDNA_P Parameter: Plant Line Value: CS8105
  misc_feature: MA Experiment 20000072 PARAMETER Experiment Name: At_100uM_ABA_Mutants_cDNA_P Parameter: Timepoint (hr) Value: 6
  misc_feature: MA Experiment 20000072 PARAMETER Experiment Name: At_100uM_ABA_Mutants_cDNA_P Parameter: Tissue Value: Aerial
  misc_feature: MA Experiment 20000072 PARAMETER Experiment Name: At_100uM_ABA_Mutants_cDNA_P Parameter: Treatment Value: 100uM ABA vs. No Treatment
  misc_feature: MA Experiment ID: 20000185 Result: Down-regulated in Transcription
  misc_feature: MA Experiment 20000185 PARAMETER Experiment Name: At_Roots__P Parameter: Age (day) Value: 7 vs. 21
  misc_feature: MA Experiment 20000185 PARAMETER Experiment Name: At_Roots__P Parameter: Organism Value: A. thaliana
  misc_feature: MA Experiment 20000185 PARAMETER Experiment Name: At_Roots__P Parameter: Tissue Value: Roots vs. Whole Plant
  misc_feature: MA Experiment ID: 20000286 Result: Down-regulated in Transcription
  misc_feature: MA Experiment 20000286 PARAMETER Experiment Name: At_Open_Flower_P Parameter: Age (day) Value: 21
  misc_feature: MA Experiment 20000286 PARAMETER Experiment Name: At_Open_Flower_P Parameter: Plant Line Value: WS
  misc_feature: MA Experiment 20000286 PARAMETER Experiment Name: At_Open_Flower_P Parameter: Tissue Value: Half Open vs. Whole Plant
  misc_feature: MA Experiment ID: 20000437 Result: Down-regulated in Transcription
  misc_feature: MA Experiment 20000437 PARAMETER Experiment Name: At_Drought_P Parameter: Age (day) Value: 8
  misc_feature: MA Experiment 20000437 PARAMETER Experiment Name: At_Drought_P Parameter: Organism Value: A. thaliana
  misc_feature: MA Experiment 20000437 PARAMETER Experiment Name: At_Drought_P Parameter: Plant Line Value: WS
  misc_feature: MA Experiment 20000437 PARAMETER Experiment Name: At_Drought_P Parameter: Timepoint (hr) Value: 24
  misc_feature: MA Experiment 20000437 PARAMETER Experiment Name: At_Drought_P Parameter: Tissue Value: Whole Plant
  misc_feature: MA Experiment 20000437 PARAMETER Experiment Name: At_Drought_P Parameter: Treatment Value: Drought vs. No Drought
  misc_feature: MA Experiment ID: 20000439 Result: Down-regulated in Transcription
  misc_feature: MA Experiment 20000439 PARAMETER Experiment Name: At_Roots__P Parameter: Age (day) Value: 14 vs. 21
  misc_feature: MA Experiment 20000439 PARAMETER Experiment Name: At_Roots__P Parameter: Organism Value: A. thaliana
  misc_feature: MA Experiment 20000439 PARAMETER Experiment Name: At_Roots__P Parameter: Tissue Value: Roots vs. Whole Plant
  misc_feature: MA Experiment ID: 20000794 Result: Down-regulated in Transcription
  misc_feature: MA Experiment 20000794 PARAMETER Experiment Name: At_Petals_P Parameter: Age (day) Value: 23-25 days
  misc_feature: MA Experiment 20000794 PARAMETER Experiment Name: At_Petals_P Parameter: Plant Line Value: WS
  misc_feature: MA Experiment 20000794 PARAMETER Experiment Name: At_Petals_P Parameter: Tissue Value: Petals vs. Whole plant
  misc_feature: MA Experiment ID: 20001905 Result: Down-regulated in Transcription
  misc_feature: MA Experiment 20001905 PARAMETER Experiment Name: At_Drought_Reproduction_P Parameter: Age (day) Value: 40
  misc_feature: MA Experiment 20001905 PARAMETER Experiment Name: At_Drought_Reproduction_P Parameter: Organism Value: A. thaliana
  misc_feature: MA Experiment 20001905 PARAMETER Experiment Name: At_Drought_Reproduction_P Parameter: Plant Line Value: WS
  misc_feature: MA Experiment 20001905 PARAMETER Experiment Name: At_Drought_Reproduction_P Parameter: Timepoint (day) Value: 10
  misc_feature: MA Experiment 20001905 PARAMETER Experiment Name: At_Drought_Reproduction_P Parameter: Tissue Value: Rosettes
  misc_feature: MA Experiment 20001905 PARAMETER Experiment Name: At_Drought_Reproduction_P Parameter: Treatment Value: Drought vs. No Drought
  misc_feature: MA Experiment ID: 20001906 Result: Down-regulated in Transcription
  misc_feature: MA Experiment 20001906 PARAMETER Experiment Name: At_Drought_Reproduction_P Parameter: Age (day) Value: 35
  misc_feature: MA Experiment 20001906 PARAMETER Experiment Name: At_Drought_Reproduction_P Parameter: Organism Value: A. thaliana
  misc_feature: MA Experiment 20001906 PARAMETER Experiment Name: At_Drought_Reproduction_P Parameter: Plant Line Value: WS
  misc_feature: MA Experiment 20001906 PARAMETER Experiment Name: At_Drought_Reproduction_P Parameter: Timepoint (day) Value: 5
  misc_feature: MA Experiment 20001906 PARAMETER Experiment Name: At_Drought_Reproduction_P Parameter: Tissue Value: Siliques
  misc_feature: MA Experiment 20001906 PARAMETER Experiment Name: At_Drought_Reproduction_P Parameter: Treatment Value: Drought vs. No Drought
  misc_feature: MA Experiment ID: 20001911 Result: Down-regulated in Transcription
  misc_feature: MA Experiment 20001911 PARAMETER Experiment Name: At_Drought_Reproduction_P Parameter: Age (day) Value: 40
  misc_feature: MA Experiment 20001911 PARAMETER Experiment Name: At_Drought_Reproduction_P Parameter: Organism Value: A. thaliana
  misc_feature: MA Experiment 20001911 PARAMETER Experiment Name: At_Drought_Reproduction_P Parameter: Plant Line Value: WS
  misc_feature: MA Experiment 20001911 PARAMETER Experiment Name: At_Drought_Reproduction_P Parameter: Timepoint (day) Value: 10
  misc_feature: MA Experiment 20001911 PARAMETER Experiment Name: At_Drought_Reproduction_P Parameter: Tissue Value: Flowers
  misc_feature: MA Experiment 20001911 PARAMETER Experiment Name: At_Drought_Reproduction_P Parameter: Treatment Value: Drought vs. No Drought

SEQ ID NO: 33712 - protein, 173 aa, Arabidopsis thaliana; identical to SEQ ID NO: 30122
  peptide (1)..(173): Ceres Seq. ID no. 12397066
  misc_feature (63)..(131): Homolog of NCBI NO: 23022263 NR Description: hypothetical protein [Clostridium thermocellum
  misc_feature (1)..(160): Homolog of NCBI NO: 5739218 NR Description: ribosomal protein L29 [Zea mays]
  misc_feature (1)..(173): Homolog of NCBI NO: 15238369 NR Description: 50S ribosomal protein L29

SEQ ID NO: 33713 - protein, 115 aa, Arabidopsis thaliana; identical to SEQ ID NO: 30123
  peptide (1)..(115): Ceres Seq. ID no. 12397067
  misc_feature (5)..(73): Homolog of NCBI NO: 23022263 NR Description: hypothetical protein [Clostridium thermocellum
  misc_feature (1)..(102): Homolog of NCBI NO: 5739218 NR Description: ribosomal protein L29 [Zea mays]
  misc_feature (1)..(115): Homolog of NCBI NO: 15238369 NR Description: 50S ribosomal protein L29

SEQ ID NO: 33714 - protein, 114 aa, Arabidopsis thaliana; identical to SEQ ID NO: 30124
  peptide (1)..(114): Ceres Seq. ID no. 12397068
  misc_feature (4)..(72): Homolog of NCBI NO: 23022263 NR Description: hypothetical protein [Clostridium thermocellum
  misc_feature (1)..(101): Homolog of NCBI NO: 5739218 NR Description: ribosomal protein L29 [Zea mays]
  misc_feature (1)..(114): Homolog of NCBI NO: 15238369 NR Description: 50S ribosomal protein L29

SEQ ID NO: 33715 - DNA, 1654 bp, Arabidopsis thaliana; identical to SEQ ID NO: 30125
  misc_feature (1)..(1654): Ceres Seq. ID no. 13496814
  misc_feature: MA Experiment ID: 108434 Result: Up-regulated in Transcription
  misc_feature: MA Experiment 108434 PARAMETER Experiment Name: At_Root_Tips_cDNA_P Parameter: Tissue Value: Root Tips
  misc_feature: MA Experiment ID: 108435 Result: Up-regulated in Transcription
  misc_feature: MA Experiment 108435 PARAMETER Experiment Name: At_stm_Mutants_cDNA_P Parameter: Plant Line Value: wt Landsburg vs stm
  misc_feature: MA Experiment 108435 PARAMETER Experiment Name: At_stm_Mutants_cDNA_P Parameter: Tissue Value: Shoot Apical Meristem Region
  misc_feature: MA Experiment ID: 108461 Result: Down-regulated in Transcription
  misc_feature: MA Experiment 108461 PARAMETER Experiment Name: At_Germinating_Seeds_cDNA_P Parameter: Age (day) Value: 1 vs. 0
  misc_feature: MA Experiment 108461 PARAMETER Experiment Name: At_Germinating_Seeds_cDNA_P Parameter: Tissue Value: Germinating Seeds
  misc_feature: MA Experiment ID: 108462 Result: Down-regulated in Transcription
  misc_feature: MA Experiment 108462 PARAMETER Experiment Name: At_Germinating_Seeds_cDNA_P Parameter: Age (day) Value: 2 vs. 0
  misc_feature: MA Experiment 108462 PARAMETER Experiment Name: At_Germinating_Seeds_cDNA_P Parameter: Tissue Value: Germinating Seeds
  misc_feature: MA Experiment ID: 108463 Result: Down-regulated in Transcription
  misc_feature: MA Experiment 108463 PARAMETER Experiment Name: At_Germinating_Seeds_cDNA_P Parameter: Age (day) Value: 3 vs. 0
  misc_feature: MA Experiment 108463 PARAMETER Experiment Name: At_Germinating_Seeds_cDNA_P Parameter: Tissue Value: Germinating Seeds
  misc_feature: MA Experiment ID: 108464 Result: Down-regulated in Transcription
  misc_feature: MA Experiment 108464 PARAMETER Experiment Name: At_Germinating_Seeds_cDNA_P Parameter: Age (day) Value: 4 vs. 0
  misc_feature: MA Experiment 108464 PARAMETER Experiment Name: At_Germinating_Seeds_cDNA_P Parameter: Tissue Value: Germinating Seeds
  misc_feature: MA Experiment ID: 20000307 Result: Down-regulated in Transcription
  misc_feature: MA Experiment 20000307 PARAMETER Experiment Name: At_Germinating_Seeds_Sub_P Parameter: Age (hr) Value: 24 vs. 0
  misc_feature: MA Experiment 20000307 PARAMETER Experiment Name: At_Germinating_Seeds_Sub_P Parameter: Organism Value: A. thaliana
  misc_feature: MA Experiment 20000307 PARAMETER Experiment Name: At_Germinating_Seeds_Sub_P Parameter: Plant Line Value: WS
  misc_feature: MA Experiment 20000307 PARAMETER Experiment Name: At_Germinating_Seeds_Sub_P Parameter: Tissue Value: Germinating Seeds
  misc_feature: MA Experiment ID: 20000355 Result: Up-regulated in Transcription
  misc_feature: MA Experiment 20000355 PARAMETER Experiment Name: At_Siliques_Sub_P Parameter: Age (day) Value: 21
  misc_feature: MA Experiment 20000355 PARAMETER Experiment Name: At_Siliques_Sub_P Parameter: Organism Value: A. thaliana
  misc_feature: MA Experiment 20000355 PARAMETER Experiment Name: At_Siliques_Sub_P Parameter: Plant Line Value: WS
  misc_feature: MA Experiment 20000355 PARAMETER Experiment Name: At_Siliques_Sub_P Parameter: Tissue Value: Less Than 5mm Siliques vs. Whole Plant
  misc_feature: MA Experiment ID: 20000440 Result: Up-regulated in Transcription
  misc_feature: MA Experiment 20000440 PARAMETER Experiment Name: At_Closed-Flower__Sub_P Parameter: Tissue Value: Closed Flower vs. Whole Plant

SEQ ID NO: 33716 - protein, 459 aa, Arabidopsis thaliana; identical to SEQ ID NO: 30126
  peptide (1)..(459): Ceres Seq. ID no. 13496815
  misc_feature (91)..(298): Pfam Name: DEAD/DEAH box helicase Pfam Description: DEAD/DEAH box helicase
  misc_feature (43)..(278): Homolog of NCBI NO: 21040373 NR Description: DEAD/H (Asp-Glu-Ala-Asp/His) box polypeptide 39
  misc_feature (43)..(457): Homolog of NCBI NO: 16758334 NR Description: nuclear RNA helicase, DECD variant of DEAD box
  misc_feature (38)..(457): Homolog of NCBI NO: 28278325 NR Description: Unknown (protein for MGC:55433) [Danio rerio]
  misc_feature (116)..(459): Homolog of NCBI NO: 30683509 NR Description: DEAD/DEAH box helicase, putative [Arabidopsis
  misc_feature (35)..(459): Homolog of NCBI NO: 34913862 NR Description: putative DEAD BOX RNA helicase
  misc_feature (33)..(456): Homolog of NCBI NO: 8953379 NR Description: DEAD BOX RNA helicase RH15-like protein
  misc_feature (33)..(456): Homolog of NCBI NO: 8953382 NR Description: DEAD BOX RNA helicase RH15 [Arabidopsis thaliana]
  misc_feature (33)..(459): Homolog of NCBI NO: 18416486 NR Description: DEAD/DEAH box helicase, putative [Arabidopsis
  misc_feature (33)..(459): Homolog of NCBI NO: 18416493 NR Description: DEAD/DEAH box helicase, putative [Arabidopsis
  misc_feature (9)..(459): Homolog of NCBI NO: 11358797 NR Description: RNA helicase RH15 [imported] - Arabidopsis

SEQ ID NO: 33717 - protein, 427 aa, Arabidopsis thaliana; identical to SEQ ID NO: 20810
  peptide (1)..(427): Ceres Seq. ID no. 13496816
  misc_feature (59)..(266): Pfam Name: DEAD/DEAH box helicase Pfam Description: DEAD/DEAH box helicase
  misc_feature (11)..(246): Homolog of NCBI NO: 21040373 NR Description: DEAD/H (Asp-Glu-Ala-Asp/His) box polypeptide 39
  misc_feature (11)..(425): Homolog of NCBI NO: 16758334 NR Description: nuclear RNA helicase, DECD variant of DEAD box
  misc_feature (6)..(425): Homolog of NCBI NO: 28278325 NR Description: Unknown (protein for MGC:55433) [Danio rerio]
  misc_feature (84)..(427): Homolog of NCBI NO: 30683509 NR Description: DEAD/DEAH box helicase, putative [Arabidopsis
  misc_feature (3)..(427): Homolog of NCBI NO: 34913862 NR Description: putative DEAD BOX RNA helicase
  misc_feature (1)..(424): Homolog of NCBI NO: 8953379 NR Description: DEAD BOX RNA helicase RH15-like protein
  misc_feature (1)..(424): Homolog of NCBI NO: 8953382 NR Description: DEAD BOX RNA helicase RH15 [Arabidopsis thaliana]
  misc_feature (1)..(427): Homolog of NCBI NO: 18416486 NR Description: DEAD/DEAH box helicase, putative [Arabidopsis
  misc_feature (1)..(427): Homolog of NCBI NO: 18416493 NR Description: DEAD/DEAH box helicase, putative [Arabidopsis
  misc_feature (1)..(427): Homolog of NCBI NO: 11358797 NR Description: RNA helicase RH15 [imported] - Arabidopsis

SEQ ID NO: 33718 - protein, 344 aa, Arabidopsis thaliana; identical to SEQ ID NO: 20811
  peptide (1)..(344): Ceres Seq. ID no. 13496817
  misc_feature (1)..(183): Pfam Name: DEAD/DEAH box helicase Pfam Description: DEAD/DEAH box helicase
  misc_feature (1)..(163): Homolog of NCBI NO: 21040373 NR Description: DEAD/H (Asp-Glu-Ala-Asp/His) box polypeptide 39
  misc_feature (1)..(342): Homolog of NCBI NO: 16758334 NR Description: nuclear RNA helicase, DECD variant of DEAD box
  misc_feature (1)..(342): Homolog of NCBI NO: 28278325 NR Description: Unknown (protein for MGC:55433) [Danio rerio]
  misc_feature (1)..(344): Homolog of NCBI NO: 30683509 NR Description: DEAD/DEAH box helicase, putative [Arabidopsis
  misc_feature (1)..(344): Homolog of NCBI NO: 34913862 NR Description: putative DEAD BOX RNA helicase
  misc_feature (1)..(341): Homolog of NCBI NO: 8953379 NR Description: DEAD BOX RNA helicase RH15-like protein
  misc_feature (1)..(341): Homolog of NCBI NO: 8953382 NR Description: DEAD BOX RNA helicase RH15 [Arabidopsis thaliana]
  misc_feature (1)..(344): Homolog of NCBI NO: 18416486 NR Description: DEAD/DEAH box helicase, putative [Arabidopsis
  misc_feature (1)..(344): Homolog of NCBI NO: 18416493 NR Description: DEAD/DEAH box helicase, putative [Arabidopsis
  misc_feature (1)..(344): Homolog of NCBI NO: 11358797 NR Description: RNA helicase RH15 [imported] - Arabidopsis

SEQ ID NO: 33719 - DNA, 888 bp, Arabidopsis thaliana; identical to SEQ ID NO: 30129
  misc_feature (1)..(888): Ceres Seq. ID no. 12488396
  misc_feature: MA Experiment ID: 108435 Result: Down-regulated in Transcription
  misc_feature: MA Experiment 108435 PARAMETER Experiment Name: At_stm_Mutants_cDNA_P Parameter: Plant Line Value: wt Landsburg vs stm
  misc_feature: MA Experiment 108435 PARAMETER Experiment Name: At_stm_Mutants_cDNA_P Parameter: Tissue Value: Shoot Apical Meristem Region
  misc_feature: MA Experiment ID: 108461 Result: Up-regulated in Transcription
  misc_feature: MA Experiment 108461 PARAMETER Experiment Name: At_Germinating_Seeds_cDNA_P Parameter: Age (day) Value: 1 vs. 0
  misc_feature: MA Experiment 108461 PARAMETER Experiment Name: At_Germinating_Seeds_cDNA_P Parameter: Tissue Value: Germinating Seeds
  misc_feature: MA Experiment ID: 108462 Result: Up-regulated in Transcription
  misc_feature: MA Experiment 108462 PARAMETER Experiment Name: At_Germinating_Seeds_cDNA_P Parameter: Age (day) Value: 2 vs. 0
  misc_feature: MA Experiment 108462 PARAMETER Experiment Name: At_Germinating_Seeds_cDNA_P Parameter: Tissue Value: Germinating Seeds
  misc_feature: MA Experiment ID: 108463 Result: Up-regulated in Transcription
  misc_feature: MA Experiment 108463 PARAMETER Experiment Name: At_Germinating_Seeds_cDNA_P Parameter: Age (day) Value: 3 vs. 0
  misc_feature: MA Experiment 108463 PARAMETER Experiment Name: At_Germinating_Seeds_cDNA_P Parameter: Tissue Value: Germinating Seeds
  misc_feature: MA Experiment ID: 108464 Result: Up-regulated in Transcription
  misc_feature: MA Experiment 108464 PARAMETER Experiment Name: At_Germinating_Seeds_cDNA_P Parameter: Age (day) Value: 4 vs. 0
  misc_feature: MA Experiment 108464 PARAMETER Experiment Name: At_Germinating_Seeds_cDNA_P Parameter: Tissue Value: Germinating Seeds
  misc_feature: MA Experiment ID: 108579 Result: Down-regulated in Transcription
  misc_feature: MA Experiment 108579 PARAMETER Experiment Name: At_4deg_Cold_cDNA_P Parameter: Temperature (deg C) Value: 4 vs. 22
  misc_feature: MA Experiment 108579 PARAMETER Experiment Name: At_4deg_Cold_cDNA_P Parameter: Timepoint (hr) Value: 6
  misc_feature: MA Experiment 108579 PARAMETER Experiment Name: At_4deg_Cold_cDNA_P Parameter: Tissue Value: Aerial
  misc_feature: MA Experiment ID: 108595 Result: Down-regulated in Transcription
  misc_feature: MA Experiment 108595 PARAMETER Experiment Name: At_Ler-pi_Ovule_cDNA_P Parameter: Plant Line Value: null
  misc_feature: MA Experiment ID: 20000180 Result: Up-regulated in Transcription
  misc_feature: MA Experiment 20000180 PARAMETER Experiment Name: At_Germinating_Seeds_P Parameter: Age (hr) Value: 24 vs. 0
  misc_feature: MA Experiment 20000180 PARAMETER Experiment Name: At_Germinating_Seeds_P Parameter: Tissue Value: Germinating Seeds
  misc_feature: MA Experiment ID: 20000184 Result: Down-regulated in Transcription
  misc_feature: MA Experiment 20000184 PARAMETER Experiment Name: At_Shoots__P Parameter: Age (day) Value: 7
  misc_feature: MA Experiment 20000184 PARAMETER Experiment Name: At_Shoots__P Parameter: Tissue Value: Shoots vs. Whole Plant
  misc_feature: MA Experiment ID: 20000794 Result: Up-regulated in Transcription
  misc_feature: MA Experiment 20000794 PARAMETER Experiment Name: At_Petals_P Parameter: Age (day) Value: 23-25 days
  misc_feature: MA Experiment 20000794 PARAMETER Experiment Name: At_Petals_P Parameter: Plant Line Value: WS
  misc_feature: MA Experiment 20000794 PARAMETER Experiment Name: At_Petals_P Parameter: Tissue Value: Petals vs. Whole plant

SEQ ID NO: 33720 - protein, 207 aa, Arabidopsis thaliana; identical to SEQ ID NO: 30130
  peptide (1)..(207): Ceres Seq. ID no. 12488397
  misc_feature (5)..(201): Homolog of NCBI NO: 15234512 NR Description: quinone reductase family
  misc_feature (4)..(202): Homolog of NCBI NO: 7445353 NR Description: hypothetical protein M4I22.80 - Arabidopsis
  misc_feature (4)..(205): Homolog of NCBI NO: 12484052 NR Description: quinone-oxidoreductase QR2 [Triphysaria
  misc_feature (5)..(202): Homolog of NCBI NO: 38636776 NR Description: putative quinone-oxidoreductase QR2
  misc_feature (4)..(202): Homolog of NCBI NO: 15239652 NR Description: quinone reductase, putative; protein id:
  misc_feature (4)..(202): Homolog of NCBI NO: 30687535 NR Description: quinone reductase family [Arabidopsis thaliana]
  misc_feature (1)..(202): Homolog of NCBI NO: 34910128 NR Description: putative 1,4-benzoquinone reductase
  misc_feature (4)..(202): Homolog of NCBI NO: 5031275 NR Description: unknown [Prunus armeniaca]
  misc_feature (1)..(202): Homolog of NCBI NO: 21068664 NR Description: putative quinone oxidoreductase [Cicer arietinum]
  misc_feature (1)..(207): Homolog of NCBI NO: 22327957 NR Description: quinone reductase family

SEQ ID NO: 33721 - protein, 188 aa, Arabidopsis thaliana; identical to SEQ ID NO: 30131
  peptide (1)..(188): Ceres Seq. ID no. 12488398
  misc_feature (1)..(182): Homolog of NCBI NO: 15234512 NR Description: quinone reductase family
  misc_feature (1)..(183): Homolog of NCBI NO: 7445353 NR Description: hypothetical protein M4I22.80 - Arabidopsis
  misc_feature (1)..(186): Homolog of NCBI NO: 12484052 NR Description: quinone-oxidoreductase QR2 [Triphysaria
  misc_feature (1)..(183): Homolog of NCBI NO: 38636776 NR Description: putative quinone-oxidoreductase QR2
  misc_feature (1)..(183): Homolog of NCBI NO: 15239652 NR Description: quinone reductase, putative; protein id:
  misc_feature (1)..(183): Homolog of NCBI NO: 30687535 NR Description: quinone reductase family [Arabidopsis thaliana]
  misc_feature (1)..(183): Homolog of NCBI NO: 34910128 NR Description: putative 1,4-benzoquinone reductase
  misc_feature (1)..(183): Homolog of NCBI NO: 5031275 NR Description: unknown [Prunus armeniaca]
  misc_feature (1)..(183): Homolog of NCBI NO: 21068664 NR Description: putative quinone oxidoreductase [Cicer arietinum]
  misc_feature (1)..(188): Homolog of NCBI NO: 22327957 NR Description: quinone reductase family

SEQ ID NO: 33722 - protein, 131 aa, Arabidopsis thaliana; identical to SEQ ID NO: 30132
  peptide (1)..(131): Ceres Seq. ID no. 12488399
  misc_feature (1)..(125): Homolog of NCBI NO: 15234512 NR Description: quinone reductase family
  misc_feature (1)..(126): Homolog of NCBI NO: 7445353 NR Description: hypothetical protein M4I22.80 - Arabidopsis
  misc_feature (1)..(129): Homolog of NCBI NO: 12484052 NR Description: quinone-oxidoreductase QR2 [Triphysaria
  misc_feature (1)..(126): Homolog of NCBI NO: 38636776 NR Description: putative quinone-oxidoreductase QR2
  misc_feature (1)..(126): Homolog of NCBI NO: 15239652 NR Description: quinone reductase, putative; protein id:
  misc_feature (1)..(126): Homolog of NCBI NO: 30687535 NR Description: quinone reductase family [Arabidopsis thaliana]
  misc_feature (1)..(126): Homolog of NCBI NO: 34910128 NR Description: putative 1,4-benzoquinone reductase
  misc_feature (1)..(126): Homolog of NCBI NO: 5031275 NR Description: unknown [Prunus armeniaca]
  misc_feature (1)..(126): Homolog of NCBI NO: 21068664 NR Description: putative quinone oxidoreductase [Cicer arietinum]
  misc_feature (1)..(131): Homolog of NCBI NO: 22327957 NR Description: quinone reductase family

SEQ ID NO: 33723 - DNA, 843 bp, Arabidopsis thaliana; identical to SEQ ID NO: 30133
  misc_feature (1)..(843): Ceres Seq. ID no. 13580431
  misc_feature: MA Experiment ID: 108668 Result: Up-regulated in Transcription
  misc_feature: MA Experiment 108668 PARAMETER Experiment Name: At_2mM_SA_cDNA_P Parameter: Plant Line Value: WS
  misc_feature: MA Experiment 108668 PARAMETER Experiment Name: At_2mM_SA_cDNA_P Parameter: Timepoint (hr) Value: 6
  misc_feature: MA Experiment 108668 PARAMETER Experiment Name: At_2mM_SA_cDNA_P Parameter: Treatment Value: 2mM SA vs. No Treatment
  misc_feature: MA Experiment ID: 20000069 Result: Up-regulated in Transcription
  misc_feature: MA Experiment 20000069 PARAMETER Experiment Name: At_100uM_ABA_Mutants_cDNA_P Parameter: Plant Line Value: CS23
  misc_feature: MA Experiment 20000069 PARAMETER Experiment Name: At_100uM_ABA_Mutants_cDNA_P Parameter: Timepoint (hr) Value: 6
  misc_feature: MA Experiment 20000069 PARAMETER Experiment Name: At_100uM_ABA_Mutants_cDNA_P Parameter: Tissue Value: Aerial
  misc_feature: MA Experiment 20000069 PARAMETER Experiment Name: At_100uM_ABA_Mutants_cDNA_P Parameter: Treatment Value: 100uM ABA vs. No Treatment
  misc_feature: MA Experiment ID: 20000071 Result: Up-regulated in Transcription
  misc_feature: MA Experiment 20000071 PARAMETER Experiment Name: At_100uM_ABA_Mutants_cDNA_P Parameter: Plant Line Value: CS8104
  misc_feature: MA Experiment 20000071 PARAMETER Experiment Name: At_100uM_ABA_Mutants_cDNA_P Parameter: Timepoint (hr) Value: 6
  misc_feature: MA Experiment 20000071 PARAMETER Experiment Name: At_100uM_ABA_Mutants_cDNA_P Parameter: Tissue Value: Aerial
  misc_feature: MA Experiment 20000071 PARAMETER Experiment Name: At_100uM_ABA_Mutants_cDNA_P Parameter: Treatment Value: 100uM ABA vs. No Treatment
  misc_feature: MA Experiment ID: 20000089 Result: Up-regulated in Transcription
  misc_feature: MA Experiment ID: 20000117 Result: Up-regulated in Transcription
  misc_feature: MA Experiment 20000117 PARAMETER Experiment Name: At_100uM_ABA_Mutants_cDNA_P Parameter: Plant Line Value: Columbia
  misc_feature: MA Experiment 20000117 PARAMETER Experiment Name: At_100uM_ABA_Mutants_cDNA_P Parameter: Timepoint (hr) Value: 6
  misc_feature: MA Experiment 20000117 PARAMETER Experiment Name: At_100uM_ABA_Mutants_cDNA_P Parameter: Tissue Value: Aerial
  misc_feature: MA Experiment 20000117 PARAMETER Experiment Name: At_100uM_ABA_Mutants_cDNA_P Parameter: Treatment Value: 100uM ABA vs. No Treatment
  misc_feature: MA Experiment ID: 20000182 Result: Up-regulated in Transcription
  misc_feature: MA Experiment 20000182 PARAMETER Experiment Name: At_2mM_SA_P Parameter: Age (day) Value: 14
  misc_feature: MA Experiment 20000182 PARAMETER Experiment Name: At_2mM_SA_P Parameter: Organism Value: A. thaliana
  misc_feature: MA Experiment 20000182 PARAMETER Experiment Name: At_2mM_SA_P Parameter: Plant Line Value: WS
  misc_feature: MA Experiment 20000182 PARAMETER Experiment Name: At_2mM_SA_P Parameter: Timepoint (hr) Value: 6
  misc_feature: MA Experiment 20000182 PARAMETER Experiment Name: At_2mM_SA_P Parameter: Tissue Value: Aerial
  misc_feature: MA Experiment 20000182 PARAMETER Experiment Name: At_2mM_SA_P Parameter: Treatment Value: 2mM SA vs. No Treatment
  misc_feature: MA Experiment ID: 20000184 Result: Down-regulated in Transcription
  misc_feature: MA Experiment 20000184 PARAMETER Experiment Name: At_Shoots__P Parameter: Age (day) Value: 7
  misc_feature: MA Experiment 20000184 PARAMETER Experiment Name: At_Shoots__P Parameter: Tissue Value: Shoots vs. Whole Plant
  misc_feature: MA Experiment ID: 20000234 Result: Down-regulated in Transcription
  misc_feature: MA Experiment 20000234 PARAMETER Experiment Name: At_Siliques_P Parameter: Age (day) Value: 21
  misc_feature: MA Experiment 20000234 PARAMETER Experiment Name: At_Siliques_P Parameter: Organism Value: A. thaliana
  misc_feature: MA Experiment 20000234 PARAMETER Experiment Name: At_Siliques_P Parameter: Plant Line Value: WS
  misc_feature: MA Experiment 20000234 PARAMETER Experiment Name: At_Siliques_P Parameter: Tissue Value: Less Than 5mm Siliques vs. Whole Plant
  misc_feature: MA Experiment ID: 20001557 Result: Down-regulated in Transcription
  misc_feature: MA Experiment 20001557 PARAMETER Experiment Name: At_Drought_Soil_Dry_P Parameter: Age (day) Value: 27
  misc_feature: MA Experiment 20001557 PARAMETER Experiment Name: At_Drought_Soil_Dry_P Parameter: Organism Value: A. thaliana
  misc_feature: MA Experiment 20001557 PARAMETER Experiment Name: At_Drought_Soil_Dry_P Parameter: Plant Line Value: WS
  misc_feature: MA Experiment 20001557 PARAMETER Experiment Name: At_Drought_Soil_Dry_P Parameter: Post Timepoint (hr) Value: 3
  misc_feature: MA Experiment 20001557 PARAMETER Experiment Name: At_Drought_Soil_Dry_P Parameter: Post-Treatment Value: Re-Water vs. No Drought
  misc_feature: MA Experiment 20001557 PARAMETER Experiment Name: At_Drought_Soil_Dry_P Parameter: Timepoint (day) Value: 13
  misc_feature: MA Experiment 20001557 PARAMETER Experiment Name: At_Drought_Soil_Dry_P Parameter: Treatment Value: Drought vs. No Drought

SEQ ID NO: 33724 - protein, 217 aa, Arabidopsis thaliana; identical to SEQ ID NO: 30134
  peptide (1)..(217): Ceres Seq. ID no. 13580432
  misc_feature (39)..(192): Pfam Name: Adenylate kinase Pfam Description: Adenylate kinase
  misc_feature (3)..(213): Homolog of NCBI NO: 28374307 NR Description: Similar to RIKEN cDNA 0610011D08 gene [Xenopus
  misc_feature (32)..(176): Homolog of NCBI NO: 5305496 NR Description: adenylate kinase [Ceratopteris richardii]
  misc_feature (25)..(214): Homolog of NCBI NO: 3913952 NR Description: ADENYLATE KINASE (ATP-AMP TRANSPHOSPHORYLASE)
  misc_feature (29)..(217): Homolog of NCBI NO: 34897826 NR Description: putative UMP/CMP kinase [Oryza sativa (japonica
  misc_feature (32)..(214): Homolog of NCBI NO: 6683811 NR Description: UMP/CMP kinase a [Oryza sativa]
  misc_feature (32)..(214): Homolog of NCBI NO: 6683813 NR Description: UMP/CMP kinase b [Oryza sativa]
  misc_feature (32)..(216): Homolog of NCBI NO: 30690246 NR Description: predicted protein [Arabidopsis thaliana]
  misc_feature (32)..(216): Homolog of NCBI NO: 30690243 NR Description: predicted protein [Arabidopsis thaliana]
  misc_feature (14)..(217): Homolog of NCBI NO: 11260827 NR Description: URIDYLATE KINASE-like protein - Arabidopsis
  misc_feature (14)..(217): Homolog of NCBI NO: 18411518 NR Description: URIDYLATE KINASE-related protein [Arabidopsis

SEQ ID NO: 33725 - protein, 204 aa, Arabidopsis thaliana; identical to SEQ ID NO: 30135
  peptide (1)..(204): Ceres Seq. ID no. 13580433
  misc_feature (26)..(179): Pfam Name: Adenylate kinase Pfam Description: Adenylate kinase
  misc_feature (1)..(200): Homolog of NCBI NO: 28374307 NR Description: Similar to RIKEN cDNA 0610011D08 gene [Xenopus
  misc_feature (19)..(163): Homolog of NCBI NO: 5305496 NR Description: adenylate kinase [Ceratopteris richardii]
  misc_feature (12)..(201): Homolog of NCBI NO: 3913952 NR Description: ADENYLATE KINASE (ATP-AMP TRANSPHOSPHORYLASE)
  misc_feature (16)..(204): Homolog of NCBI NO: 34897826 NR Description: putative UMP/CMP kinase [Oryza sativa (japonica
  misc_feature (19)..(201): Homolog of NCBI NO: 6683811 NR Description: UMP/CMP kinase a [Oryza sativa]
  misc_feature (19)..(201): Homolog of NCBI NO: 6683813 NR Description: UMP/CMP kinase b [Oryza sativa]
  misc_feature (19)..(203): Homolog of NCBI NO: 30690246 NR Description: predicted protein [Arabidopsis thaliana]
  misc_feature (19)..(203): Homolog of NCBI NO: 30690243 NR Description: predicted protein [Arabidopsis thaliana]
  misc_feature (1)..(204): Homolog of NCBI NO: 11260827 NR Description: URIDYLATE KINASE-like protein - Arabidopsis
  misc_feature (1)..(204): Homolog of NCBI NO: 18411518 NR Description: URIDYLATE KINASE-related protein [Arabidopsis

SEQ ID NO: 33726 - protein, 136 aa, Arabidopsis thaliana; identical to SEQ ID NO: 30136
  peptide (1)..(136): Ceres Seq. ID no. 13580434
  misc_feature (1)..(111): Pfam Name: Adenylate kinase Pfam Description: Adenylate kinase
  misc_feature (1)..(132): Homolog of NCBI NO: 28374307 NR Description: Similar to RIKEN cDNA 0610011D08 gene [Xenopus
  misc_feature (1)..(95): Homolog of NCBI NO: 5305496 NR Description: adenylate kinase [Ceratopteris richardii]
  misc_feature (1)..(133): Homolog of NCBI NO: 3913952 NR Description: ADENYLATE KINASE (ATP-AMP TRANSPHOSPHORYLASE)
  misc_feature (1)..(136): Homolog of NCBI NO: 34897826 NR Description: putative UMP/CMP kinase [Oryza sativa (japonica
  misc_feature (1)..(133): Homolog of NCBI NO: 6683811 NR Description: UMP/CMP kinase a [Oryza sativa]
  misc_feature (1)..(133): Homolog of NCBI NO: 6683813 NR Description: UMP/CMP kinase b [Oryza sativa]
  misc_feature (1)..(135): Homolog of NCBI NO: 30690246 NR Description: predicted protein [Arabidopsis thaliana]
  misc_feature (1)..(135): Homolog of NCBI NO: 30690243 NR Description: predicted protein [Arabidopsis thaliana]
  misc_feature (1)..(136): Homolog of NCBI NO: 11260827 NR Description: URIDYLATE KINASE-like protein - Arabidopsis
  misc_feature (1)..(136): Homolog of NCBI NO: 18411518 NR Description: URIDYLATE KINASE-related protein [Arabidopsis

SEQ ID NO: 33727 - DNA, 649 bp, Arabidopsis thaliana; identical to SEQ ID NO: 30137
  misc_feature (1)..(649): Ceres Seq. ID no. 12324000
  misc_feature: MA Experiment ID: 108462 Result: Up-regulated in Transcription
  misc_feature: MA Experiment 108462 PARAMETER Experiment Name: At_Germinating_Seeds_cDNA_P Parameter: Age (day) Value: 2 vs. 0
  misc_feature: MA Experiment 108462 PARAMETER Experiment Name: At_Germinating_Seeds_cDNA_P Parameter: Tissue Value: Germinating Seeds
  misc_feature: MA Experiment ID: 108463 Result: Up-regulated in Transcription
  misc_feature: MA Experiment 108463 PARAMETER Experiment Name: At_Germinating_Seeds_cDNA_P Parameter: Age (day) Value: 3 vs. 0
  misc_feature: MA Experiment 108463 PARAMETER Experiment Name: At_Germinating_Seeds_cDNA_P Parameter: Tissue Value: Germinating Seeds
  misc_feature: MA Experiment ID: 108464 Result: Up-regulated in Transcription
  misc_feature: MA Experiment 108464 PARAMETER Experiment Name: At_Germinating_Seeds_cDNA_P Parameter: Age (day) Value: 4 vs. 0
  misc_feature: MA Experiment 108464 PARAMETER Experiment Name: At_Germinating_Seeds_cDNA_P Parameter: Tissue Value: Germinating Seeds
  misc_feature: MA Experiment ID: 108576 Result: Up-regulated in Transcription
  misc_feature: MA Experiment 108576 PARAMETER Experiment Name: At_42deg_Heat_cDNA_P Parameter: Temperature (deg C) Value: 42 vs. 22
  misc_feature: MA Experiment 108576 PARAMETER Experiment Name: At_42deg_Heat_cDNA_P Parameter: Timepoint (hr) Value: 1
  misc_feature: MA Experiment 108576 PARAMETER Experiment Name: At_42deg_Heat_cDNA_P Parameter: Tissue Value: Aerial
  misc_feature: MA Experiment ID: 108579 Result: Down-regulated in Transcription
  misc_feature: MA Experiment 108579 PARAMETER Experiment Name: At_4deg_Cold_cDNA_P Parameter: Temperature (deg C) Value: 4 vs. 22
  misc_feature: MA Experiment 108579 PARAMETER Experiment Name: At_4deg_Cold_cDNA_P Parameter: Timepoint (hr) Value: 6
  misc_feature: MA Experiment 108579 PARAMETER Experiment Name: At_4deg_Cold_cDNA_P Parameter: Tissue Value: Aerial
  misc_feature: MA Experiment ID: 20000111 Result: Up-regulated in Transcription
  misc_feature: MA Experiment 20000111 PARAMETER Experiment Name: At_42deg_Heat_cDNA_P Parameter: Temperature (deg C) Value: 42 vs. 22
  misc_feature: MA Experiment 20000111 PARAMETER Experiment Name: At_42deg_Heat_cDNA_P Parameter: Timepoint (hr) Value: 6
  misc_feature: MA Experiment 20000111 PARAMETER Experiment Name: At_42deg_Heat_cDNA_P Parameter: Tissue Value: Aerial
  misc_feature: MA Experiment ID: 20000112 Result: Up-regulated in Transcription
  misc_feature: MA Experiment 20000112 PARAMETER Experiment Name: At_42deg_Heat_cDNA_P Parameter: Temperature (deg C) Value: 42 vs. 22
  misc_feature: MA Experiment 20000112 PARAMETER Experiment Name: At_42deg_Heat_cDNA_P Parameter: Timepoint (hr) Value: 2
  misc_feature: MA Experiment 20000112 PARAMETER Experiment Name: At_42deg_Heat_cDNA_P Parameter: Tissue Value: Aerial
  misc_feature: MA Experiment ID: 20000113 Result: Up-regulated in Transcription
  misc_feature: MA Experiment 20000113 PARAMETER Experiment Name: At_42deg_Heat_cDNA_P Parameter: Temperature (deg C) Value: 42 vs. 22
  misc_feature: MA Experiment 20000113 PARAMETER Experiment Name: At_42deg_Heat_cDNA_P Parameter: Timepoint (hr) Value: 8
  misc_feature: MA Experiment 20000113 PARAMETER Experiment Name: At_42deg_Heat_cDNA_P Parameter: Tissue Value: Aerial
  misc_feature: MA Experiment ID: 20000144 Result: Up-regulated in Transcription
  misc_feature: MA Experiment 20000144 PARAMETER Experiment Name: At_42deg_Heat_cDNA_P Parameter: Temperature (deg C) Value: 42 vs. 22
  misc_feature: MA Experiment 20000144 PARAMETER Experiment Name: At_42deg_Heat_cDNA_P Parameter: Timepoint (hr) Value: 1
  misc_feature: MA Experiment 20000144 PARAMETER Experiment Name: At_42deg_Heat_cDNA_P Parameter: Tissue Value: Aerial
  misc_feature: MA Experiment ID: 20000171 Result: Up-regulated in Transcription
  misc_feature: MA Experiment 20000171 PARAMETER Experiment Name: At_42deg_Heat_P Parameter: Age (day) Value: 14
  misc_feature: MA Experiment 20000171 PARAMETER Experiment Name: At_42deg_Heat_P Parameter: Organism Value: A. thaliana
  misc_feature: MA Experiment 20000171 PARAMETER Experiment Name: At_42deg_Heat_P Parameter: Plant Line Value: WS
  misc_feature: MA Experiment 20000171 PARAMETER Experiment Name: At_42deg_Heat_P Parameter: Temperature (deg C) Value: 42 vs. 22
  misc_feature: MA Experiment 20000171 PARAMETER Experiment Name: At_42deg_Heat_P Parameter: Timepoint (hr) Value: 1
  misc_feature: MA Experiment 20000171 PARAMETER Experiment Name: At_42deg_Heat_P Parameter: Tissue Value: Aerial
  misc_feature: MA Experiment ID: 20000179 Result: Up-regulated in Transcription
  misc_feature: MA Experiment 20000179 PARAMETER Experiment Name: At_Germinating_Seeds_P Parameter: Age (hr) Value: 6 vs. 0
  misc_feature: MA Experiment 20000179 PARAMETER Experiment Name: At_Germinating_Seeds_P Parameter: Tissue Value: Germinating Seeds
  misc_feature: MA Experiment ID: 20000180 Result: Up-regulated in Transcription
  misc_feature: MA Experiment 20000180 PARAMETER Experiment Name: At_Germinating_Seeds_P Parameter: Age (hr) Value: 24 vs. 0
  misc_feature: MA Experiment 20000180 PARAMETER Experiment Name: At_Germinating_Seeds_P Parameter: Tissue Value: Germinating Seeds
  misc_feature: MA Experiment ID: 20000224 Result: Down-regulated in Transcription
  misc_feature: MA Experiment ID: 20000264 Result: Down-regulated in Transcription
  misc_feature: MA Experiment 20000264 PARAMETER Experiment Name: At_Open_Flower_P Parameter: Age (day) Value: 21
  misc_feature: MA Experiment 20000264 PARAMETER Experiment Name: At_Open_Flower_P Parameter: Plant Line Value: WS
  misc_feature: MA Experiment 20000264 PARAMETER Experiment Name: At_Open_Flower_P Parameter: Tissue Value: Open Flower vs. Whole Plant
  misc_feature: MA Experiment ID: 20000265 Result: Down-regulated in Transcription
  misc_feature: MA Experiment 20000265 PARAMETER Experiment Name: At_Open_Flower_P Parameter: Age (day) Value: 21
  misc_feature: MA Experiment 20000265 PARAMETER Experiment Name: At_Open_Flower_P Parameter: Plant Line Value: WS
  misc_feature: MA Experiment 20000265 PARAMETER Experiment Name: At_Open_Flower_P Parameter: Tissue Value: Closed Flower vs. Whole Plant
  misc_feature: MA Experiment ID: 20000286 Result: Down-regulated in Transcription
  misc_feature: MA Experiment 20000286 PARAMETER Experiment Name: At_Open_Flower_P Parameter: Age (day) Value: 21
  misc_feature: MA Experiment 20000286 PARAMETER Experiment Name: At_Open_Flower_P Parameter: Plant Line Value: WS
  misc_feature: MA Experiment 20000286 PARAMETER Experiment Name: At_Open_Flower_P Parameter: Tissue Value: Half Open vs. Whole Plant
  misc_feature: MA Experiment ID: 20001450 Result: Up-regulated in Transcription
  misc_feature: MA Experiment 20001450 PARAMETER Experiment Name: At_Far-red-induction_P Parameter: Age (day) Value: 7
  misc_feature: MA Experiment 20001450 PARAMETER Experiment Name: At_Far-red-induction_P Parameter: Light Value: Far-red vs. White
  misc_feature: MA Experiment 20001450 PARAMETER Experiment Name: At_Far-red-induction_P Parameter: Organism Value: A. thaliana
  misc_feature: MA Experiment 20001450 PARAMETER Experiment Name: At_Far-red-induction_P Parameter: Plant Line Value: Columbia
  misc_feature: MA Experiment 20001450 PARAMETER Experiment Name: At_Far-red-induction_P Parameter: Timepoint (hr) Value: 8
  misc_feature: MA Experiment 20001450 PARAMETER Experiment Name: At_Far-red-induction_P Parameter: Tissue Value: Whole Plant
  misc_feature: MA Experiment ID: 20001451 Result: Up-regulated in Transcription
  misc_feature: MA Experiment 20001451 PARAMETER Experiment Name: At_Far-red-induction_P Parameter: Age (day) Value: 7
  misc_feature: MA Experiment 20001451 PARAMETER Experiment Name: At_Far-red-induction_P Parameter: Light Value: Far-red vs. White
  misc_feature: MA Experiment 20001451 PARAMETER Experiment Name: At_Far-red-induction_P Parameter: Organism Value: A. thaliana
  misc_feature: MA Experiment 20001451 PARAMETER Experiment Name: At_Far-red-induction_P Parameter: Plant Line Value: Columbia
  misc_feature: MA Experiment 20001451 PARAMETER Experiment Name: At_Far-red-induction_P Parameter: Timepoint (hr) Value: 24
  misc_feature: MA Experiment 20001451 PARAMETER Experiment Name: At_Far-red-induction_P Parameter: Tissue Value: Whole Plant
  misc_feature: MA Experiment ID: 20001557 Result: Down-regulated in Transcription
  misc_feature: MA Experiment 20001557 PARAMETER Experiment Name: At_Drought_Soil_Dry_P Parameter: Age (day) Value: 27
  misc_feature: MA Experiment 20001557 PARAMETER Experiment Name: At_Drought_Soil_Dry_P Parameter: Organism Value: A. thaliana
  misc_feature: MA Experiment 20001557 PARAMETER Experiment Name: At_Drought_Soil_Dry_P Parameter: Plant Line Value: WS
  misc_feature: MA Experiment 20001557 PARAMETER Experiment Name: At_Drought_Soil_Dry_P Parameter: Post Timepoint (hr) Value: 3
  misc_feature: MA Experiment 20001557 PARAMETER Experiment Name: At_Drought_Soil_Dry_P Parameter: Post-Treatment Value: Re-Water vs. No Drought
  misc_feature: MA Experiment 20001557 PARAMETER Experiment Name: At_Drought_Soil_Dry_P Parameter: Timepoint (day) Value: 13
  misc_feature: MA Experiment 20001557 PARAMETER Experiment Name: At_Drought_Soil_Dry_P Parameter: Treatment Value: Drought vs. No Drought
  misc_feature: MA Experiment ID: 20001558 Result: Down-regulated in Transcription
  misc_feature: MA Experiment 20001558 PARAMETER Experiment Name: At_Drought_Soil_Dry_P Parameter: Age (day) Value: 27
  misc_feature: MA Experiment 20001558 PARAMETER Experiment Name: At_Drought_Soil_Dry_P Parameter: Organism Value: A. thaliana
  misc_feature: MA Experiment 20001558 PARAMETER Experiment Name: At_Drought_Soil_Dry_P Parameter: Plant Line Value: WS
  misc_feature: MA Experiment 20001558 PARAMETER Experiment Name: At_Drought_Soil_Dry_P Parameter: Post Timepoint (hr) Value: 6
  misc_feature: MA Experiment 20001558 PARAMETER Experiment Name: At_Drought_Soil_Dry_P Parameter: Post-Treatment Value: Re-Water vs. No Drought
  misc_feature: MA Experiment 20001558 PARAMETER Experiment Name: At_Drought_Soil_Dry_P Parameter: Timepoint (day) Value: 13
  misc_feature: MA Experiment 20001558 PARAMETER Experiment Name: At_Drought_Soil_Dry_P Parameter: Treatment Value: Drought vs. No Drought

SEQ ID NO: 33728 - protein, 158 aa, Arabidopsis thaliana; identical to SEQ ID NO: 30138
  peptide (1)..(158): Ceres Seq. ID no. 12324001
  misc_feature (1)..(158): Homolog of NCBI NO: 21553794 NR Description: unknown [Arabidopsis thaliana]
  misc_feature (1)..(158): Homolog of NCBI NO: 15237639 NR Description: putative protein

SEQ ID NO: 33729 - protein, 137 aa, Arabidopsis thaliana; identical to SEQ ID NO: 30139
  peptide (1)..(137): Ceres Seq. ID no. 12324002
  misc_feature (1)..(137): Homolog of NCBI NO: 21553794 NR Description: unknown [Arabidopsis thaliana]
  misc_feature (1)..(137): Homolog of NCBI NO: 15237639 NR Description: putative protein

SEQ ID NO: 33730 - DNA, 825 bp, Arabidopsis thaliana; identical to SEQ ID NO: 30140
  misc_feature (1)..(825): Ceres Seq. ID no. 12322128
  misc_feature: MA Experiment ID: 20000171 Result: Up-regulated in Transcription
  misc_feature: MA Experiment 20000171 PARAMETER Experiment Name: At_42deg_Heat_P Parameter: Age (day) Value: 14
  misc_feature: MA Experiment 20000171 PARAMETER Experiment Name: At_42deg_Heat_P Parameter: Organism Value: A. thaliana
  misc_feature: MA Experiment 20000171 PARAMETER Experiment Name: At_42deg_Heat_P Parameter: Plant Line Value: WS
  misc_feature: MA Experiment 20000171 PARAMETER Experiment Name: At_42deg_Heat_P Parameter: Temperature (deg C) Value: 42 vs. 22
  misc_feature: MA Experiment 20000171 PARAMETER Experiment Name: At_42deg_Heat_P Parameter: Timepoint (hr) Value: 1
  misc_feature: MA Experiment 20000171 PARAMETER Experiment Name: At_42deg_Heat_P Parameter: Tissue Value: Aerial

SEQ ID NO: 33731 - protein, 231 aa, Arabidopsis thaliana; identical to SEQ ID NO: 30141
  peptide (1)..(231): Ceres Seq. ID no. 12322129
  misc_feature (34)..(223): Homolog of NCBI NO: 27661880 NR Description: hypothetical protein XP_236191 [Rattus norvegicus]
  misc_feature (19)..(223): Homolog of NCBI NO: 34535216 NR Description: unnamed protein product [Homo sapiens]
  misc_feature (121)..(164): Homolog of NCBI NO: 25405881 NR Description: protein F27F5.9 [imported] - Arabidopsis thaliana
  misc_feature (1)..(76): Homolog of NCBI NO: 25405881 NR Description: protein F27F5.9 [imported] - Arabidopsis thaliana
  misc_feature (15)..(228): Homolog of NCBI NO: 34903030 NR Description: unnamed protein product [Oryza sativa (japonica
  misc_feature (1)..(164): Homolog of NCBI NO: 25518603 NR Description: hypothetical protein T32G9.28 - Arabidopsis
  misc_feature (1)..(231): Homolog of NCBI NO: 22330031 NR Description: hypothetical protein
  misc_feature (1)..(224): Homolog of NCBI NO: 15219511 NR Description: hypothetical protein; protein id: At1g35170.1
  misc_feature (1)..(230): Homolog of NCBI NO: 30693154 NR Description: expressed protein [Arabidopsis thaliana]

SEQ ID NO: 33732 - protein, 155 aa, Arabidopsis thaliana; identical to SEQ ID NO: 30142
  peptide (1)..(155): Ceres Seq. ID no. 12322130
  misc_feature (1)..(147): Homolog of NCBI NO: 27661880 NR Description: hypothetical protein XP_236191 [Rattus norvegicus]
  misc_feature (1)..(147): Homolog of NCBI NO: 34535216 NR Description: unnamed protein product [Homo sapiens]
  misc_feature (45)..(88): Homolog of NCBI NO: 25405881 NR Description: protein F27F5.9 [imported] - Arabidopsis thaliana
  misc_feature (1)..(152): Homolog of NCBI NO: 34903030 NR Description: unnamed protein product [Oryza sativa (japonica
  misc_feature (1)..(88): Homolog of NCBI NO: 25518603 NR Description: hypothetical protein T32G9.28 - Arabidopsis
  misc_feature (1)..(155): Homolog of NCBI NO: 22330031 NR Description: hypothetical protein
  misc_feature (1)..(148): Homolog of NCBI NO: 15219511 NR Description: hypothetical protein; protein id: At1g35170.1
  misc_feature (1)..(154): Homolog of NCBI NO: 30693154 NR Description: expressed protein [Arabidopsis thaliana]

SEQ ID NO: 33733 - protein, 145 aa, Arabidopsis thaliana; identical to SEQ ID NO: 30143
  peptide (1)..(145): Ceres Seq. ID no. 12322131
  misc_feature (1)..(137): Homolog of NCBI NO: 27661880 NR Description: hypothetical protein XP_236191 [Rattus norvegicus]
  misc_feature (1)..(137): Homolog of NCBI NO: 34535216 NR Description: unnamed protein product [Homo sapiens]
  misc_feature (35)..(78): Homolog of NCBI NO: 25405881 NR Description: protein F27F5.9 [imported] - Arabidopsis thaliana
  misc_feature (1)..(142): Homolog of NCBI NO: 34903030 NR Description: unnamed protein product [Oryza sativa (japonica
  misc_feature (1)..(78): Homolog of NCBI NO: 25518603 NR Description: hypothetical protein T32G9.28 - Arabidopsis
  misc_feature (1)..(145): Homolog of NCBI NO: 22330031 NR Description: hypothetical protein
  misc_feature (1)..(138): Homolog of NCBI NO: 15219511 NR Description: hypothetical protein; protein id: At1g35170.1
  misc_feature (1)..(144): Homolog of NCBI NO: 30693154 NR Description: expressed protein [Arabidopsis thaliana]

SEQ ID NO: 33734 - DNA, 2221 bp, Arabidopsis thaliana; identical to SEQ ID NO: 30144
  misc_feature (1)..(2221): Ceres Seq. ID no. 13490207
  misc_feature: MA Experiment ID: 108434 Result: Down-regulated in Transcription
  misc_feature: MA Experiment 108434 PARAMETER Experiment Name: At_Root_Tips_cDNA_P Parameter: Tissue Value: Root Tips
  misc_feature: MA Experiment ID: 108461 Result: Up-regulated in Transcription
  misc_feature: MA Experiment 108461 PARAMETER Experiment Name: At_Germinating_Seeds_cDNA_P Parameter: Age (day) Value: 1 vs. 0
  misc_feature: MA Experiment 108461 PARAMETER Experiment Name: At_Germinating_Seeds_cDNA_P Parameter: Tissue Value: Germinating Seeds
  misc_feature: MA Experiment ID: 108462 Result: Up-regulated in Transcription
  misc_feature: MA Experiment 108462 PARAMETER Experiment Name: At_Germinating_Seeds_cDNA_P Parameter: Age (day) Value: 2 vs. 0
  misc_feature: MA Experiment 108462 PARAMETER Experiment Name: At_Germinating_Seeds_cDNA_P Parameter: Tissue Value: Germinating Seeds
  misc_feature: MA Experiment ID: 108464 Result: Up-regulated in Transcription
  misc_feature: MA Experiment 108464 PARAMETER Experiment Name: At_Germinating_Seeds_cDNA_P Parameter: Age (day) Value: 4 vs. 0
  misc_feature: MA Experiment 108464 PARAMETER Experiment Name: At_Germinating_Seeds_cDNA_P Parameter: Tissue Value: Germinating Seeds
  misc_feature: MA Experiment ID: 108488 Result: Down-regulated in Transcription
  misc_feature: MA Experiment ID: 108489 Result: Up-regulated in Transcription
  misc_feature: MA Experiment ID: 108501 Result: Down-regulated in Transcription
  misc_feature: MA Experiment 108501 PARAMETER Experiment Name: At_ap2_floral_buds_cDNA_P Parameter: Plant Line Value: ap2 (Ler.)
  misc_feature: MA Experiment 108501 PARAMETER Experiment Name: At_ap2_floral_buds_cDNA_P Parameter: Tissue Value: Closed Flower
  misc_feature: MA Experiment ID: 108561 Result: Up-regulated in Transcription
  misc_feature: MA Experiment 108561 PARAMETER Experiment Name: At_100uM_ABA_cDNA_P Parameter: Timepoint (hr) Value: 6
  misc_feature: MA Experiment 108561 PARAMETER Experiment Name: At_100uM_ABA_cDNA_P Parameter: Tissue Value: Aerial
  misc_feature: MA Experiment 108561 PARAMETER Experiment Name: At_100uM_ABA_cDNA_P Parameter: Treatment Value: 100uM ABA vs. No Treatment
  misc_feature: MA Experiment ID: 108574 Result: Down-regulated in Transcription
  misc_feature: MA Experiment 108574 PARAMETER Experiment Name: At_Wounding__cDNA_P Parameter: Timepoint (hr) Value: 1
  misc_feature: MA Experiment 108574 PARAMETER Experiment Name: At_Wounding__cDNA_P Parameter: Tissue Value: Aerial
  misc_feature: MA Experiment 108574 PARAMETER Experiment Name: At_Wounding__cDNA_P Parameter: Treatment Value: Wounding vs. No Wounding
  misc_feature: MA Experiment ID: 108579 Result: Down-regulated in Transcription
  misc_feature: MA Experiment 108579 PARAMETER Experiment Name: At_4deg_Cold_cDNA_P Parameter: Temperature (deg C) Value: 4 vs. 22
  misc_feature: MA Experiment 108579 PARAMETER Experiment Name: At_4deg_Cold_cDNA_P Parameter: Timepoint (hr) Value: 6
  misc_feature: MA Experiment 108579 PARAMETER Experiment Name: At_4deg_Cold_cDNA_P Parameter: Tissue Value: Aerial
  misc_feature: MA Experiment ID: 108594 Result: Up-regulated in Transcription
  misc_feature: MA Experiment 108594 PARAMETER Experiment Name: At_Ler-rhl_Root_cDNA_P Parameter: Plant Line Value: null
  misc_feature: MA Experiment ID: 108595 Result: Up-regulated in Transcription
  misc_feature: MA Experiment 108595 PARAMETER Experiment Name: At_Ler-pi_Ovule_cDNA_P Parameter: Plant Line Value: null
  misc_feature: MA Experiment ID: 108607 Result: Up-regulated in Transcription
  misc_feature: MA Experiment 108607 PARAMETER Experiment Name: At_100uM_ABA_cDNA_P Parameter: Timepoint (hr) Value: 4
  misc_feature: MA Experiment 108607 PARAMETER Experiment Name: At_100uM_ABA_cDNA_P Parameter: Tissue Value: Aerial
  misc_feature: MA Experiment 108607 PARAMETER Experiment Name: At_100uM_ABA_cDNA_P Parameter: Treatment Value: 100uM ABA vs. No Treatment
  misc_feature: MA Experiment ID: 20000069 Result: Up-regulated in Transcription
  misc_feature: MA Experiment 20000069 PARAMETER Experiment Name: At_100uM_ABA_Mutants_cDNA_P Parameter: Plant Line Value: CS23
  misc_feature: MA Experiment 20000069 PARAMETER Experiment Name: At_100uM_ABA_Mutants_cDNA_P Parameter: Timepoint (hr) Value: 6
  misc_feature: MA Experiment 20000069 PARAMETER Experiment Name: At_100uM_ABA_Mutants_cDNA_P Parameter: Tissue Value: Aerial
  misc_feature: MA Experiment 20000069 PARAMETER Experiment Name: At_100uM_ABA_Mutants_cDNA_P Parameter: Treatment Value: 100uM ABA vs. No Treatment
  misc_feature: MA Experiment ID: 20000070 Result: Up-regulated in Transcription
  misc_feature: MA Experiment 20000070 PARAMETER Experiment Name: At_100uM_ABA_Mutants_cDNA_P Parameter: Plant Line Value: CS24
  misc_feature: MA Experiment 20000070 PARAMETER Experiment Name: At_100uM_ABA_Mutants_cDNA_P Parameter: Timepoint (hr) Value: 6
  misc_feature: MA Experiment 20000070 PARAMETER Experiment Name: At_100uM_ABA_Mutants_cDNA_P Parameter: Tissue Value: Aerial
  misc_feature: MA Experiment 20000070 PARAMETER Experiment Name: At_100uM_ABA_Mutants_cDNA_P Parameter: Treatment Value: 100uM ABA vs. No Treatment
  misc_feature: MA Experiment ID: 20000086 Result: Up-regulated in Transcription
  misc_feature: MA Experiment 20000086 PARAMETER Experiment Name: At_100uM_ABA_Mutants_cDNA_P Parameter: Plant Line Value: CS22
  misc_feature: MA Experiment 20000086 PARAMETER Experiment Name: At_100uM_ABA_Mutants_cDNA_P Parameter: Timepoint (hr) Value: 6
  misc_feature: MA Experiment 20000086 PARAMETER Experiment Name: At_100uM_ABA_Mutants_cDNA_P Parameter: Tissue Value: Aerial
  misc_feature: MA Experiment 20000086 PARAMETER Experiment Name: At_100uM_ABA_Mutants_cDNA_P Parameter: Treatment Value: 100uM ABA vs. No Treatment
  misc_feature: MA Experiment ID: 20000087 Result: Up-regulated in Transcription
  misc_feature: MA Experiment 20000087 PARAMETER Experiment Name: At_100uM_ABA_Mutants_cDNA_P Parameter: Plant Line Value: WS
  misc_feature: MA Experiment 20000087 PARAMETER Experiment Name: At_100uM_ABA_Mutants_cDNA_P Parameter: Timepoint (hr) Value: 6
  misc_feature: MA Experiment 20000087 PARAMETER Experiment Name: At_100uM_ABA_Mutants_cDNA_P Parameter: Tissue Value: Aerial
  misc_feature: MA Experiment 20000087 PARAMETER Experiment Name: At_100uM_ABA_Mutants_cDNA_P Parameter: Treatment Value: 100uM ABA vs. No Treatment
  misc_feature: MA Experiment ID: 20000117 Result: Up-regulated in Transcription
  misc_feature: MA Experiment 20000117 PARAMETER Experiment Name: At_100uM_ABA_Mutants_cDNA_P Parameter: Plant Line Value: Columbia
  misc_feature: MA Experiment 20000117 PARAMETER Experiment Name: At_100uM_ABA_Mutants_cDNA_P Parameter: Timepoint (hr) Value: 6
  misc_feature: MA Experiment 20000117 PARAMETER Experiment Name: At_100uM_ABA_Mutants_cDNA_P Parameter: Tissue Value: Aerial
  misc_feature: MA Experiment 20000117 PARAMETER Experiment Name: At_100uM_ABA_Mutants_cDNA_P Parameter: Treatment Value: 100uM ABA vs. No Treatment
  misc_feature: MA Experiment ID: 20000180 Result: Up-regulated in Transcription
  misc_feature: MA Experiment 20000180 PARAMETER Experiment Name: At_Germinating_Seeds_P Parameter: Age (hr) Value: 24 vs. 0
  misc_feature: MA Experiment 20000180 PARAMETER Experiment Name: At_Germinating_Seeds_P Parameter: Tissue Value: Germinating Seeds
  misc_feature: MA Experiment ID: 20000224 Result: Down-regulated in Transcription
  misc_feature: MA Experiment ID: 20000234 Result: Down-regulated in Transcription
  misc_feature: MA Experiment 20000234 PARAMETER Experiment Name: At_Siliques_P Parameter: Age (day) Value: 21
  misc_feature: MA Experiment 20000234 PARAMETER Experiment Name: At_Siliques_P Parameter: Organism Value: A. thaliana
  misc_feature: MA Experiment 20000234 PARAMETER Experiment Name: At_Siliques_P Parameter: Plant Line Value: WS
  misc_feature: MA Experiment 20000234 PARAMETER Experiment Name: At_Siliques_P Parameter: Tissue Value: Less Than 5mm Siliques vs. Whole Plant
  misc_feature: MA Experiment ID: 20000264 Result: Down-regulated in Transcription
  misc_feature: MA Experiment 20000264 PARAMETER Experiment Name: At_Open_Flower_P Parameter: Age (day) Value: 21
  misc_feature: MA Experiment 20000264 PARAMETER Experiment Name: At_Open_Flower_P Parameter: Plant Line Value: WS
  misc_feature: MA Experiment 20000264 PARAMETER Experiment Name: At_Open_Flower_P Parameter: Tissue Value: Open Flower vs. Whole Plant
  misc_feature: MA Experiment ID: 20000265 Result: Down-regulated in Transcription
  misc_feature: MA Experiment 20000265 PARAMETER Experiment Name: At_Open_Flower_P Parameter: Age (day) Value: 21
  misc_feature: MA Experiment 20000265 PARAMETER Experiment Name: At_Open_Flower_P Parameter: Plant Line Value: WS
  misc_feature: MA Experiment 20000265 PARAMETER Experiment Name: At_Open_Flower_P Parameter: Tissue Value: Closed Flower vs. Whole Plant
  misc_feature: MA Experiment ID: 20000268 Result: Down-regulated in Transcription
  misc_feature: MA Experiment 20000268 PARAMETER Experiment Name: At_100mM_NaCl__P Parameter: Age (day) Value: 14
  misc_feature: MA Experiment 20000268 PARAMETER Experiment Name: At_100mM_NaCl__P Parameter: Organism Value: A. thaliana
  misc_feature: MA Experiment 20000268 PARAMETER Experiment Name: At_100mM_NaCl__P Parameter: Plant Line Value: WS
  misc_feature: MA Experiment 20000268 PARAMETER Experiment Name: At_100mM_NaCl__P Parameter: Timepoint (hr) Value: 6
  misc_feature: MA Experiment 20000268 PARAMETER Experiment Name: At_100mM_NaCl__P Parameter: Tissue Value: Whole Plant
  misc_feature: MA Experiment 20000268 PARAMETER Experiment Name: At_100mM_NaCl__P Parameter: Treatment Value: 100mM NaCl vs. No Treatment
  misc_feature: MA Experiment ID: 20000286 Result: Down-regulated in Transcription
  misc_feature: MA Experiment 20000286 PARAMETER Experiment Name: At_Open_Flower_P Parameter: Age (day) Value: 21
  misc_feature: MA Experiment 20000286 PARAMETER Experiment Name: At_Open_Flower_P Parameter: Plant Line Value: WS
  misc_feature: MA Experiment 20000286 PARAMETER Experiment Name: At_Open_Flower_P Parameter: Tissue Value: Half Open vs. Whole Plant
  misc_feature: MA Experiment ID: 20000308 Result: Down-regulated in Transcription
  misc_feature: MA Experiment 20000308 PARAMETER Experiment Name: At_100mM_NaCl__P Parameter: Age (day) Value: 17
  misc_feature: MA Experiment 20000308 PARAMETER Experiment Name: At_100mM_NaCl__P Parameter: Organism Value: A. thaliana
  misc_feature: MA Experiment 20000308 PARAMETER Experiment Name: At_100mM_NaCl__P Parameter: Plant Line Value: WS
  misc_feature: MA Experiment 20000308 PARAMETER Experiment Name: At_100mM_NaCl__P Parameter: Timepoint (hr) Value: 72
  misc_feature: MA Experiment 20000308 PARAMETER Experiment Name: At_100mM_NaCl__P Parameter: Tissue Value: Whole Plant
  misc_feature: MA Experiment 20000308 PARAMETER Experiment Name: At_100mM_NaCl__P Parameter: Treatment Value: 100mM NaCl vs. No Treatment
  misc_feature: MA Experiment ID: 20000438 Result: Down-regulated in Transcription
  misc_feature: MA Experiment 20000438 PARAMETER Experiment Name: At_Shoots__P Parameter: Age (day) Value: 14
  misc_feature: MA Experiment 20000438 PARAMETER Experiment Name: At_Shoots__P Parameter: Tissue Value: Shoots vs. Whole Plant
  misc_feature: MA Experiment ID: 20000439 Result: Down-regulated in Transcription
  misc_feature: MA Experiment 20000439 PARAMETER Experiment Name: At_Roots__P Parameter: Age (day) Value: 14 vs. 21
  misc_feature: MA Experiment 20000439 PARAMETER Experiment Name: At_Roots__P Parameter: Organism Value: A. thaliana
  misc_feature: MA Experiment 20000439 PARAMETER Experiment Name: At_Roots__P Parameter: Tissue Value: Roots vs. Whole Plant
  misc_feature: MA Experiment ID: 20000441 Result: Up-regulated in Transcription
  misc_feature: MA Experiment 20000441 PARAMETER Experiment Name: At_1uM_BR-BRZ__P Parameter: Tissue Value: Shoot Apices
  misc_feature: MA Experiment 20000441 PARAMETER Experiment Name: At_1uM_BR-BRZ__P Parameter: Treatment Value: 1uM BR vs. No Treatment
  misc_feature: MA Experiment ID: 20000443 Result: Up-regulated in Transcription
  misc_feature: MA Experiment 20000443 PARAMETER Experiment Name: At_1uM_BR-BRZ__P Parameter: Tissue Value: Shoot Apices
  misc_feature: MA Experiment 20000443 PARAMETER Experiment Name: At_1uM_BR-BRZ__P Parameter: Treatment Value: 1uM BRZ vs. No Treatment
  misc_feature: MA Experiment ID: 20000575 Result: Down-regulated in Transcription
  misc_feature: MA Experiment 20000575 PARAMETER Experiment Name: At_100uM_ABA_Mutants__P Parameter: Organism Value: A. thaliana
  misc_feature: MA Experiment 20000575 PARAMETER Experiment Name: At_100uM_ABA_Mutants__P Parameter: Plant Line Value: CS22
  misc_feature: MA Experiment 20000575 PARAMETER Experiment Name: At_100uM_ABA_Mutants__P Parameter: Timepoint (hr) Value: 6
  misc_feature: MA Experiment 20000575 PARAMETER Experiment Name: At_100uM_ABA_Mutants__P Parameter: Tissue Value: Whole Plant
  misc_feature: MA Experiment 20000575 PARAMETER Experiment Name: At_100uM_ABA_Mutants__P Parameter: Treatment Value: 1uM ABA vs. No Treatment
  misc_feature: MA Experiment ID: 20000578 Result: Up-regulated in Transcription
  misc_feature: MA Experiment 20000578 PARAMETER Experiment Name: At_CS3726__P Parameter: Organism Value: A. thaliana
  misc_feature: MA Experiment 20000578 PARAMETER Experiment Name: At_CS3726__P Parameter: Plant Line Value: CS3726
  misc_feature: MA Experiment 20000578 PARAMETER Experiment Name: At_CS3726__P Parameter: Tissue Value: Whole Plant
  misc_feature: MA Experiment ID: 20001450 Result: Up-regulated in Transcription
  misc_feature: MA Experiment 20001450 PARAMETER Experiment Name: At_Far-red-induction_P Parameter: Age (day) Value: 7
  misc_feature: MA Experiment 20001450 PARAMETER Experiment Name: At_Far-red-induction_P Parameter: Light Value: Far-red vs. White
  misc_feature: MA Experiment 20001450 PARAMETER Experiment Name: At_Far-red-induction_P Parameter: Organism Value: A. thaliana
  misc_feature: MA Experiment 20001450 PARAMETER Experiment Name: At_Far-red-induction_P Parameter: Plant Line Value: Columbia
  misc_feature: MA Experiment 20001450 PARAMETER Experiment Name: At_Far-red-induction_P Parameter: Timepoint (hr) Value: 8
  misc_feature: MA Experiment 20001450 PARAMETER Experiment Name: At_Far-red-induction_P Parameter: Tissue Value: Whole Plant
  misc_feature: MA Experiment ID: 20001451 Result: Up-regulated in Transcription
  misc_feature: MA Experiment 20001451 PARAMETER Experiment Name: At_Far-red-induction_P Parameter: Age (day) Value: 7
  misc_feature: MA Experiment 20001451 PARAMETER Experiment Name: At_Far-red-induction_P Parameter: Light Value: Far-red vs. White
  misc_feature: MA Experiment 20001451 PARAMETER Experiment Name: At_Far-red-induction_P Parameter: Organism Value: A. thaliana
  misc_feature: MA Experiment 20001451 PARAMETER Experiment Name: At_Far-red-induction_P Parameter: Plant Line Value: Columbia
  misc_feature: MA Experiment 20001451 PARAMETER Experiment Name: At_Far-red-induction_P Parameter: Timepoint (hr) Value: 24
  misc_feature: MA Experiment 20001451 PARAMETER Experiment Name: At_Far-red-induction_P Parameter: Tissue Value: Whole Plant
  misc_feature: MA Experiment ID: 20001905 Result: Up-regulated in Transcription
  misc_feature: MA Experiment 20001905 PARAMETER Experiment Name: At_Drought_Reproduction_P Parameter: Age (day) Value: 40
  misc_feature: MA Experiment 20001905 PARAMETER Experiment Name: At_Drought_Reproduction_P Parameter: Organism Value: A. thaliana
  misc_feature: MA Experiment 20001905 PARAMETER Experiment Name: At_Drought_Reproduction_P Parameter: Plant Line Value: WS
  misc_feature: MA Experiment 20001905 PARAMETER Experiment Name: At_Drought_Reproduction_P Parameter: Timepoint (day) Value: 10
  misc_feature: MA Experiment 20001905 PARAMETER Experiment Name: At_Drought_Reproduction_P Parameter: Tissue Value: Rosettes
  misc_feature: MA Experiment 20001905 PARAMETER Experiment Name: At_Drought_Reproduction_P Parameter: Treatment Value: Drought vs. No Drought
  misc_feature: Phenotype: FERTILITY Fertility-Reduced
  misc_feature: Phenotype: ROSETTE LEAVES Other
  misc_feature: Phenotype: FERTILITY Fertility-Reduced
  misc_feature: Phenotype: FERTILITY Fertility-Reduced
  misc_feature: Phenotype: FERTILITY Fertility-Reduced

SEQ ID NO: 33735 - protein, 327 aa, Arabidopsis thaliana; identical to SEQ ID NO: 30145
  peptide (1)..(327): Ceres Seq. ID no. 15218812
  misc_feature (112)..(281): Homolog of NCBI NO: 32415413 NR Description: related to multifunctional cyclin-dependent
  misc_feature (1)..(95): Homolog of NCBI NO: 7445886 NR Description: PHO85-like protein - fission yeast
  misc_feature (98)..(272): Homolog of NCBI NO: 7445886 NR Description: PHO85-like protein - fission yeast
  misc_feature (1)..(139): Homolog of NCBI NO: 21740744 NR Description: OSJNBa0072K14.9 [Oryza sativa (japonica
  misc_feature (153)..(326): Homolog of NCBI NO: 21740744 NR Description: OSJNBa0072K14.9 [Oryza sativa (japonica
  misc_feature (1)..(284): Homolog of NCBI NO: 34146826 NR Description: At5g43300 [Arabidopsis thaliana]
  misc_feature (1)..(326): Homolog of NCBI NO: 38175529 NR Description: PHO85-like protein [Oryza sativa (japonica
  misc_feature (1)..(327): Homolog of NCBI NO: 28058728 NR Description: expressed protein [Arabidopsis thaliana]
  misc_feature (1)..(327): Homolog of NCBI NO: 18396047 NR Description: expressed protein [Arabidopsis thaliana]
  misc_feature (1)..(327): Homolog of NCBI NO: 15237552 NR Description: expressed protein [Arabidopsis thaliana]
  misc_feature (112)..(281): Homolog of NCBI NO: 32415413 NR Description: related to multifunctional cyclin-dependent
  misc_feature (1)..(95): Homolog of NCBI NO: 7445886 NR Description: PHO85-like protein - fission yeast
  misc_feature (98)..(272): Homolog of NCBI NO: 7445886 NR Description: PHO85-like protein - fission yeast
  misc_feature (1)..(139): Homolog of NCBI NO: 21740744 NR Description: OSJNBa0072K14.9 [Oryza sativa (japonica
  misc_feature (153)..(326): Homolog of NCBI NO: 21740744 NR Description: OSJNBa0072K14.9 [Oryza sativa (japonica
  misc_feature (1)..(284): Homolog of NCBI NO: 34146826 NR Description: At5g43300 [Arabidopsis thaliana]
  misc_feature (1)..(326): Homolog of NCBI NO: 38175529 NR Description: PHO85-like protein [Oryza sativa (japonica
  misc_feature (1)..(327): Homolog of NCBI NO: 28058728 NR Description: expressed protein [Arabidopsis thaliana]
  misc_feature (1)..(327): Homolog of NCBI NO: 18396047 NR Description: expressed protein [Arabidopsis thaliana]
  misc_feature (1)..(327): Homolog of NCBI NO: 15237552 NR Description: expressed protein [Arabidopsis thaliana]

SEQ ID NO: 33736 - protein, 237 aa, Arabidopsis thaliana; identical to SEQ ID NO: 30146
  peptide (1)..(237): Ceres Seq. ID no. 15218813
  misc_feature (8)..(182): Homolog of NCBI NO: 19115043 NR Description: contains glycerophosphoryl diester
  misc_feature (22)..(191): Homolog of NCBI NO: 32415413 NR Description: related to multifunctional cyclin-dependent
  misc_feature (8)..(182): Homolog of NCBI NO: 7445886 NR Description: PHO85-like protein - fission yeast
  misc_feature (1)..(49): Homolog of NCBI NO: 21740744 NR Description: OSJNBa0072K14.9 [Oryza sativa (japonica
  misc_feature (63)..(236): Homolog of NCBI NO: 21740744 NR Description: OSJNBa0072K14.9 [Oryza sativa (japonica
  misc_feature (1)..(194): Homolog of NCBI NO: 34146826 NR Description: At5g43300 [Arabidopsis thaliana]
  misc_feature (1)..(236): Homolog of NCBI NO: 38175529 NR Description: PHO85-like protein [Oryza sativa (japonica
  misc_feature (1)..(237): Homolog of NCBI NO: 28058728 NR Description: expressed protein [Arabidopsis thaliana]
  misc_feature (1)..(237): Homolog of NCBI NO: 18396047 NR Description: expressed protein [Arabidopsis thaliana]
  misc_feature (1)..(237): Homolog of NCBI NO: 15237552 NR Description: expressed protein [Arabidopsis thaliana]
  misc_feature (8)..(182): Homolog of NCBI NO: 19115043 NR Description: contains glycerophosphoryl diester
  misc_feature (22)..(191): Homolog of NCBI NO: 32415413 NR Description: related to multifunctional cyclin-dependent
  misc_feature (8)..(182): Homolog of NCBI NO: 7445886 NR Description: PHO85-like protein - fission yeast
  misc_feature (1)..(49): Homolog of NCBI NO: 21740744 NR Description: OSJNBa0072K14.9 [Oryza sativa (japonica
  misc_feature (63)..(236): Homolog of NCBI NO: 21740744 NR Description: OSJNBa0072K14.9 [Oryza sativa (japonica
  misc_feature (1)..(194): Homolog of NCBI NO: 34146826 NR Description: At5g43300 [Arabidopsis thaliana]
  misc_feature (1)..(236): Homolog of NCBI NO: 38175529 NR Description: PHO85-like protein [Oryza sativa (japonica
  misc_feature (1)..(237): Homolog of NCBI NO: 28058728 NR Description: expressed protein [Arabidopsis thaliana]
  misc_feature (1)..(237): Homolog of NCBI NO: 18396047 NR Description: expressed protein [Arabidopsis thaliana]
  misc_feature (1)..(237): Homolog of NCBI NO: 15237552 NR Description: expressed protein [Arabidopsis thaliana]

SEQ ID NO: 33737 - DNA, 801 bp, Arabidopsis thaliana; identical to SEQ ID NO: 30147
  misc_feature (1)..(801): Ceres Seq. ID no. 12377352
  misc_feature: MA Experiment ID: 108434 Result: Up-regulated in Transcription
  misc_feature: MA Experiment 108434 PARAMETER Experiment Name: At_Root_Tips_cDNA_P Parameter: Tissue Value: Root Tips
  misc_feature: MA Experiment ID: 108462 Result: Down-regulated in Transcription
  misc_feature: MA Experiment 108462 PARAMETER Experiment Name: At_Germinating_Seeds_cDNA_P Parameter: Age (day) Value: 2 vs. 0
  misc_feature: MA Experiment 108462 PARAMETER Experiment Name: At_Germinating_Seeds_cDNA_P Parameter: Tissue Value: Germinating Seeds
  misc_feature: MA Experiment ID: 108463 Result: Down-regulated in Transcription
  misc_feature: MA Experiment 108463 PARAMETER Experiment Name: At_Germinating_Seeds_cDNA_P Parameter: Age (day) Value: 3 vs. 0
  misc_feature: MA Experiment 108463 PARAMETER Experiment Name: At_Germinating_Seeds_cDNA_P Parameter: Tissue Value: Germinating Seeds
  misc_feature: MA Experiment ID: 108464 Result: Down-regulated in Transcription
  misc_feature: MA Experiment 108464 PARAMETER Experiment Name: At_Germinating_Seeds_cDNA_P Parameter: Age (day) Value: 4 vs. 0
  misc_feature: MA Experiment 108464 PARAMETER Experiment Name: At_Germinating_Seeds_cDNA_P Parameter: Tissue Value: Germinating Seeds
  misc_feature: MA Experiment ID: 108572 Result: Down-regulated in Transcription
  misc_feature: MA Experiment 108572 PARAMETER Experiment Name: At_Drought_cDNA_P Parameter: Timepoint (hr) Value: 1
  misc_feature: MA Experiment 108572 PARAMETER Experiment Name: At_Drought_cDNA_P Parameter: Tissue Value: Aerial
  misc_feature: MA Experiment 108572 PARAMETER Experiment Name: At_Drought_cDNA_P Parameter: Treatment Value: Drought vs. No Drought
  misc_feature: MA Experiment ID: 108573 Result: Down-regulated in Transcription
  misc_feature: MA Experiment 108573 PARAMETER Experiment Name: At_Drought_cDNA_P Parameter: Timepoint (hr) Value: 6
  misc_feature: MA Experiment 108573 PARAMETER Experiment Name: At_Drought_cDNA_P Parameter: Tissue Value: Aerial
  misc_feature: MA Experiment 108573 PARAMETER Experiment Name: At_Drought_cDNA_P Parameter: Treatment Value: Drought vs. No Drought
  misc_feature: MA Experiment ID: 108579 Result: Up-regulated in Transcription
  misc_feature: MA Experiment 108579 PARAMETER Experiment Name: At_4deg_Cold_cDNA_P Parameter: Temperature (deg C) Value: 4 vs. 22
  misc_feature: MA Experiment 108579 PARAMETER Experiment Name: At_4deg_Cold_cDNA_P Parameter: Timepoint (hr) Value: 6
  misc_feature: MA Experiment 108579 PARAMETER Experiment Name: At_4deg_Cold_cDNA_P Parameter: Tissue Value: Aerial
  misc_feature: MA Experiment ID: 108585 Result: Down-regulated in Transcription
  misc_feature: MA Experiment 108585 PARAMETER Experiment Name: At_5mM_NaNP_cDNA_P Parameter: Timepoint (hr) Value: 6
  misc_feature: MA Experiment 108585 PARAMETER Experiment Name: At_5mM_NaNP_cDNA_P Parameter: Tissue Value: Aerial
  misc_feature: MA Experiment 108585 PARAMETER Experiment Name: At_5mM_NaNP_cDNA_P Parameter: Treatment Value: null
  misc_feature: MA Experiment ID: 20000113 Result: Down-regulated in Transcription
  misc_feature: MA Experiment 20000113 PARAMETER Experiment Name: At_42deg_Heat_cDNA_P Parameter: Temperature (deg C) Value: 42 vs. 22
  misc_feature: MA Experiment 20000113 PARAMETER Experiment Name: At_42deg_Heat_cDNA_P Parameter: Timepoint (hr) Value: 8
  misc_feature: MA Experiment 20000113 PARAMETER Experiment Name: At_42deg_Heat_cDNA_P Parameter: Tissue Value: Aerial

SEQ ID NO: 33738 - protein, 169 aa, Arabidopsis thaliana; identical to SEQ ID NO: 30148
  peptide (1)..(169): Ceres Seq. ID no. 12377353
  misc_feature (30)..(154): Pfam Name: Core histone H2A/H2B/H3/H4 Pfam Description: Core histone H2A/H2B/H3/H4
  misc_feature (32)..(158): Homolog of NCBI NO: 7439709 NR Description: histone H2A - loblolly pine
  misc_feature (40)..(159): Homolog of NCBI NO: 15237024 NR Description: histone H2A- like protein
  misc_feature (28)..(162): Homolog of NCBI NO: 685035 NR Description: histone H2A homolog
  misc_feature (32)..(159): Homolog of NCBI NO: 15239697 NR Description: histone H2A (gb|AAF64418.1)
  misc_feature (28)..(169): Homolog of NCBI NO: 21321778 NR Description: unknown protein [Oryza sativa (japonica
  misc_feature (34)..(169): Homolog of NCBI NO: 462234 NR Description: Histone H2A
  misc_feature (32)..(169): Homolog of NCBI NO: 15214035 NR Description: Histone H2A
  misc_feature (28)..(169): Homolog of NCBI NO: 21593507 NR Description: putative histone H2A [Arabidopsis thaliana]
  misc_feature (28)..(169): Homolog of NCBI NO: 15223948 NR Description: putative histone H2A
  misc_feature (28)..(169): Homolog of NCBI NO: 15221875 NR Description: histone H2A, putative

SEQ ID NO: 33739 - protein, 142 aa, Arabidopsis thaliana; identical to SEQ ID NO: 30149
  peptide (1)..(142): Ceres Seq. ID no. 12377354
  misc_feature (3)..(127): Pfam Name: Core histone H2A/H2B/H3/H4 Pfam Description: Core histone H2A/H2B/H3/H4
  misc_feature (5)..(131): Homolog of NCBI NO: 7439709 NR Description: histone H2A - loblolly pine
  misc_feature (13)..(132): Homolog of NCBI NO: 15237024 NR Description: histone H2A- like protein
  misc_feature (1)..(135): Homolog of NCBI NO: 685035 NR Description: histone H2A homolog
  misc_feature (5)..(132): Homolog of NCBI NO: 15239697 NR Description: histone H2A (gb|AAF64418.1)
  misc_feature (1)..(142): Homolog of NCBI NO: 21321778 NR Description: unknown protein [Oryza sativa (japonica
  misc_feature (7)..(142): Homolog of NCBI NO: 462234 NR Description: Histone H2A
  misc_feature (5)..(142): Homolog of NCBI NO: 15214035 NR Description: Histone H2A
  misc_feature (1)..(142): Homolog of NCBI NO: 21593507 NR Description: putative histone H2A [Arabidopsis thaliana]
  misc_feature (1)..(142): Homolog of NCBI NO: 15223948 NR Description: putative histone H2A
  misc_feature (1)..(142): Homolog of NCBI NO: 15221875 NR Description: histone H2A, putative

SEQ ID NO: 33740 - DNA, 897 bp, Arabidopsis thaliana; identical to SEQ ID NO: 30150
  misc_feature (1)..(897): Ceres Seq. ID no. 12394147
  misc_feature: MA Experiment ID: 108462 Result: Up-regulated in Transcription
  misc_feature: MA Experiment 108462 PARAMETER Experiment Name: At_Germinating_Seeds_cDNA_P Parameter: Age (day) Value: 2 vs. 0
  misc_feature: MA Experiment 108462 PARAMETER Experiment Name: At_Germinating_Seeds_cDNA_P Parameter: Tissue Value: Germinating Seeds
  misc_feature: MA Experiment ID: 108573 Result: Down-regulated in Transcription
  misc_feature: MA Experiment 108573 PARAMETER Experiment Name: At_Drought_cDNA_P Parameter: Timepoint (hr) Value: 6
  misc_feature: MA Experiment 108573 PARAMETER Experiment Name: At_Drought_cDNA_P Parameter: Tissue Value: Aerial
  misc_feature: MA Experiment 108573 PARAMETER Experiment Name: At_Drought_cDNA_P Parameter: Treatment Value: Drought vs. No Drought
  misc_feature: MA Experiment ID: 108595 Result: Down-regulated in Transcription
  misc_feature: MA Experiment 108595 PARAMETER Experiment Name: At_Ler-pi_Ovule_cDNA_P Parameter: Plant Line Value: null
  misc_feature: MA Experiment ID: 20000069 Result: Down-regulated in Transcription
  misc_feature: MA Experiment 20000069 PARAMETER Experiment Name: At_100uM_ABA_Mutants_cDNA_P Parameter: Plant Line Value: CS23
  misc_feature: MA Experiment 20000069 PARAMETER Experiment Name: At_100uM_ABA_Mutants_cDNA_P Parameter: Timepoint (hr) Value: 6
  misc_feature: MA Experiment 20000069 PARAMETER Experiment Name: At_100uM_ABA_Mutants_cDNA_P Parameter: Tissue Value: Aerial
  misc_feature: MA Experiment 20000069 PARAMETER Experiment Name: At_100uM_ABA_Mutants_cDNA_P Parameter: Treatment Value: 100uM ABA vs. No Treatment
  misc_feature: MA Experiment ID: 20000070 Result: Down-regulated in Transcription
  misc_feature: MA Experiment 20000070 PARAMETER Experiment Name: At_100uM_ABA_Mutants_cDNA_P Parameter: Plant Line Value: CS24
  misc_feature: MA Experiment 20000070 PARAMETER Experiment Name: At_100uM_ABA_Mutants_cDNA_P Parameter: Timepoint (hr) Value: 6
  misc_feature: MA Experiment 20000070 PARAMETER Experiment Name: At_100uM_ABA_Mutants_cDNA_P Parameter: Tissue Value: Aerial
  misc_feature: MA Experiment 20000070 PARAMETER Experiment Name: At_100uM_ABA_Mutants_cDNA_P Parameter: Treatment Value: 100uM ABA vs. No Treatment
  misc_feature: MA Experiment ID: 20000071 Result: Down-regulated in Transcription
  misc_feature: MA Experiment 20000071 PARAMETER Experiment Name: At_100uM_ABA_Mutants_cDNA_P Parameter: Plant Line Value: CS8104
  misc_feature: MA Experiment 20000071 PARAMETER Experiment Name: At_100uM_ABA_Mutants_cDNA_P Parameter: Timepoint (hr) Value: 6
  misc_feature: MA Experiment 20000071 PARAMETER Experiment Name: At_100uM_ABA_Mutants_cDNA_P Parameter: Tissue Value: Aerial
  misc_feature: MA Experiment 20000071 PARAMETER Experiment Name: At_100uM_ABA_Mutants_cDNA_P Parameter: Treatment Value: 100uM ABA vs. No Treatment
  misc_feature: MA Experiment ID: 20000086 Result: Down-regulated in Transcription
  misc_feature: MA Experiment 20000086 PARAMETER Experiment Name: At_100uM_ABA_Mutants_cDNA_P Parameter: Plant Line Value: CS22
  misc_feature: MA Experiment 20000086 PARAMETER Experiment Name: At_100uM_ABA_Mutants_cDNA_P Parameter: Timepoint (hr) Value: 6
  misc_feature: MA Experiment 20000086 PARAMETER Experiment Name: At_100uM_ABA_Mutants_cDNA_P Parameter: Tissue Value: Aerial
  misc_feature: MA Experiment 20000086 PARAMETER Experiment Name: At_100uM_ABA_Mutants_cDNA_P Parameter: Treatment Value: 100uM ABA vs. No Treatment
  misc_feature: MA Experiment ID: 20000088 Result: Down-regulated in Transcription
  misc_feature: MA Experiment 20000088 PARAMETER Experiment Name: At_100uM_ABA_Mutants_cDNA_P Parameter: Plant Line Value: Landsberg
  misc_feature: MA Experiment 20000088 PARAMETER Experiment Name: At_100uM_ABA_Mutants_cDNA_P Parameter: Timepoint (hr) Value: 6
  misc_feature: MA Experiment 20000088 PARAMETER Experiment Name: At_100uM_ABA_Mutants_cDNA_P Parameter: Tissue Value: Aerial
  misc_feature: MA Experiment 20000088 PARAMETER Experiment Name: At_100uM_ABA_Mutants_cDNA_P Parameter: Treatment Value: 100uM ABA vs. No Treatment
  misc_feature: MA Experiment ID: 20000089 Result: Down-regulated in Transcription
  misc_feature: MA Experiment ID: 20000090 Result: Down-regulated in Transcription
  misc_feature: MA Experiment ID: 20000117 Result: Down-regulated in Transcription
  misc_feature: MA Experiment 20000117 PARAMETER Experiment Name: At_100uM_ABA_Mutants_cDNA_P Parameter: Plant Line Value: Columbia
  misc_feature: MA Experiment 20000117 PARAMETER Experiment Name: At_100uM_ABA_Mutants_cDNA_P Parameter: Timepoint (hr) Value: 6
  misc_feature: MA Experiment 20000117 PARAMETER Experiment Name: At_100uM_ABA_Mutants_cDNA_P Parameter: Tissue Value: Aerial
  misc_feature: MA Experiment 20000117 PARAMETER Experiment Name: At_100uM_ABA_Mutants_cDNA_P Parameter: Treatment Value: 100uM ABA vs. No Treatment
  misc_feature: MA Experiment ID: 20000180 Result: Up-regulated in Transcription
  misc_feature: MA Experiment 20000180 PARAMETER Experiment Name: At_Germinating_Seeds_P Parameter: Age (hr) Value: 24 vs. 0
  misc_feature: MA Experiment 20000180 PARAMETER Experiment Name: At_Germinating_Seeds_P Parameter: Tissue Value: Germinating Seeds
  misc_feature: MA Experiment ID: 20000184 Result: Up-regulated in Transcription
  misc_feature: MA Experiment 20000184 PARAMETER Experiment Name: At_Shoots__P Parameter: Age (day) Value: 7
  misc_feature: MA Experiment 20000184 PARAMETER Experiment Name: At_Shoots__P Parameter: Tissue Value: Shoots vs. Whole Plant
  misc_feature: MA Experiment ID: 20000185 Result: Down-regulated in Transcription
  misc_feature: MA Experiment 20000185 PARAMETER Experiment Name: At_Roots__P Parameter: Age (day) Value: 7 vs. 21
  misc_feature: MA Experiment 20000185 PARAMETER Experiment Name: At_Roots__P Parameter: Organism Value: A. thaliana
  misc_feature: MA Experiment 20000185 PARAMETER Experiment Name: At_Roots__P Parameter: Tissue Value: Roots vs. Whole Plant
  misc_feature: MA Experiment ID: 20000224 Result: Up-regulated in Transcription
  misc_feature: MA Experiment ID: 20000286 Result: Down-regulated in Transcription
  misc_feature: MA Experiment 20000286 PARAMETER Experiment Name: At_Open_Flower_P Parameter: Age (day) Value: 21
  misc_feature: MA Experiment 20000286 PARAMETER Experiment Name: At_Open_Flower_P Parameter: Plant Line Value: WS
  misc_feature: MA Experiment 20000286 PARAMETER Experiment Name: At_Open_Flower_P Parameter: Tissue Value: Half Open vs. Whole Plant
  misc_feature: MA Experiment ID: 20000438 Result: Up-regulated in Transcription
  misc_feature: MA Experiment 20000438 PARAMETER Experiment Name: At_Shoots__P Parameter: Age (day) Value: 14
  misc_feature: MA Experiment 20000438 PARAMETER Experiment Name: At_Shoots__P Parameter: Tissue Value: Shoots vs. Whole Plant
  misc_feature: MA Experiment ID: 20000439 Result: Down-regulated in Transcription
  misc_feature: MA Experiment 20000439 PARAMETER Experiment Name: At_Roots__P Parameter: Age (day) Value: 14 vs. 21
  misc_feature: MA Experiment 20000439 PARAMETER Experiment Name: At_Roots__P Parameter: Organism Value: A. thaliana
  misc_feature: MA Experiment 20000439 PARAMETER Experiment Name: At_Roots__P Parameter: Tissue Value: Roots vs. Whole Plant
  misc_feature: MA Experiment ID: 20000573 Result: Down-regulated in Transcription
  misc_feature: MA Experiment 20000573 PARAMETER Experiment Name: At_100uM_ABA_Mutants__P Parameter: Organism Value: A. thaliana
  misc_feature: MA Experiment 20000573 PARAMETER Experiment Name: At_100uM_ABA_Mutants__P Parameter: Plant Line Value: CS22 vs. Ler wt
  misc_feature: MA Experiment 20000573 PARAMETER Experiment Name: At_100uM_ABA_Mutants__P Parameter: Timepoint (hr) Value: N/A
  misc_feature: MA Experiment 20000573 PARAMETER Experiment Name: At_100uM_ABA_Mutants__P Parameter: Tissue Value: Whole Plant
  misc_feature: MA Experiment 20000573 PARAMETER Experiment Name: At_100uM_ABA_Mutants__P Parameter: Treatment Value: None
  misc_feature: MA Experiment ID: 20000794 Result: Down-regulated in Transcription
  misc_feature: MA Experiment 20000794 PARAMETER Experiment Name: At_Petals_P Parameter: Age (day) Value: 23-25 days
  misc_feature: MA Experiment 20000794 PARAMETER Experiment Name: At_Petals_P Parameter: Plant Line Value: WS
  misc_feature: MA Experiment 20000794 PARAMETER Experiment Name: At_Petals_P Parameter: Tissue Value: Petals vs. Whole plant
  misc_feature: MA Experiment ID: 20001248 Result: Down-regulated in Transcription
  misc_feature: MA Experiment 20001248 PARAMETER Experiment Name: At_Far-red-induction_P Parameter: Age (day) Value: 7
  misc_feature: MA Experiment 20001248 PARAMETER Experiment Name: At_Far-red-induction_P Parameter: Light Value: Far-red vs. White
  misc_feature: MA Experiment 20001248 PARAMETER Experiment Name: At_Far-red-induction_P Parameter: Organism Value: A. thaliana
  misc_feature: MA Experiment 20001248 PARAMETER Experiment Name: At_Far-red-induction_P Parameter: Plant Line Value: Columbia
  misc_feature: MA Experiment 20001248 PARAMETER Experiment Name: At_Far-red-induction_P Parameter: Timepoint (hr) Value: 4
  misc_feature: MA Experiment 20001248 PARAMETER Experiment Name: At_Far-red-induction_P Parameter: Tissue Value: Whole Plant
  misc_feature: MA Experiment ID: 20001757 Result: Up-regulated in Transcription
  misc_feature: MA Experiment 20001757 PARAMETER Experiment Name: At_50mM_NH4NO3_L-to-H_P Parameter: Timepoint (hr) Value: 6
  misc_feature: MA Experiment 20001757 PARAMETER Experiment Name: At_50mM_NH4NO3_L-to-H_P Parameter: Tissue Value: Leaf
  misc_feature: MA Experiment 20001757 PARAMETER Experiment Name: At_50mM_NH4NO3_L-to-H_P Parameter: Treatment Value: 50mM NH4NO3 vs 100mM Mannitol
  misc_feature: MA Experiment ID: 20001904 Result: Down-regulated in Transcription
  misc_feature: MA Experiment 20001904 PARAMETER Experiment Name: At_Drought_Reproduction_P Parameter: Age (day) Value: 37
  misc_feature: MA Experiment 20001904 PARAMETER Experiment Name: At_Drought_Reproduction_P Parameter: Organism Value: A. thaliana
  misc_feature: MA Experiment 20001904 PARAMETER Experiment Name: At_Drought_Reproduction_P Parameter: Plant Line Value: WS
  misc_feature: MA Experiment 20001904 PARAMETER Experiment Name: At_Drought_Reproduction_P Parameter: Timepoint (day) Value: 7
  misc_feature: MA Experiment 20001904 PARAMETER Experiment Name: At_Drought_Reproduction_P Parameter: Tissue Value: Rosettes
  misc_feature: MA Experiment 20001904 PARAMETER Experiment Name: At_Drought_Reproduction_P Parameter: Treatment Value: Drought vs. No Drought
  misc_feature: MA Experiment ID: 20001905 Result: Down-regulated in Transcription
  misc_feature: MA Experiment 20001905 PARAMETER Experiment Name: At_Drought_Reproduction_P Parameter: Age (day) Value: 40
  misc_feature: MA Experiment 20001905 PARAMETER Experiment Name: At_Drought_Reproduction_P Parameter: Organism Value: A. thaliana
  misc_feature: MA Experiment 20001905 PARAMETER Experiment Name: At_Drought_Reproduction_P Parameter: Plant Line Value: WS
  misc_feature: MA Experiment 20001905 PARAMETER Experiment Name: At_Drought_Reproduction_P Parameter: Timepoint (day) Value: 10
  misc_feature: MA Experiment 20001905 PARAMETER Experiment Name: At_Drought_Reproduction_P Parameter: Tissue Value: Rosettes
  misc_feature: MA Experiment 20001905 PARAMETER Experiment Name: At_Drought_Reproduction_P Parameter: Treatment Value: Drought vs. No Drought
  misc_feature: MA Experiment ID: 20001906 Result: Down-regulated in Transcription
  misc_feature: MA Experiment 20001906 PARAMETER Experiment Name: At_Drought_Reproduction_P Parameter: Age (day) Value: 35
  misc_feature: MA Experiment 20001906 PARAMETER Experiment Name: At_Drought_Reproduction_P Parameter: Organism Value: A. thaliana
  misc_feature: MA Experiment 20001906 PARAMETER Experiment Name: At_Drought_Reproduction_P Parameter: Plant Line Value: WS
  misc_feature: MA Experiment 20001906 PARAMETER Experiment Name: At_Drought_Reproduction_P Parameter: Timepoint (day) Value: 5
  misc_feature: MA Experiment 20001906 PARAMETER Experiment Name: At_Drought_Reproduction_P Parameter: Tissue Value: Siliques
  misc_feature: MA Experiment 20001906 PARAMETER Experiment Name: At_Drought_Reproduction_P Parameter: Treatment Value: Drought vs. No Drought

SEQ ID NO: 33741 - protein, 113 aa, Arabidopsis thaliana; identical to SEQ ID NO: 30151
  peptide (1)..(113): Ceres Seq. ID no. 12394148

SEQ ID NO: 33742 - protein, 94 aa, Arabidopsis thaliana; identical to SEQ ID NO: 30152
  peptide (1)..(94): Ceres Seq. ID no. 12394149
  misc_feature (1)..(55): Homolog of NCBI NO: 23042867 NR Description: hypothetical protein [Trichodesmium erythraeum
  misc_feature (1)..(55): Homolog of NCBI NO: 23126475 NR Description: hypothetical protein [Nostoc punctiforme]
  misc_feature (1)..(54): Homolog of NCBI NO: 11465668 NR Description: ORF238 [Porphyra purpurea]
  misc_feature (1)..(54): Homolog of NCBI NO: 22299137 NR Description: ORF_ID:tlr1594~hypothetical protein
  misc_feature (1)..(60): Homolog of NCBI NO: 33861481 NR Description: conserved hypothetical protein
  misc_feature (1)..(55): Homolog of NCBI NO: 17229318 NR Description: hypothetical protein [Nostoc sp. PCC 7120]
  misc_feature (1)..(55): Homolog of NCBI NO: 23042866 NR Description: hypothetical protein [Trichodesmium erythraeum
  misc_feature (1)..(94): Homolog of NCBI NO: 17380924 NR Description: unknown protein [Arabidopsis thaliana]
  misc_feature (1)..(94): Homolog of NCBI NO: 32816239 NR Description: GUN4 mutant [Arabidopsis thaliana]
  misc_feature (1)..(94): Homolog of NCBI NO: 15231674 NR Description: putative protein

SEQ ID NO: 33743 - DNA, 636 bp, Arabidopsis thaliana; identical to SEQ ID NO: 30153
  misc_feature (1)..(636): Ceres Seq. ID no. 12337350
  misc_feature: MA Experiment ID: 108434 Result: Up-regulated in Transcription
  misc_feature: MA Experiment 108434 PARAMETER Experiment Name: At_Root_Tips_cDNA_P Parameter: Tissue Value: Root Tips
  misc_feature: MA Experiment ID: 108462 Result: Up-regulated in Transcription
  misc_feature: MA Experiment 108462 PARAMETER Experiment Name: At_Germinating_Seeds_cDNA_P Parameter: Age (day) Value: 2 vs. 0
  misc_feature: MA Experiment 108462 PARAMETER Experiment Name: At_Germinating_Seeds_cDNA_P Parameter: Tissue Value: Germinating Seeds
  misc_feature: MA Experiment ID: 108572 Result: Down-regulated in Transcription
  misc_feature: MA Experiment 108572 PARAMETER Experiment Name: At_Drought_cDNA_P Parameter: Timepoint (hr) Value: 1
  misc_feature: MA Experiment 108572 PARAMETER Experiment Name: At_Drought_cDNA_P Parameter: Tissue Value: Aerial
  misc_feature: MA Experiment 108572 PARAMETER Experiment Name: At_Drought_cDNA_P Parameter: Treatment Value: Drought vs. No Drought
  misc_feature: MA Experiment ID: 108573 Result: Down-regulated in Transcription
  misc_feature: MA Experiment 108573 PARAMETER Experiment Name: At_Drought_cDNA_P Parameter: Timepoint (hr) Value: 6
  misc_feature: MA Experiment 108573 PARAMETER Experiment Name: At_Drought_cDNA_P Parameter: Tissue Value: Aerial
  misc_feature: MA Experiment 108573 PARAMETER Experiment Name: At_Drought_cDNA_P Parameter: Treatment Value: Drought vs. No Drought
  misc_feature: MA Experiment ID: 108576 Result: Down-regulated in Transcription
  misc_feature: MA Experiment 108576 PARAMETER Experiment Name: At_42deg_Heat_cDNA_P Parameter: Temperature (deg C) Value: 42 vs. 22
  misc_feature: MA Experiment 108576 PARAMETER Experiment Name: At_42deg_Heat_cDNA_P Parameter: Timepoint (hr) Value: 1
  misc_feature: MA Experiment 108576 PARAMETER Experiment Name: At_42deg_Heat_cDNA_P Parameter: Tissue Value: Aerial
  misc_feature: MA Experiment ID: 108577 Result: Down-regulated in Transcription
  misc_feature: MA Experiment 108577 PARAMETER Experiment Name: At_42deg_Heat_cDNA_P Parameter: Temperature (deg C) Value: 42 vs. 22
  misc_feature: MA Experiment 108577 PARAMETER Experiment Name: At_42deg_Heat_cDNA_P Parameter: Timepoint (hr) Value: 6
  misc_feature: MA Experiment 108577 PARAMETER Experiment Name: At_42deg_Heat_cDNA_P Parameter: Tissue Value: Aerial
  misc_feature: MA Experiment ID: 108579 Result: Up-regulated in Transcription
  misc_feature: MA Experiment 108579 PARAMETER Experiment Name: At_4deg_Cold_cDNA_P Parameter: Temperature (deg C) Value: 4 vs. 22
  misc_feature: MA Experiment 108579 PARAMETER Experiment Name: At_4deg_Cold_cDNA_P Parameter: Timepoint (hr) Value: 6
  misc_feature: MA Experiment 108579 PARAMETER Experiment Name: At_4deg_Cold_cDNA_P Parameter: Tissue Value: Aerial
  misc_feature: MA Experiment ID: 20000093 Result: Down-regulated in Transcription
  misc_feature: MA Experiment 20000093 PARAMETER Experiment Name: At_42deg_Heat_cDNA_P Parameter: Temperature (deg C) Value: 42 vs. 22
  misc_feature: MA Experiment 20000093 PARAMETER Experiment Name: At_42deg_Heat_cDNA_P Parameter: Timepoint (hr) Value: 0.5
  misc_feature: MA Experiment 20000093 PARAMETER Experiment Name: At_42deg_Heat_cDNA_P Parameter: Tissue Value: Aerial
  misc_feature: MA Experiment ID: 20000111 Result: Down-regulated in Transcription
  misc_feature: MA Experiment 20000111 PARAMETER Experiment Name: At_42deg_Heat_cDNA_P Parameter: Temperature (deg C) Value: 42 vs. 22
  misc_feature: MA Experiment 20000111 PARAMETER Experiment Name: At_42deg_Heat_cDNA_P Parameter: Timepoint (hr) Value: 6
  misc_feature: MA Experiment 20000111 PARAMETER Experiment Name: At_42deg_Heat_cDNA_P Parameter: Tissue Value: Aerial
  misc_feature: MA Experiment ID: 20000113 Result: Down-regulated in Transcription
  misc_feature: MA Experiment 20000113 PARAMETER Experiment Name: At_42deg_Heat_cDNA_P Parameter: Temperature (deg C) Value: 42 vs. 22
  misc_feature: MA Experiment 20000113 PARAMETER Experiment Name: At_42deg_Heat_cDNA_P Parameter: Timepoint (hr) Value: 8
  misc_feature: MA Experiment 20000113 PARAMETER Experiment Name: At_42deg_Heat_cDNA_P Parameter: Tissue Value: Aerial
  misc_feature: MA Experiment ID: 20000144 Result: Down-regulated in Transcription
  misc_feature: MA Experiment 20000144 PARAMETER Experiment Name: At_42deg_Heat_cDNA_P Parameter: Temperature (deg C) Value: 42 vs. 22
  misc_feature: MA Experiment 20000144 PARAMETER Experiment Name: At_42deg_Heat_cDNA_P Parameter: Timepoint (hr) Value: 1
  misc_feature: MA Experiment 20000144 PARAMETER Experiment Name: At_42deg_Heat_cDNA_P Parameter: Tissue Value: Aerial
  misc_feature: MA Experiment ID: 20000171 Result: Down-regulated in Transcription
  misc_feature: MA Experiment 20000171 PARAMETER Experiment Name: At_42deg_Heat_P Parameter: Age (day) Value: 14
  misc_feature: MA Experiment 20000171 PARAMETER Experiment Name: At_42deg_Heat_P Parameter: Organism Value: A. thaliana
  misc_feature: MA Experiment 20000171 PARAMETER Experiment Name: At_42deg_Heat_P Parameter: Plant Line Value: WS
  misc_feature: MA Experiment 20000171 PARAMETER Experiment Name: At_42deg_Heat_P Parameter: Temperature (deg C) Value: 42 vs. 22
  misc_feature: MA Experiment 20000171 PARAMETER Experiment Name: At_42deg_Heat_P Parameter: Timepoint (hr) Value: 1
  misc_feature: MA Experiment 20000171 PARAMETER Experiment Name: At_42deg_Heat_P Parameter: Tissue Value: Aerial
  misc_feature: MA Experiment ID: 20000173 Result: Down-regulated in Transcription
  misc_feature: MA Experiment 20000173 PARAMETER Experiment Name: At_42deg_Heat_P Parameter: Age (day) Value: 14
  misc_feature: MA Experiment 20000173 PARAMETER Experiment Name: At_42deg_Heat_P Parameter: Organism Value: A. thaliana
  misc_feature: MA Experiment 20000173 PARAMETER Experiment Name: At_42deg_Heat_P Parameter: Plant Line Value: WS
  misc_feature: MA Experiment 20000173 PARAMETER Experiment Name: At_42deg_Heat_P Parameter: Temperature (deg C) Value: 42 vs. 22
  misc_feature: MA Experiment 20000173 PARAMETER Experiment Name: At_42deg_Heat_P Parameter: Timepoint (hr) Value: 6
  misc_feature: MA Experiment 20000173 PARAMETER Experiment Name: At_42deg_Heat_P Parameter: Tissue Value: Aerial
  misc_feature: MA Experiment ID: 20000179 Result: Up-regulated in Transcription
  misc_feature: MA Experiment 20000179 PARAMETER Experiment Name: At_Germinating_Seeds_P Parameter: Age (hr) Value: 6 vs. 0
  misc_feature: MA Experiment 20000179 PARAMETER Experiment Name: At_Germinating_Seeds_P Parameter: Tissue Value: Germinating Seeds
  misc_feature: MA Experiment ID: 20000180 Result: Up-regulated in Transcription
  misc_feature: MA Experiment 20000180 PARAMETER Experiment Name: At_Germinating_Seeds_P Parameter: Age (hr) Value: 24 vs. 0
  misc_feature: MA Experiment 20000180 PARAMETER Experiment Name: At_Germinating_Seeds_P Parameter: Tissue Value: Germinating Seeds
  misc_feature: MA Experiment ID: 20000185 Result: Up-regulated in Transcription
  misc_feature: MA Experiment 20000185 PARAMETER Experiment Name: At_Roots__P Parameter: Age (day) Value: 7 vs. 21
  misc_feature: MA Experiment 20000185 PARAMETER Experiment Name: At_Roots__P Parameter: Organism Value: A. thaliana
  misc_feature: MA Experiment 20000185 PARAMETER Experiment Name: At_Roots__P Parameter: Tissue Value: Roots vs. Whole Plant
  misc_feature: MA Experiment ID: 20000234 Result: Up-regulated in Transcription
  misc_feature: MA Experiment 20000234 PARAMETER Experiment Name: At_Siliques_P Parameter: Age (day) Value: 21
  misc_feature: MA Experiment 20000234 PARAMETER Experiment Name: At_Siliques_P Parameter: Organism Value: A. thaliana
  misc_feature: MA Experiment 20000234 PARAMETER Experiment Name: At_Siliques_P Parameter: Plant Line Value: WS
  misc_feature: MA Experiment 20000234 PARAMETER Experiment Name: At_Siliques_P Parameter: Tissue Value: Less Than 5mm Siliques vs. Whole Plant
  misc_feature: MA Experiment ID: 20000264 Result: Up-regulated in Transcription
  misc_feature: MA Experiment 20000264 PARAMETER Experiment Name: At_Open_Flower_P Parameter: Age (day) Value: 21
  misc_feature: MA Experiment 20000264 PARAMETER Experiment Name: At_Open_Flower_P Parameter: Plant Line Value: WS
  misc_feature: MA Experiment 20000264 PARAMETER Experiment Name: At_Open_Flower_P Parameter: Tissue Value: Open Flower vs. Whole Plant
  misc_feature: MA Experiment ID: 20000265 Result: Up-regulated in Transcription
  misc_feature: MA Experiment 20000265 PARAMETER Experiment Name: At_Open_Flower_P Parameter: Age (day) Value: 21
  misc_feature: MA Experiment 20000265 PARAMETER Experiment Name: At_Open_Flower_P Parameter: Plant Line Value: WS
  misc_feature: MA Experiment 20000265 PARAMETER Experiment Name: At_Open_Flower_P Parameter: Tissue Value: Closed Flower vs. Whole Plant
  misc_feature: MA Experiment ID: 20000437 Result: Down-regulated in Transcription
  misc_feature: MA Experiment 20000437 PARAMETER Experiment Name: At_Drought_P Parameter: Age (day) Value: 8
  misc_feature: MA Experiment 20000437 PARAMETER Experiment Name: At_Drought_P Parameter: Organism Value: A. thaliana
  misc_feature: MA Experiment 20000437 PARAMETER Experiment Name: At_Drought_P Parameter: Plant Line Value: WS
  misc_feature: MA Experiment 20000437 PARAMETER Experiment Name: At_Drought_P Parameter: Timepoint (hr) Value: 24
  misc_feature: MA Experiment 20000437 PARAMETER Experiment Name: At_Drought_P Parameter: Tissue Value: Whole Plant
  misc_feature: MA Experiment 20000437 PARAMETER Experiment Name: At_Drought_P Parameter: Treatment Value: Drought vs. No Drought
  misc_feature: MA Experiment ID: 20000439 Result: Up-regulated in Transcription
  misc_feature: MA Experiment 20000439 PARAMETER Experiment Name: At_Roots__P Parameter: Age (day) Value: 14 vs. 21
  misc_feature: MA Experiment 20000439 PARAMETER Experiment Name: At_Roots__P Parameter: Organism Value: A. thaliana
  misc_feature: MA Experiment 20000439 PARAMETER Experiment Name: At_Roots__P Parameter: Tissue Value: Roots vs. Whole Plant
  misc_feature: MA Experiment ID: 20000445 Result: Down-regulated in Transcription
  misc_feature: MA Experiment 20000445 PARAMETER Experiment Name: At_100uM_NAA__P Parameter: Age (day) Value: 14
  misc_feature: MA Experiment 20000445 PARAMETER Experiment Name: At_100uM_NAA__P Parameter: Organism Value: A. thaliana
  misc_feature: MA Experiment 20000445 PARAMETER Experiment Name: At_100uM_NAA__P Parameter: Plant Line Value: WS
  misc_feature: MA Experiment 20000445 PARAMETER Experiment Name: At_100uM_NAA__P Parameter: Timepoint (hr) Value: 6
  misc_feature: MA Experiment 20000445 PARAMETER Experiment Name: At_100uM_NAA__P Parameter: Tissue Value: Aerial
  misc_feature: MA Experiment 20000445 PARAMETER Experiment Name: At_100uM_NAA__P Parameter: Treatment Value: 100uM NAA vs. No Treatment
  misc_feature: MA Experiment ID: 20001248 Result: Down-regulated in Transcription
  misc_feature: MA Experiment 20001248 PARAMETER Experiment Name: At_Far-red-induction_P Parameter: Age (day) Value: 7
  misc_feature: MA Experiment 20001248 PARAMETER Experiment Name: At_Far-red-induction_P Parameter: Light Value: Far-red vs. White
  misc_feature: MA Experiment 20001248 PARAMETER Experiment Name: At_Far-red-induction_P Parameter: Organism Value: A. thaliana
  misc_feature: MA Experiment 20001248 PARAMETER Experiment Name: At_Far-red-induction_P Parameter: Plant Line Value: Columbia
  misc_feature: MA Experiment 20001248 PARAMETER Experiment Name: At_Far-red-induction_P Parameter: Timepoint (hr) Value: 4
  misc_feature: MA Experiment 20001248 PARAMETER Experiment Name: At_Far-red-induction_P Parameter: Tissue Value: Whole Plant
  misc_feature: MA Experiment ID: 20001450 Result: Down-regulated in Transcription
  misc_feature: MA Experiment 20001450 PARAMETER Experiment Name: At_Far-red-induction_P Parameter: Age (day) Value: 7
  misc_feature: MA Experiment 20001450 PARAMETER Experiment Name: At_Far-red-induction_P Parameter: Light Value: Far-red vs. White
  misc_feature: MA Experiment 20001450 PARAMETER Experiment Name: At_Far-red-induction_P Parameter: Organism Value: A. thaliana
  misc_feature: MA Experiment 20001450 PARAMETER Experiment Name: At_Far-red-induction_P Parameter: Plant Line Value: Columbia
  misc_feature: MA Experiment 20001450 PARAMETER Experiment Name: At_Far-red-induction_P Parameter: Timepoint (hr) Value: 8
  misc_feature: MA Experiment 20001450 PARAMETER Experiment Name: At_Far-red-induction_P Parameter: Tissue Value: Whole Plant
  misc_feature: MA Experiment ID: 20001757 Result: Up-regulated in Transcription
  misc_feature: MA Experiment 20001757 PARAMETER Experiment Name: At_50mM_NH4NO3_L-to-H_P Parameter: Timepoint (hr) Value: 6
  misc_feature: MA Experiment 20001757 PARAMETER Experiment Name: At_50mM_NH4NO3_L-to-H_P Parameter: Tissue Value: Leaf
  misc_feature: MA Experiment 20001757 PARAMETER Experiment Name: At_50mM_NH4NO3_L-to-H_P Parameter: Treatment Value: 50mM NH4NO3 vs 100mM Mannitol
  misc_feature: MA Experiment ID: 20001911 Result: Down-regulated in Transcription
  misc_feature: MA Experiment 20001911 PARAMETER Experiment Name: At_Drought_Reproduction_P Parameter: Age (day) Value: 40
  misc_feature: MA Experiment 20001911 PARAMETER Experiment Name: At_Drought_Reproduction_P Parameter: Organism Value: A. thaliana
  misc_feature: MA Experiment 20001911 PARAMETER Experiment Name: At_Drought_Reproduction_P Parameter: Plant Line Value: WS
  misc_feature: MA Experiment 20001911 PARAMETER Experiment Name: At_Drought_Reproduction_P Parameter: Timepoint (day) Value: 10
  misc_feature: MA Experiment 20001911 PARAMETER Experiment Name: At_Drought_Reproduction_P Parameter: Tissue Value: Flowers
  misc_feature: MA Experiment 20001911 PARAMETER Experiment Name: At_Drought_Reproduction_P Parameter: Treatment Value: Drought vs. No Drought

SEQ ID NO: 33744 - protein, 132 aa, Arabidopsis thaliana; identical to SEQ ID NO: 30154
  peptide (1)..(132): Ceres Seq. ID no. 12337351
  misc_feature (4)..(121): Pfam Name: Core histone H2A/H2B/H3/H4 Pfam Description: Core histone H2A/H2B/H3/H4
  misc_feature (1)..(132): Homolog of NCBI NO: 7439702 NR Description: histone H2A (clone TH254) - wheat
  misc_feature (1)..(132): Homolog of NCBI NO: 34393263 NR Description: histone H2A [Oryza sativa (japonica
  misc_feature (1)..(132): Homolog of NCBI NO: 34393264 NR Description: putative histone H2A [Oryza sativa (japonica
  misc_feature (1)..(132): Homolog of NCBI NO: 2130105 NR Description: histone H2A.4 - wheat
  misc_feature (1)..(132): Homolog of NCBI NO: 29837243 NR Description: putative histone H2A [Oryza sativa (japonica
  misc_feature (1)..(131): Homolog of NCBI NO: 21617982 NR Description: histone H2A-like protein [Arabidopsis thaliana]
  misc_feature (1)..(131): Homolog of NCBI NO: 15237024 NR Description: histone H2A- like protein
  misc_feature (1)..(131): Homolog of NCBI NO: 15239697 NR Description: histone H2A (gb|AAF64418.1)
  misc_feature (1)..(132): Homolog of NCBI NO: 15232330 NR Description: histone H2A, putative
  misc_feature (1)..(132): Homolog of NCBI NO: 15223708 NR Description: histone H2A, putative

SEQ ID NO: 33745 - DNA, 1105 bp, Arabidopsis thaliana; identical to SEQ ID NO: 30155
  misc_feature (1)..(1105): Ceres Seq. ID no. 12343433
  misc_feature: MA Experiment ID: 108434 Result: Up-regulated in Transcription
  misc_feature: MA Experiment 108434 PARAMETER Experiment Name: At_Root_Tips_cDNA_P Parameter: Tissue Value: Root Tips
  misc_feature: MA Experiment ID: 108462 Result: Down-regulated in Transcription
  misc_feature: MA Experiment 108462 PARAMETER Experiment Name: At_Germinating_Seeds_cDNA_P Parameter: Age (day) Value: 2 vs. 0
  misc_feature: MA Experiment 108462 PARAMETER Experiment Name: At_Germinating_Seeds_cDNA_P Parameter: Tissue Value: Germinating Seeds
  misc_feature: MA Experiment ID: 108463 Result: Down-regulated in Transcription
  misc_feature: MA Experiment 108463 PARAMETER Experiment Name: At_Germinating_Seeds_cDNA_P Parameter: Age (day) Value: 3 vs. 0
  misc_feature: MA Experiment 108463 PARAMETER Experiment Name: At_Germinating_Seeds_cDNA_P Parameter: Tissue Value: Germinating Seeds
  misc_feature: MA Experiment ID: 108464 Result: Down-regulated in Transcription
  misc_feature: MA Experiment 108464 PARAMETER Experiment Name: At_Germinating_Seeds_cDNA_P Parameter: Age (day) Value: 4 vs. 0
  misc_feature: MA Experiment 108464 PARAMETER Experiment Name: At_Germinating_Seeds_cDNA_P Parameter: Tissue Value: Germinating Seeds
  misc_feature: MA Experiment ID: 108569 Result: Up-regulated in Transcription
  misc_feature: MA Experiment 108569 PARAMETER Experiment Name: At_0.001%_MeJA__cDNA_P Parameter: Timepoint (hr) Value: 6
  misc_feature: MA Experiment 108569 PARAMETER Experiment Name: At_0.001%_MeJA__cDNA_P Parameter: Tissue Value: Aerial
  misc_feature: MA Experiment 108569 PARAMETER Experiment Name: At_0.001%_MeJA__cDNA_P Parameter: Treatment Value: 0.001% MeJA vs. No Treatment
  misc_feature: MA Experiment ID: 108573 Result: Up-regulated in Transcription
  misc_feature: MA Experiment 108573 PARAMETER Experiment Name: At_Drought_cDNA_P Parameter: Timepoint (hr) Value: 6
  misc_feature: MA Experiment 108573 PARAMETER Experiment Name: At_Drought_cDNA_P Parameter: Tissue Value: Aerial
  misc_feature: MA Experiment 108573 PARAMETER Experiment Name: At_Drought_cDNA_P Parameter: Treatment Value: Drought vs. No Drought
  misc_feature: MA Experiment ID: 108585 Result: Up-regulated in Transcription
  misc_feature: MA Experiment 108585 PARAMETER Experiment Name: At_5mM_NaNP_cDNA_P Parameter: Timepoint (hr) Value: 6
  misc_feature: MA Experiment 108585 PARAMETER Experiment Name: At_5mM_NaNP_cDNA_P Parameter: Tissue Value: Aerial
  misc_feature: MA Experiment 108585 PARAMETER Experiment Name: At_5mM_NaNP_cDNA_P Parameter: Treatment Value: null
  misc_feature: MA Experiment ID: 20000179 Result: Down-regulated in Transcription
  misc_feature: MA Experiment 20000179 PARAMETER Experiment Name: At_Germinating_Seeds_P Parameter: Age (hr) Value: 6 vs. 0
  misc_feature: MA Experiment 20000179 PARAMETER Experiment Name: At_Germinating_Seeds_P Parameter: Tissue Value: Germinating Seeds
  misc_feature: MA Experiment ID: 20000180 Result: Down-regulated in Transcription
  misc_feature: MA Experiment 20000180 PARAMETER Experiment Name: At_Germinating_Seeds_P Parameter: Age (hr) Value: 24 vs. 0
  misc_feature: MA Experiment 20000180 PARAMETER Experiment Name: At_Germinating_Seeds_P Parameter: Tissue Value: Germinating Seeds
  misc_feature: MA Experiment ID: 20000227 Result: Up-regulated in Transcription
  misc_feature: MA Experiment 20000227 PARAMETER Experiment Name: At_Root-Tips-vs-Tops_P Parameter: Tissue Value: Root Tips vs. Root Tops
  misc_feature: MA Experiment ID: 20000265 Result: Up-regulated in Transcription
  misc_feature: MA Experiment 20000265 PARAMETER Experiment Name: At_Open_Flower_P Parameter: Age (day) Value: 21
  misc_feature: MA Experiment 20000265 PARAMETER Experiment Name: At_Open_Flower_P Parameter: Plant Line Value: WS
  misc_feature: MA Experiment 20000265 PARAMETER Experiment Name: At_Open_Flower_P Parameter: Tissue Value: Closed Flower vs. Whole Plant
  misc_feature: MA Experiment ID: 20001451 Result: Down-regulated in Transcription
  misc_feature: MA Experiment 20001451 PARAMETER Experiment Name: At_Far-red-induction_P Parameter: Age (day) Value: 7
  misc_feature: MA Experiment 20001451 PARAMETER Experiment Name: At_Far-red-induction_P Parameter: Light Value: Far-red vs. White
  misc_feature: MA Experiment 20001451 PARAMETER Experiment Name: At_Far-red-induction_P Parameter: Organism Value: A. thaliana
  misc_feature: MA Experiment 20001451 PARAMETER Experiment Name: At_Far-red-induction_P Parameter: Plant Line Value: Columbia
  misc_feature: MA Experiment 20001451 PARAMETER Experiment Name: At_Far-red-induction_P Parameter: Timepoint (hr) Value: 24
  misc_feature: MA Experiment 20001451 PARAMETER Experiment Name: At_Far-red-induction_P Parameter: Tissue Value: Whole Plant

SEQ ID NO: 33746 - protein, 309 aa, Arabidopsis thaliana; identical to SEQ ID NO: 30156
  peptide (1)..(309): Ceres Seq. ID no. 12343434
  misc_feature (90)..(272): Pfam Name: Proteasome A-type and B-type Pfam Description: Proteasome A-type and B-type
  misc_feature (42)..(296): Homolog of NCBI NO: 6755204 NR Description: proteasome (prosome, macropain) subunit, beta
  misc_feature (113)..(286): Homolog of NCBI NO: 14594931 NR Description: putative beta5 proteasome subunit [Nicotiana
  misc_feature (110)..(308): Homolog of NCBI NO: 16588840 NR Description: putative 20S proteasome beta subunit 5 [Prunus
  misc_feature (37)..(110): Homolog of NCBI NO: 3980264 NR Description: 20S proteasome beta subunit [Cicer arietinum]
  misc_feature (142)..(307): Homolog of NCBI NO: 3980264 NR Description: 20S proteasome beta subunit [Cicer arietinum]
  misc_feature (37)..(307): Homolog of NCBI NO: 8671510 NR Description: beta 5 subunit of 20S proteasome
  misc_feature (37)..(306): Homolog of NCBI NO: 3914430 NR Description: Proteasome subunit beta type 5 precursor (20S
  misc_feature (37)..(307): Homolog of NCBI NO: 15292875 NR Description: putative proteasome epsilon chain precursor
  misc_feature (37)..(307): Homolog of NCBI NO: 15222152 NR Description: 20S proteasome beta subunit E1 (PBE1)
  misc_feature (37)..(309): Homolog of NCBI NO: 15231544 NR Description: 26S proteasome beta subunit, putative

SEQ ID NO: 33747 - protein, 273 aa, Arabidopsis thaliana; identical to SEQ ID NO: 30157
  peptide (1)..(273): Ceres Seq. ID no. 12343435
  misc_feature (54)..(236): Pfam Name: Proteasome A-type and B-type Pfam Description: Proteasome A-type and B-type
  misc_feature (6)..(260): Homolog of NCBI NO: 6755204 NR Description: proteasome (prosome, macropain) subunit, beta
  misc_feature (77)..(250): Homolog of NCBI NO: 14594931 NR Description: putative beta5 proteasome subunit [Nicotiana
  misc_feature (74)..(272): Homolog of NCBI NO: 16588840 NR Description: putative 20S proteasome beta subunit 5 [Prunus
  misc_feature (1)..(74): Homolog of NCBI NO: 3980264 NR Description: 20S proteasome beta subunit [Cicer arietinum]
  misc_feature (106)..(271): Homolog of NCBI NO: 3980264 NR Description: 20S proteasome beta subunit [Cicer arietinum]
  misc_feature (1)..(271): Homolog of NCBI NO: 8671510 NR Description: beta 5 subunit of 20S proteasome
  misc_feature (1)..(270): Homolog of NCBI NO: 3914430 NR Description: Proteasome subunit beta type 5 precursor (20S
  misc_feature (1)..(271): Homolog of NCBI NO: 15292875 NR Description: putative proteasome epsilon chain precursor
  misc_feature (1)..(271): Homolog of NCBI NO: 15222152 NR Description: 20S proteasome beta subunit E1 (PBE1)
  misc_feature (1)..(273): Homolog of NCBI NO: 15231544 NR Description: 26S proteasome beta subunit, putative

SEQ ID NO: 33748 - protein, 262 aa, Arabidopsis thaliana; identical to SEQ ID NO: 30158
  peptide (1)..(262): Ceres Seq. ID no. 12343436
  misc_feature (43)..(225): Pfam Name: Proteasome A-type and B-type Pfam Description: Proteasome A-type and B-type
  misc_feature (1)..(249): Homolog of NCBI NO: 6755204 NR Description: proteasome (prosome, macropain) subunit, beta
  misc_feature (66)..(239): Homolog of NCBI NO: 14594931 NR Description: putative beta5 proteasome subunit [Nicotiana
  misc_feature (63)..(261): Homolog of NCBI NO: 16588840 NR Description: putative 20S proteasome beta subunit 5 [Prunus
  misc_feature (1)..(63): Homolog of NCBI NO: 3980264 NR Description: 20S proteasome beta subunit [Cicer arietinum]
  misc_feature (95)..(260): Homolog of NCBI NO: 3980264 NR Description: 20S proteasome beta subunit [Cicer arietinum]
  misc_feature (1)..(260): Homolog of NCBI NO: 8671510 NR Description: beta 5 subunit of 20S proteasome
  misc_feature (1)..(259): Homolog of NCBI NO: 3914430 NR Description: Proteasome subunit beta type 5 precursor (20S
  misc_feature (1)..(260): Homolog of NCBI NO: 15292875 NR Description: putative proteasome epsilon chain precursor
  misc_feature (1)..(260): Homolog of NCBI NO: 15222152 NR Description: 20S proteasome beta subunit E1 (PBE1)
  misc_feature (1)..(262): Homolog of NCBI NO: 15231544 NR Description: 26S proteasome beta subunit, putative

SEQ ID NO: 33749 - DNA, 805 bp, Arabidopsis thaliana; identical to SEQ ID NO: 30159
  misc_feature (1)..(805): Ceres Seq. ID no. 12322655
  misc_feature: MA Experiment ID: 108461 Result: Up-regulated in Transcription
  misc_feature: MA Experiment 108461 PARAMETER Experiment Name: At_Germinating_Seeds_cDNA_P Parameter: Age (day) Value: 1 vs. 0
  misc_feature: MA Experiment 108461 PARAMETER Experiment Name: At_Germinating_Seeds_cDNA_P Parameter: Tissue Value: Germinating Seeds
  misc_feature: MA Experiment ID: 108462 Result: Up-regulated in Transcription
  misc_feature: MA Experiment 108462 PARAMETER Experiment Name: At_Germinating_Seeds_cDNA_P Parameter: Age (day) Value: 2 vs. 0
  misc_feature: MA Experiment 108462 PARAMETER Experiment Name: At_Germinating_Seeds_cDNA_P Parameter: Tissue Value: Germinating Seeds
  misc_feature: MA Experiment ID: 108463 Result: Up-regulated in Transcription
  misc_feature: MA Experiment 108463 PARAMETER Experiment Name: At_Germinating_Seeds_cDNA_P Parameter: Age (day) Value: 3 vs. 0
  misc_feature: MA Experiment 108463 PARAMETER Experiment Name: At_Germinating_Seeds_cDNA_P Parameter: Tissue Value: Germinating Seeds
  misc_feature: MA Experiment ID: 108464 Result: Up-regulated in Transcription
  misc_feature: MA Experiment 108464 PARAMETER Experiment Name: At_Germinating_Seeds_cDNA_P Parameter: Age (day) Value: 4 vs. 0
  misc_feature: MA Experiment 108464 PARAMETER Experiment Name: At_Germinating_Seeds_cDNA_P Parameter: Tissue Value: Germinating Seeds
  misc_feature: MA Experiment ID: 108501 Result: Down-regulated in Transcription
  misc_feature: MA Experiment 108501 PARAMETER Experiment Name: At_ap2_floral_buds_cDNA_P Parameter: Plant Line Value: ap2 (Ler.)
  misc_feature: MA Experiment 108501 PARAMETER Experiment Name: At_ap2_floral_buds_cDNA_P Parameter: Tissue Value: Closed Flower
  misc_feature: MA Experiment ID: 108595 Result: Up-regulated in Transcription
  misc_feature: MA Experiment 108595 PARAMETER Experiment Name: At_Ler-pi_Ovule_cDNA_P Parameter: Plant Line Value: null
  misc_feature: MA Experiment ID: 108667 Result: Down-regulated in Transcription
  misc_feature: MA Experiment 108667 PARAMETER Experiment Name: At_2mM_SA_cDNA_P Parameter: Plant Line Value: WS
  misc_feature: MA Experiment 108667 PARAMETER Experiment Name: At_2mM_SA_cDNA_P Parameter: Timepoint (hr) Value: 1
  misc_feature: MA Experiment 108667 PARAMETER Experiment Name: At_2mM_SA_cDNA_P Parameter: Treatment Value: 2mM SA vs. No Treatment
  misc_feature: MA Experiment ID: 108668 Result: Down-regulated in Transcription
  misc_feature: MA Experiment 108668 PARAMETER Experiment Name: At_2mM_SA_cDNA_P Parameter: Plant Line Value: WS
  misc_feature: MA Experiment 108668 PARAMETER Experiment Name: At_2mM_SA_cDNA_P Parameter: Timepoint (hr) Value: 6
  misc_feature: MA Experiment 108668 PARAMETER Experiment Name: At_2mM_SA_cDNA_P Parameter: Treatment Value: 2mM SA vs. No Treatment
  misc_feature: MA Experiment ID: 20000069 Result: Down-regulated in Transcription
  misc_feature: MA Experiment 20000069 PARAMETER Experiment Name: At_100uM_ABA_Mutants_cDNA_P Parameter: Plant Line Value: CS23
  misc_feature: MA Experiment 20000069 PARAMETER Experiment Name: At_100uM_ABA_Mutants_cDNA_P Parameter: Timepoint (hr) Value: 6
  misc_feature: MA Experiment 20000069 PARAMETER Experiment Name: At_100uM_ABA_Mutants_cDNA_P Parameter: Tissue Value: Aerial
  misc_feature: MA Experiment 20000069 PARAMETER Experiment Name: At_100uM_ABA_Mutants_cDNA_P Parameter: Treatment Value: 100uM ABA vs. No Treatment
  misc_feature: MA Experiment ID: 20000072 Result: Down-regulated in Transcription
  misc_feature: MA Experiment 20000072 PARAMETER Experiment Name: At_100uM_ABA_Mutants_cDNA_P Parameter: Plant Line Value: CS8105
  misc_feature: MA Experiment 20000072 PARAMETER Experiment Name: At_100uM_ABA_Mutants_cDNA_P Parameter: Timepoint (hr) Value: 6
  misc_feature: MA Experiment 20000072 PARAMETER Experiment Name: At_100uM_ABA_Mutants_cDNA_P Parameter: Tissue Value: Aerial
  misc_feature: MA Experiment 20000072 PARAMETER Experiment Name: At_100uM_ABA_Mutants_cDNA_P Parameter: Treatment Value: 100uM ABA vs. No Treatment
  misc_feature: MA Experiment ID: 20000089 Result: Down-regulated in Transcription
  misc_feature: MA Experiment ID: 20000111 Result: Down-regulated in Transcription
  misc_feature: MA Experiment 20000111 PARAMETER Experiment Name: At_42deg_Heat_cDNA_P Parameter: Temperature (deg C) Value: 42 vs. 22
  misc_feature: MA Experiment 20000111 PARAMETER Experiment Name: At_42deg_Heat_cDNA_P Parameter: Timepoint (hr) Value: 6
  misc_feature: MA Experiment 20000111 PARAMETER Experiment Name: At_42deg_Heat_cDNA_P Parameter: Tissue Value: Aerial
  misc_feature: MA Experiment ID: 20000182 Result: Down-regulated in Transcription
  misc_feature: MA Experiment 20000182 PARAMETER Experiment Name: At_2mM_SA_P Parameter: Age (day) Value: 14
  misc_feature: MA Experiment 20000182 PARAMETER Experiment Name: At_2mM_SA_P Parameter: Organism Value: A. thaliana
  misc_feature: MA Experiment 20000182 PARAMETER Experiment Name: At_2mM_SA_P Parameter: Plant Line Value: WS
  misc_feature: MA Experiment 20000182 PARAMETER Experiment Name: At_2mM_SA_P Parameter: Timepoint (hr) Value: 6
  misc_feature: MA Experiment 20000182 PARAMETER Experiment Name: At_2mM_SA_P Parameter: Tissue Value: Aerial
  misc_feature: MA Experiment 20000182 PARAMETER Experiment Name: At_2mM_SA_P Parameter: Treatment Value: 2mM SA vs. No Treatment
  misc_feature: MA Experiment ID: 20000264 Result: Down-regulated in Transcription
  misc_feature: MA Experiment 20000264 PARAMETER Experiment Name: At_Open_Flower_P Parameter: Age (day) Value: 21
  misc_feature: MA Experiment 20000264 PARAMETER Experiment Name: At_Open_Flower_P Parameter: Plant Line Value: WS
  misc_feature: MA Experiment 20000264 PARAMETER Experiment Name: At_Open_Flower_P Parameter: Tissue Value: Open Flower vs. Whole Plant
  misc_feature: MA Experiment ID: 20000265 Result: Down-regulated in Transcription
  misc_feature: MA Experiment 20000265 PARAMETER Experiment Name: At_Open_Flower_P Parameter: Age (day) Value: 21
  misc_feature: MA Experiment 20000265 PARAMETER Experiment Name: At_Open_Flower_P Parameter: Plant Line Value: WS
  misc_feature: MA Experiment 20000265 PARAMETER Experiment Name: At_Open_Flower_P Parameter: Tissue Value: Closed Flower vs. Whole Plant
  misc_feature: MA Experiment ID: 20000286 Result: Down-regulated in Transcription
  misc_feature: MA Experiment 20000286 PARAMETER Experiment Name: At_Open_Flower_P Parameter: Age (day) Value: 21
  misc_feature: MA Experiment 20000286 PARAMETER Experiment Name: At_Open_Flower_P Parameter: Plant Line Value: WS
  misc_feature: MA Experiment 20000286 PARAMETER Experiment Name: At_Open_Flower_P Parameter: Tissue Value: Half Open vs. Whole Plant
  misc_feature: MA Experiment ID: 20000438 Result: Down-regulated in Transcription
  misc_feature: MA Experiment 20000438 PARAMETER Experiment Name: At_Shoots__P Parameter: Age (day) Value: 14
  misc_feature: MA Experiment 20000438 PARAMETER Experiment Name: At_Shoots__P Parameter: Tissue Value: Shoots vs. Whole Plant
  misc_feature: MA Experiment ID: 20000439 Result: Down-regulated in Transcription
  misc_feature: MA Experiment 20000439 PARAMETER Experiment Name: At_Roots__P Parameter: Age (day) Value: 14 vs. 21
  misc_feature: MA Experiment 20000439 PARAMETER Experiment Name: At_Roots__P Parameter: Organism Value: A. thaliana
  misc_feature: MA Experiment 20000439 PARAMETER Experiment Name: At_Roots__P Parameter: Tissue Value: Roots vs. Whole Plant
  misc_feature: MA Experiment ID: 20000441 Result: Down-regulated in Transcription
  misc_feature: MA Experiment 20000441 PARAMETER Experiment Name: At_1uM_BR-BRZ__P Parameter: Tissue Value: Shoot Apices
  misc_feature: MA Experiment 20000441 PARAMETER Experiment Name: At_1uM_BR-BRZ__P Parameter: Treatment Value: 1uM BR vs. No Treatment
  misc_feature: MA Experiment ID: 20000495 Result: Up-regulated in Transcription
  misc_feature: MA Experiment 20000495 PARAMETER Experiment Name: At_Guard_Cells_P Parameter: Harvest Date Value: 8/2/2002
  misc_feature: MA Experiment 20000495 PARAMETER Experiment Name: At_Guard_Cells_P Parameter: Organism Value: A. thaliana
  misc_feature: MA Experiment 20000495 PARAMETER Experiment Name: At_Guard_Cells_P Parameter: Tissue Value: Guard Cells vs. Leaves
  misc_feature: MA Experiment ID: 20000794 Result: Down-regulated in Transcription
  misc_feature: MA Experiment 20000794 PARAMETER Experiment Name: At_Petals_P Parameter: Age (day) Value: 23-25 days
  misc_feature: MA Experiment 20000794 PARAMETER Experiment Name: At_Petals_P Parameter: Plant Line Value: WS
  misc_feature: MA Experiment 20000794 PARAMETER Experiment Name: At_Petals_P Parameter: Tissue Value: Petals vs. Whole plant
  misc_feature: MA Experiment ID: 20001556 Result: Down-regulated in Transcription
  misc_feature: MA Experiment 20001556 PARAMETER Experiment Name: At_Drought_Soil_Dry_P Parameter: Age (day) Value: 26
  misc_feature: MA Experiment 20001556 PARAMETER Experiment Name: At_Drought_Soil_Dry_P Parameter: Organism Value: A. thaliana
  misc_feature: MA Experiment 20001556 PARAMETER Experiment Name: At_Drought_Soil_Dry_P Parameter: Plant Line Value: WS
  misc_feature: MA Experiment 20001556 PARAMETER Experiment Name: At_Drought_Soil_Dry_P Parameter: Post Timepoint (hr) Value: None
  misc_feature: MA Experiment 20001556 PARAMETER Experiment Name: At_Drought_Soil_Dry_P Parameter: Post-Treatment Value: None
  misc_feature: MA Experiment 20001556 PARAMETER Experiment Name: At_Drought_Soil_Dry_P Parameter: Timepoint (day) Value: 12
  misc_feature: MA Experiment 20001556 PARAMETER Experiment Name: At_Drought_Soil_Dry_P Parameter: Treatment Value: Drought vs. No Drought
  misc_feature: MA Experiment ID: 20001558 Result: Down-regulated in Transcription
  misc_feature: MA Experiment 20001558 PARAMETER Experiment Name: At_Drought_Soil_Dry_P Parameter: Age (day) Value: 27
  misc_feature: MA Experiment 20001558 PARAMETER Experiment Name: At_Drought_Soil_Dry_P Parameter: Organism Value: A. thaliana
  misc_feature: MA Experiment 20001558 PARAMETER Experiment Name: At_Drought_Soil_Dry_P Parameter: Plant Line Value: WS
  misc_feature: MA Experiment 20001558 PARAMETER Experiment Name: At_Drought_Soil_Dry_P Parameter: Post Timepoint (hr) Value: 6
  misc_feature: MA Experiment 20001558 PARAMETER Experiment Name: At_Drought_Soil_Dry_P Parameter: Post-Treatment Value: Re-Water vs. No Drought
  misc_feature: MA Experiment 20001558 PARAMETER Experiment Name: At_Drought_Soil_Dry_P Parameter: Timepoint (day) Value: 13
  misc_feature: MA Experiment 20001558 PARAMETER Experiment Name: At_Drought_Soil_Dry_P Parameter: Treatment Value: Drought vs. No Drought
  misc_feature: MA Experiment ID: 20001559 Result: Down-regulated in Transcription
  misc_feature: MA Experiment 20001559 PARAMETER Experiment Name: At_Drought_Soil_Dry_P Parameter: Age (day) Value: 28
  misc_feature: MA Experiment 20001559 PARAMETER Experiment Name: At_Drought_Soil_Dry_P Parameter: Organism Value: A. thaliana
  misc_feature: MA Experiment 20001559 PARAMETER Experiment Name: At_Drought_Soil_Dry_P Parameter: Plant Line Value: WS
  misc_feature: MA Experiment 20001559 PARAMETER Experiment Name: At_Drought_Soil_Dry_P Parameter: Post Timepoint (hr) Value: 29
  misc_feature: MA Experiment 20001559 PARAMETER Experiment Name: At_Drought_Soil_Dry_P Parameter: Post-Treatment Value: Re-Water vs. No Drought
  misc_feature: MA Experiment 20001559 PARAMETER Experiment Name: At_Drought_Soil_Dry_P Parameter: Timepoint (day) Value: 14
  misc_feature: MA Experiment 20001559 PARAMETER Experiment Name: At_Drought_Soil_Dry_P Parameter: Treatment Value: Drought vs. No Drought
  misc_feature: MA Experiment ID: 20001768 Result: Up-regulated in Transcription
  misc_feature: MA Experiment 20001768 PARAMETER Experiment Name: At_Far-red-enriched-adult_P Parameter: Age (day) Value: 28
  misc_feature: MA Experiment 20001768 PARAMETER Experiment Name: At_Far-red-enriched-adult_P Parameter: Light Value: Far-red enriched vs. White
  misc_feature: MA Experiment 20001768 PARAMETER Experiment Name: At_Far-red-enriched-adult_P Parameter: Organism Value: A. thaliana
  misc_feature: MA Experiment 20001768 PARAMETER Experiment Name: At_Far-red-enriched-adult_P Parameter: Plant Line Value: Columbia
  misc_feature: MA Experiment 20001768 PARAMETER Experiment Name: At_Far-red-enriched-adult_P Parameter: Timepoint (hr) Value: 1
  misc_feature: MA Experiment 20001768 PARAMETER Experiment Name: At_Far-red-enriched-adult_P Parameter: Tissue Value: Aerial
  misc_feature: MA Experiment ID: 20001911 Result: Down-regulated in Transcription
  misc_feature: MA Experiment 20001911 PARAMETER Experiment Name: At_Drought_Reproduction_P Parameter: Age (day) Value: 40
  misc_feature: MA Experiment 20001911 PARAMETER Experiment Name: At_Drought_Reproduction_P Parameter: Organism Value: A. thaliana
  misc_feature: MA Experiment 20001911 PARAMETER Experiment Name: At_Drought_Reproduction_P Parameter: Plant Line Value: WS
  misc_feature: MA Experiment 20001911 PARAMETER Experiment Name: At_Drought_Reproduction_P Parameter: Timepoint (day) Value: 10
  misc_feature: MA Experiment 20001911 PARAMETER Experiment Name: At_Drought_Reproduction_P Parameter: Tissue Value: Flowers
  misc_feature: MA Experiment 20001911 PARAMETER Experiment Name: At_Drought_Reproduction_P Parameter: Treatment Value: Drought vs. No Drought

SEQ ID NO: 33750 - protein, 181 aa, Arabidopsis thaliana; identical to SEQ ID NO: 30160
  peptide (1)..(181): Ceres Seq. ID no. 12322656
  misc_feature (31)..(111): Pfam Name: Plastocyanin-like domain Pfam Description: Plastocyanin-like domain
  misc_feature (1)..(122): Homolog of NCBI NO: 25282796 NR Description: uclacyanin II [imported] - Arabidopsis thaliana
  misc_feature (1)..(162): Homolog of NCBI NO: 25453522 NR Description: blue copper-binding protein II [imported] -
  misc_feature (1)..(162): Homolog of NCBI NO: 25453521 NR Description: blue copper-binding protein II [imported] -
  misc_feature (1)..(165): Homolog of NCBI NO: 38346158 NR Description: OSJNBa0079A21.5 [Oryza sativa (japonica
  misc_feature (1)..(162): Homolog of NCBI NO: 15224960 NR Description: phytocyanin
  misc_feature (1)..(162): Homolog of NCBI NO: 21554060 NR Description: phytocyanin [Arabidopsis thaliana]
  misc_feature (11)..(157): Homolog of NCBI NO: 14140127 NR Description: uclacyanin 3-like protein [Oryza sativa]
  misc_feature (2)..(179): Homolog of NCBI NO: 2493318 NR Description: Blue copper protein precursor
  misc_feature (4)..(180): Homolog of NCBI NO: 15219890 NR Description: uclacyanin II, putative; protein id: At1g22480.1
  misc_feature (1)..(181): Homolog of NCBI NO: 15218396 NR Description: blue copper protein, putative

SEQ ID NO: 33751 - DNA, 895 bp, Arabidopsis thaliana; identical to SEQ ID NO: 30161
  misc_feature (1)..(895): Ceres Seq. ID no. 12321347
  misc_feature: MA Experiment ID: 108572 Result: Up-regulated in Transcription
  misc_feature: MA Experiment 108572 PARAMETER Experiment Name: At_Drought_cDNA_P Parameter: Timepoint (hr) Value: 1
  misc_feature: MA Experiment 108572 PARAMETER Experiment Name: At_Drought_cDNA_P Parameter: Tissue Value: Aerial
  misc_feature: MA Experiment 108572 PARAMETER Experiment Name: At_Drought_cDNA_P Parameter: Treatment Value: Drought vs. No Drought
  misc_feature: MA Experiment ID: 108573 Result: Up-regulated in Transcription
  misc_feature: MA Experiment 108573 PARAMETER Experiment Name: At_Drought_cDNA_P Parameter: Timepoint (hr) Value: 6
  misc_feature: MA Experiment 108573 PARAMETER Experiment Name: At_Drought_cDNA_P Parameter: Tissue Value: Aerial
  misc_feature: MA Experiment 108573 PARAMETER Experiment Name: At_Drought_cDNA_P Parameter: Treatment Value: Drought vs. No Drought
  misc_feature: MA Experiment ID: 108579 Result: Down-regulated in Transcription
  misc_feature: MA Experiment 108579 PARAMETER Experiment Name: At_4deg_Cold_cDNA_P Parameter: Temperature (deg C) Value: 4 vs. 22
  misc_feature: MA Experiment 108579 PARAMETER Experiment Name: At_4deg_Cold_cDNA_P Parameter: Timepoint (hr) Value: 6
  misc_feature: MA Experiment 108579 PARAMETER Experiment Name: At_4deg_Cold_cDNA_P Parameter: Tissue Value: Aerial
  misc_feature: MA Experiment ID: 108595 Result: Down-regulated in Transcription
  misc_feature: MA Experiment 108595 PARAMETER Experiment Name: At_Ler-pi_Ovule_cDNA_P Parameter: Plant Line Value: null
  misc_feature: MA Experiment ID: 20000071 Result: Down-regulated in Transcription
  misc_feature: MA Experiment 20000071 PARAMETER Experiment Name: At_100uM_ABA_Mutants_cDNA_P Parameter: Plant Line Value: CS8104
  misc_feature: MA Experiment 20000071 PARAMETER Experiment Name: At_100uM_ABA_Mutants_cDNA_P Parameter: Timepoint (hr) Value: 6
  misc_feature: MA Experiment 20000071 PARAMETER Experiment Name: At_100uM_ABA_Mutants_cDNA_P Parameter: Tissue Value: Aerial
  misc_feature: MA Experiment 20000071 PARAMETER Experiment Name: At_100uM_ABA_Mutants_cDNA_P Parameter: Treatment Value: 100uM ABA vs. No Treatment
  misc_feature: MA Experiment ID: 20000086 Result: Down-regulated in Transcription
  misc_feature: MA Experiment 20000086 PARAMETER Experiment Name: At_100uM_ABA_Mutants_cDNA_P Parameter: Plant Line Value: CS22
  misc_feature: MA Experiment 20000086 PARAMETER Experiment Name: At_100uM_ABA_Mutants_cDNA_P Parameter: Timepoint (hr) Value: 6
  misc_feature: MA Experiment 20000086 PARAMETER Experiment Name: At_100uM_ABA_Mutants_cDNA_P Parameter: Tissue Value: Aerial
  misc_feature: MA Experiment 20000086 PARAMETER Experiment Name: At_100uM_ABA_Mutants_cDNA_P Parameter: Treatment Value: 100uM ABA vs. No Treatment

SEQ ID NO: 33752 - protein, 128 aa, Arabidopsis thaliana; identical to SEQ ID NO: 30162
  peptide (1)..(128): Ceres Seq. ID no. 12321348
  misc_feature (11)..(76): Pfam Name: DnaJ domain Pfam Description: DnaJ domain
  misc_feature (10)..(76): Homolog of NCBI NO: 16082112 NR Description: heat shock protein DnaJ related protein
  misc_feature (10)..(76): Homolog of NCBI NO: 15595000 NR Description: heat shock protein (dnaJ-2) [Borrelia
  misc_feature (10)..(76): Homolog of NCBI NO: 13541318 NR Description: Molecular chaperone (DnaJ-related) [Thermoplasma
  misc_feature (10)..(76): Homolog of NCBI NO: 144832 NR Description: dnaJ
  misc_feature (11)..(103): Homolog of NCBI NO: 23054276 NR Description: hypothetical protein [Geobacter metallireducens]
  misc_feature (10)..(78): Homolog of NCBI NO: 16331768 NR Description: DnaJ protein [Synechocystis sp. PCC 6803]
  misc_feature (11)..(91): Homolog of NCBI NO: 39995125 NR Description: phage prohead protease, HK97 family/dnaJ domain
  misc_feature (10)..(104): Homolog of NCBI NO: 21555025 NR Description: unknown [Arabidopsis thaliana]
  misc_feature (10)..(104): Homolog of NCBI NO: 18403358 NR Description: Expressed protein
  misc_feature (1)..(128): Homolog of NCBI NO: 15237385 NR Description: putative protein

SEQ ID NO: 33753 - protein, 65 aa, Arabidopsis thaliana; identical to SEQ ID NO: 30163
  peptide (1)..(65): Ceres Seq. ID no. 12321349
  misc_feature (1)..(13): Homolog of NCBI NO: 16082112 NR Description: heat shock protein DnaJ related protein
  misc_feature (1)..(13): Homolog of NCBI NO: 15595000 NR Description: heat shock protein (dnaJ-2) [Borrelia
  misc_feature (1)..(13): Homolog of NCBI NO: 13541318 NR Description: Molecular chaperone (DnaJ-related) [Thermoplasma
  misc_feature (1)..(13): Homolog of NCBI NO: 144832 NR Description: dnaJ
  misc_feature (1)..(40): Homolog of NCBI NO: 23054276 NR Description: hypothetical protein [Geobacter metallireducens]
  misc_feature (1)..(15): Homolog of NCBI NO: 16331768 NR Description: DnaJ protein [Synechocystis sp. PCC 6803]
  misc_feature (1)..(28): Homolog of NCBI NO: 39995125 NR Description: phage prohead protease, HK97 family/dnaJ domain
  misc_feature (1)..(41): Homolog of NCBI NO: 21555025 NR Description: unknown [Arabidopsis thaliana]
  misc_feature (1)..(41): Homolog of NCBI NO: 18403358 NR Description: Expressed protein
  misc_feature (1)..(65): Homolog of NCBI NO: 15237385 NR Description: putative protein

SEQ ID NO: 33754 - DNA, 2131 bp, Arabidopsis thaliana; identical to SEQ ID NO: 30164
  misc_feature (1)..(2131): Ceres Seq. ID no. 12326066
  misc_feature: MA Experiment ID: 108461 Result: Up-regulated in Transcription
  misc_feature: MA Experiment 108461 PARAMETER Experiment Name: At_Germinating_Seeds_cDNA_P Parameter: Age (day) Value: 1 vs. 0
  misc_feature: MA Experiment 108461 PARAMETER Experiment Name: At_Germinating_Seeds_cDNA_P Parameter: Tissue Value: Germinating Seeds
  misc_feature: MA Experiment ID: 108462 Result: Up-regulated in Transcription
  misc_feature: MA Experiment 108462 PARAMETER Experiment Name: At_Germinating_Seeds_cDNA_P Parameter: Age (day) Value: 2 vs. 0
  misc_feature: MA Experiment 108462 PARAMETER Experiment Name: At_Germinating_Seeds_cDNA_P Parameter: Tissue Value: Germinating Seeds
  misc_feature: MA Experiment ID: 108463 Result: Up-regulated in Transcription
  misc_feature: MA Experiment 108463 PARAMETER Experiment Name: At_Germinating_Seeds_cDNA_P Parameter: Age (day) Value: 3 vs. 0
  misc_feature: MA Experiment 108463 PARAMETER Experiment Name: At_Germinating_Seeds_cDNA_P Parameter: Tissue Value: Germinating Seeds
  misc_feature: MA Experiment ID: 108464 Result: Up-regulated in Transcription
  misc_feature: MA Experiment 108464 PARAMETER Experiment Name: At_Germinating_Seeds_cDNA_P Parameter: Age (day) Value: 4 vs. 0
  misc_feature: MA Experiment 108464 PARAMETER Experiment Name: At_Germinating_Seeds_cDNA_P Parameter: Tissue Value: Germinating Seeds
  misc_feature: MA Experiment ID: 108569 Result: Up-regulated in Transcription
  misc_feature: MA Experiment 108569 PARAMETER Experiment Name: At_0.001%_MeJA__cDNA_P Parameter: Timepoint (hr) Value: 6
  misc_feature: MA Experiment 108569 PARAMETER Experiment Name: At_0.001%_MeJA__cDNA_P Parameter: Tissue Value: Aerial
  misc_feature: MA Experiment 108569 PARAMETER Experiment Name: At_0.001%_MeJA__cDNA_P Parameter: Treatment Value: 0.001% MeJA vs. No Treatment
  misc_feature: MA Experiment ID: 108573 Result: Up-regulated in Transcription
  misc_feature: MA Experiment 108573 PARAMETER Experiment Name: At_Drought_cDNA_P Parameter: Timepoint (hr) Value: 6
  misc_feature: MA Experiment 108573 PARAMETER Experiment Name: At_Drought_cDNA_P Parameter: Tissue Value: Aerial
  misc_feature: MA Experiment 108573 PARAMETER Experiment Name: At_Drought_cDNA_P Parameter: Treatment Value: Drought vs. No Drought
  misc_feature: MA Experiment ID: 108579 Result: Down-regulated in Transcription
  misc_feature: MA Experiment 108579 PARAMETER Experiment Name: At_4deg_Cold_cDNA_P Parameter: Temperature (deg C) Value: 4 vs. 22
  misc_feature: MA Experiment 108579 PARAMETER Experiment Name: At_4deg_Cold_cDNA_P Parameter: Timepoint (hr) Value: 6
  misc_feature: MA Experiment 108579 PARAMETER Experiment Name: At_4deg_Cold_cDNA_P Parameter: Tissue Value: Aerial
  misc_feature: MA Experiment ID: 108585 Result: Up-regulated in Transcription
  misc_feature: MA Experiment 108585 PARAMETER Experiment Name: At_5mM_NaNP_cDNA_P Parameter: Timepoint (hr) Value: 6
  misc_feature: MA Experiment 108585 PARAMETER Experiment Name: At_5mM_NaNP_cDNA_P Parameter: Tissue Value: Aerial
  misc_feature: MA Experiment 108585 PARAMETER Experiment Name: At_5mM_NaNP_cDNA_P Parameter: Treatment Value: null
  misc_feature: MA Experiment ID: 108595 Result: Down-regulated in Transcription
  misc_feature: MA Experiment 108595 PARAMETER Experiment Name: At_Ler-pi_Ovule_cDNA_P Parameter: Plant Line Value: null
  misc_feature: MA Experiment ID: 20000111 Result: Down-regulated in Transcription
  misc_feature: MA Experiment 20000111 PARAMETER Experiment Name: At_42deg_Heat_cDNA_P Parameter: Temperature (deg C) Value: 42 vs. 22
  misc_feature: MA Experiment 20000111 PARAMETER Experiment Name: At_42deg_Heat_cDNA_P Parameter: Timepoint (hr) Value: 6
  misc_feature: MA Experiment 20000111 PARAMETER Experiment Name: At_42deg_Heat_cDNA_P Parameter: Tissue Value: Aerial
  misc_feature: MA Experiment ID: 20000113 Result: Down-regulated in Transcription
  misc_feature: MA Experiment 20000113 PARAMETER Experiment Name: At_42deg_Heat_cDNA_P Parameter: Temperature (deg C) Value: 42 vs. 22
  misc_feature: MA Experiment 20000113 PARAMETER Experiment Name: At_42deg_Heat_cDNA_P Parameter: Timepoint (hr) Value: 8
  misc_feature: MA Experiment 20000113 PARAMETER Experiment Name: At_42deg_Heat_cDNA_P Parameter: Tissue Value: Aerial
  misc_feature: MA Experiment ID: 20000173 Result: Down-regulated in Transcription
  misc_feature: MA Experiment 20000173 PARAMETER Experiment Name: At_42deg_Heat_P Parameter: Age (day) Value: 14
  misc_feature: MA Experiment 20000173 PARAMETER Experiment Name: At_42deg_Heat_P Parameter: Organism Value: A. thaliana
  misc_feature: MA Experiment 20000173 PARAMETER Experiment Name: At_42deg_Heat_P Parameter: Plant Line Value: WS
  misc_feature: MA Experiment 20000173 PARAMETER Experiment Name: At_42deg_Heat_P Parameter: Temperature (deg C) Value: 42 vs. 22
  misc_feature: MA Experiment 20000173 PARAMETER Experiment Name: At_42deg_Heat_P Parameter: Timepoint (hr) Value: 6
  misc_feature: MA Experiment 20000173 PARAMETER Experiment Name: At_42deg_Heat_P Parameter: Tissue Value: Aerial
  misc_feature: MA Experiment ID: 20000179 Result: Up-regulated in Transcription
  misc_feature: MA Experiment 20000179 PARAMETER Experiment Name: At_Germinating_Seeds_P Parameter: Age (hr) Value: 6 vs. 0
  misc_feature: MA Experiment 20000179 PARAMETER Experiment Name: At_Germinating_Seeds_P Parameter: Tissue Value: Germinating Seeds
  misc_feature: MA Experiment ID: 20000180 Result: Up-regulated in Transcription
  misc_feature: MA Experiment 20000180 PARAMETER Experiment Name: At_Germinating_Seeds_P Parameter: Age (hr) Value: 24 vs. 0
  misc_feature: MA Experiment 20000180 PARAMETER Experiment Name: At_Germinating_Seeds_P Parameter: Tissue Value: Germinating Seeds
  misc_feature: MA Experiment ID: 20000439 Result: Down-regulated in Transcription
  misc_feature: MA Experiment 20000439 PARAMETER Experiment Name: At_Roots__P Parameter: Age (day) Value: 14 vs. 21
  misc_feature: MA Experiment 20000439 PARAMETER Experiment Name: At_Roots__P Parameter: Organism Value: A. thaliana
  misc_feature: MA Experiment 20000439 PARAMETER Experiment Name: At_Roots__P Parameter: Tissue Value: Roots vs. Whole Plant
  misc_feature: MA Experiment ID: 20001450 Result: Up-regulated in Transcription
  misc_feature: MA Experiment 20001450 PARAMETER Experiment Name: At_Far-red-induction_P Parameter: Age (day) Value: 7
  misc_feature: MA Experiment 20001450 PARAMETER Experiment Name: At_Far-red-induction_P Parameter: Light Value: Far-red vs. White
  misc_feature: MA Experiment 20001450 PARAMETER Experiment Name: At_Far-red-induction_P Parameter: Organism Value: A. thaliana
  misc_feature: MA Experiment 20001450 PARAMETER Experiment Name: At_Far-red-induction_P Parameter: Plant Line Value: Columbia
  misc_feature: MA Experiment 20001450 PARAMETER Experiment Name: At_Far-red-induction_P Parameter: Timepoint (hr) Value: 8
  misc_feature: MA Experiment 20001450 PARAMETER Experiment Name: At_Far-red-induction_P Parameter: Tissue Value: Whole Plant
  misc_feature: MA Experiment ID: 20001557 Result: Down-regulated in Transcription
  misc_feature: MA Experiment 20001557 PARAMETER Experiment Name: At_Drought_Soil_Dry_P Parameter: Age (day) Value: 27
  misc_feature: MA Experiment 20001557 PARAMETER Experiment Name: At_Drought_Soil_Dry_P Parameter: Organism Value: A. thaliana
  misc_feature: MA Experiment 20001557 PARAMETER Experiment Name: At_Drought_Soil_Dry_P Parameter: Plant Line Value: WS
  misc_feature: MA Experiment 20001557 PARAMETER Experiment Name: At_Drought_Soil_Dry_P Parameter: Post Timepoint (hr) Value: 3
  misc_feature: MA Experiment 20001557 PARAMETER Experiment Name: At_Drought_Soil_Dry_P Parameter: Post-Treatment Value: Re-Water vs. No Drought
  misc_feature: MA Experiment 20001557 PARAMETER Experiment Name: At_Drought_Soil_Dry_P Parameter: Timepoint (day) Value: 13
  misc_feature: MA Experiment 20001557 PARAMETER Experiment Name: At_Drought_Soil_Dry_P Parameter: Treatment Value: Drought vs. No Drought

SEQ ID NO: 33755 - protein, 546 aa, Arabidopsis thaliana; identical to SEQ ID NO: 30165
  peptide (1)..(546): Ceres Seq. ID no. 12326067
  misc_feature (108)..(542): Pfam Name: Sugar (and other) transporter Pfam Description: Sugar (and other) transporter
  misc_feature (77)..(543): Homolog of NCBI NO: 8347246 NR Description: hexose transporter [Solanum tuberosum]
  misc_feature (55)..(543): Homolog of NCBI NO: 8347248 NR Description: hexose transporter [Zea mays]
  misc_feature (50)..(543): Homolog of NCBI NO: 8347244 NR Description: hexose transporter [Nicotiana tabacum]
  misc_feature (1)..(543): Homolog of NCBI NO: 9858106 NR Description: putative glucose translocator [Mesembryanthemum
  misc_feature (72)..(543): Homolog of NCBI NO: 2688830 NR Description: putative sugar transporter [Prunus armeniaca]
  misc_feature (1)..(543): Homolog of NCBI NO: 8347242 NR Description: hexose transporter [Spinacia oleracea]
  misc_feature (1)..(544): Homolog of NCBI NO: 15625046 NR Description: hexose transporter pGlT [Olea europaea]
  misc_feature (34)..(542): Homolog of NCBI NO: 8347250 NR Description: hexose transporter [Arabidopsis thaliana]
  misc_feature (1)..(546): Homolog of NCBI NO: 11278994 NR Description: sugar transporter-like protein - Arabidopsis
  misc_feature (1)..(546): Homolog of NCBI NO: 18417892 NR Description: sugar transporter-like protein

SEQ ID NO: 33756 - protein, 493 aa, Arabidopsis thaliana; identical to SEQ ID NO: 30166
  peptide (1)..(493): Ceres Seq. ID no. 12326068
  misc_feature (55)..(489): Pfam Name: Sugar (and other) transporter Pfam Description: Sugar (and other) transporter
  misc_feature (24)..(490): Homolog of NCBI NO: 8347246 NR Description: hexose transporter [Solanum tuberosum]
  misc_feature (2)..(490): Homolog of NCBI NO: 8347248 NR Description: hexose transporter [Zea mays]
  misc_feature (1)..(490): Homolog of NCBI NO: 8347244 NR Description: hexose transporter [Nicotiana tabacum]
  misc_feature (1)..(490): Homolog of NCBI NO: 9858106 NR Description: putative glucose translocator [Mesembryanthemum
  misc_feature (19)..(490): Homolog of NCBI NO: 2688830 NR Description: putative sugar transporter [Prunus armeniaca]
  misc_feature (1)..(490): Homolog of NCBI NO: 8347242 NR Description: hexose transporter [Spinacia oleracea]
  misc_feature (1)..(491): Homolog of NCBI NO: 15625046 NR Description: hexose transporter pGlT [Olea europaea]
  misc_feature (1)..(489): Homolog of NCBI NO: 8347250 NR Description: hexose transporter [Arabidopsis thaliana]
  misc_feature (1)..(493): Homolog of NCBI NO: 11278994 NR Description: sugar transporter-like protein - Arabidopsis
  misc_feature (1)..(493): Homolog of NCBI NO: 18417892 NR Description: sugar transporter-like protein

SEQ ID NO: 33757 - protein, 478 aa, Arabidopsis thaliana; identical to SEQ ID NO: 30167
  peptide (1)..(478): Ceres Seq. ID no. 12326069
  misc_feature (40)..(474): Pfam Name: Sugar (and other) transporter Pfam Description: Sugar (and other) transporter
  misc_feature (9)..(475): Homolog of NCBI NO: 8347246 NR Description: hexose transporter [Solanum tuberosum]
  misc_feature (1)..(475): Homolog of NCBI NO: 8347248 NR Description: hexose transporter [Zea mays]
  misc_feature (1)..(475): Homolog of NCBI NO: 8347244 NR Description: hexose transporter [Nicotiana tabacum]
  misc_feature (1)..(475): Homolog of NCBI NO: 9858106 NR Description: putative glucose translocator [Mesembryanthemum
  misc_feature (4)..(475): Homolog of NCBI NO: 2688830 NR Description: putative sugar transporter [Prunus armeniaca]
  misc_feature (1)..(475): Homolog of NCBI NO: 8347242 NR Description: hexose transporter [Spinacia oleracea]
  misc_feature (1)..(476): Homolog of NCBI NO: 15625046 NR Description: hexose transporter pGlT [Olea europaea]
  misc_feature (1)..(474): Homolog of NCBI NO: 8347250 NR Description: hexose transporter [Arabidopsis thaliana]
  misc_feature (1)..(478): Homolog of NCBI NO: 11278994 NR Description: sugar transporter-like protein - Arabidopsis
  misc_feature (1)..(478): Homolog of NCBI NO: 18417892 NR Description: sugar transporter-like protein

SEQ ID NO: 33758 - DNA, 1075 bp, Arabidopsis thaliana; identical to SEQ ID NO: 30168
  misc_feature (1)..(1075): Ceres Seq. ID no. 12605070
  misc_feature: MA Experiment ID: 20000166 Result: Up-regulated in Transcription
  misc_feature: MA Experiment 20000166 PARAMETER Experiment Name: At_100uM_ABA_P Parameter: Age (day) Value: 14
  misc_feature: MA Experiment 20000166 PARAMETER Experiment Name: At_100uM_ABA_P Parameter: Organism Value: A. thaliana
  misc_feature: MA Experiment 20000166 PARAMETER Experiment Name: At_100uM_ABA_P Parameter: Plant Line Value: WS
  misc_feature: MA Experiment 20000166 PARAMETER Experiment Name: At_100uM_ABA_P Parameter: Timepoint (hr) Value: 1
  misc_feature: MA Experiment 20000166 PARAMETER Experiment Name: At_100uM_ABA_P Parameter: Tissue Value: Aerial
  misc_feature: MA Experiment 20000166 PARAMETER Experiment Name: At_100uM_ABA_P Parameter: Treatment Value: 100uM ABA vs. No Treatment
  misc_feature: MA Experiment ID: 20000171 Result: Up-regulated in Transcription
  misc_feature: MA Experiment 20000171 PARAMETER Experiment Name: At_42deg_Heat_P Parameter: Age (day) Value: 14
  misc_feature: MA Experiment 20000171 PARAMETER Experiment Name: At_42deg_Heat_P Parameter: Organism Value: A. thaliana
  misc_feature: MA Experiment 20000171 PARAMETER Experiment Name: At_42deg_Heat_P Parameter: Plant Line Value: WS
  misc_feature: MA Experiment 20000171 PARAMETER Experiment Name: At_42deg_Heat_P Parameter: Temperature (deg C) Value: 42 vs. 22
  misc_feature: MA Experiment 20000171 PARAMETER Experiment Name: At_42deg_Heat_P Parameter: Timepoint (hr) Value: 1
  misc_feature: MA Experiment 20000171 PARAMETER Experiment Name: At_42deg_Heat_P Parameter: Tissue Value: Aerial
  misc_feature: MA Experiment ID: 20000173 Result: Up-regulated in Transcription
  misc_feature: MA Experiment 20000173 PARAMETER Experiment Name: At_42deg_Heat_P Parameter: Age (day) Value: 14
  misc_feature: MA Experiment 20000173 PARAMETER Experiment Name: At_42deg_Heat_P Parameter: Organism Value: A. thaliana
  misc_feature: MA Experiment 20000173 PARAMETER Experiment Name: At_42deg_Heat_P Parameter: Plant Line Value: WS
  misc_feature: MA Experiment 20000173 PARAMETER Experiment Name: At_42deg_Heat_P Parameter: Temperature (deg C) Value: 42 vs. 22
  misc_feature: MA Experiment 20000173 PARAMETER Experiment Name: At_42deg_Heat_P Parameter: Timepoint (hr) Value: 6
  misc_feature: MA Experiment 20000173 PARAMETER Experiment Name: At_42deg_Heat_P Parameter: Tissue Value: Aerial
  misc_feature: MA Experiment ID: 20000182 Result: Up-regulated in Transcription
  misc_feature: MA Experiment 20000182 PARAMETER Experiment Name: At_2mM_SA_P Parameter: Age (day) Value: 14
  misc_feature: MA Experiment 20000182 PARAMETER Experiment Name: At_2mM_SA_P Parameter: Organism Value: A. thaliana
  misc_feature: MA Experiment 20000182 PARAMETER Experiment Name: At_2mM_SA_P Parameter: Plant Line Value: WS
  misc_feature: MA Experiment 20000182 PARAMETER Experiment Name: At_2mM_SA_P Parameter: Timepoint (hr) Value: 6
  misc_feature: MA Experiment 20000182 PARAMETER Experiment Name: At_2mM_SA_P Parameter: Tissue Value: Aerial
  misc_feature: MA Experiment 20000182 PARAMETER Experiment Name: At_2mM_SA_P Parameter: Treatment Value: 2mM SA vs. No Treatment
  misc_feature: MA Experiment ID: 20000213 Result: Up-regulated in Transcription
  misc_feature: MA Experiment 20000213 PARAMETER Experiment Name: At_4deg_Cold_P Parameter: Timepoint (hr) Value: 2
  misc_feature: MA Experiment ID: 20000214 Result: Up-regulated in Transcription
  misc_feature: MA Experiment 20000214 PARAMETER Experiment Name: At_4deg_Cold_P Parameter: Timepoint (hr) Value: 6
  misc_feature: MA Experiment ID: 20000234 Result: Down-regulated in Transcription
  misc_feature: MA Experiment 20000234 PARAMETER Experiment Name: At_Siliques_P Parameter: Age (day) Value: 21
  misc_feature: MA Experiment 20000234 PARAMETER Experiment Name: At_Siliques_P Parameter: Organism Value: A. thaliana
  misc_feature: MA Experiment 20000234 PARAMETER Experiment Name: At_Siliques_P Parameter: Plant Line Value: WS
  misc_feature: MA Experiment 20000234 PARAMETER Experiment Name: At_Siliques_P Parameter: Tissue Value: Less Than 5mm Siliques vs. Whole Plant
  misc_feature: MA Experiment ID: 20000265 Result: Down-regulated in Transcription
  misc_feature: MA Experiment 20000265 PARAMETER Experiment Name: At_Open_Flower_P Parameter: Age (day) Value: 21
  misc_feature: MA Experiment 20000265 PARAMETER Experiment Name: At_Open_Flower_P Parameter: Plant Line Value: WS
  misc_feature: MA Experiment 20000265 PARAMETER Experiment Name: At_Open_Flower_P Parameter: Tissue Value: Closed Flower vs. Whole Plant
  misc_feature: MA Experiment ID: 20000267 Result: Up-regulated in Transcription
  misc_feature: MA Experiment 20000267 PARAMETER Experiment Name: At_Drought_P Parameter: Age (day) Value: 7
  misc_feature: MA Experiment 20000267 PARAMETER Experiment Name: At_Drought_P Parameter: Organism Value: A. thaliana
  misc_feature: MA Experiment 20000267 PARAMETER Experiment Name: At_Drought_P Parameter: Plant Line Value: WS
  misc_feature: MA Experiment 20000267 PARAMETER Experiment Name: At_Drought_P Parameter: Timepoint (hr) Value: 6
  misc_feature: MA Experiment 20000267 PARAMETER Experiment Name: At_Drought_P Parameter: Tissue Value: Whole Plant
  misc_feature: MA Experiment 20000267 PARAMETER Experiment Name: At_Drought_P Parameter: Treatment Value: Drought vs. No Drought
  misc_feature: MA Experiment ID: 20000268 Result: Up-regulated in Transcription
  misc_feature: MA Experiment 20000268 PARAMETER Experiment Name: At_100mM_NaCl__P Parameter: Age (day) Value: 14
  misc_feature: MA Experiment 20000268 PARAMETER Experiment Name: At_100mM_NaCl__P Parameter: Organism Value: A. thaliana
  misc_feature: MA Experiment 20000268 PARAMETER Experiment Name: At_100mM_NaCl__P Parameter: Plant Line Value: WS
  misc_feature: MA Experiment 20000268 PARAMETER Experiment Name: At_100mM_NaCl__P Parameter: Timepoint (hr) Value: 6
  misc_feature: MA Experiment 20000268 PARAMETER Experiment Name: At_100mM_NaCl__P Parameter: Tissue Value: Whole Plant
  misc_feature: MA Experiment 20000268 PARAMETER Experiment Name: At_100mM_NaCl__P Parameter: Treatment Value: 100mM NaCl vs. No Treatment
  misc_feature: MA Experiment ID: 20000436 Result: Up-regulated in Transcription
  misc_feature: MA Experiment 20000436 PARAMETER Experiment Name: At_Drought_P Parameter: Age (day) Value: 7
  misc_feature: MA Experiment 20000436 PARAMETER Experiment Name: At_Drought_P Parameter: Organism Value: A. thaliana
  misc_feature: MA Experiment 20000436 PARAMETER Experiment Name: At_Drought_P Parameter: Plant Line Value: WS
  misc_feature: MA Experiment 20000436 PARAMETER Experiment Name: At_Drought_P Parameter: Timepoint (hr) Value: 12
  misc_feature: MA Experiment 20000436 PARAMETER Experiment Name: At_Drought_P Parameter: Tissue Value: Whole Plant
  misc_feature: MA Experiment 20000436 PARAMETER Experiment Name: At_Drought_P Parameter: Treatment Value: Drought vs. No Drought
  misc_feature: MA Experiment ID: 20000437 Result: Up-regulated in Transcription
  misc_feature: MA Experiment 20000437 PARAMETER Experiment Name: At_Drought_P Parameter: Age (day) Value: 8
  misc_feature: MA Experiment 20000437 PARAMETER Experiment Name: At_Drought_P Parameter: Organism Value: A. thaliana
  misc_feature: MA Experiment 20000437 PARAMETER Experiment Name: At_Drought_P Parameter: Plant Line Value: WS
  misc_feature: MA Experiment 20000437 PARAMETER Experiment Name: At_Drought_P Parameter: Timepoint (hr) Value: 24
  misc_feature: MA Experiment 20000437 PARAMETER Experiment Name: At_Drought_P Parameter: Tissue Value: Whole Plant
  misc_feature: MA Experiment 20000437 PARAMETER Experiment Name: At_Drought_P Parameter: Treatment Value: Drought vs. No Drought
  misc_feature: MA Experiment ID: 20000438 Result: Down-regulated in Transcription
  misc_feature: MA Experiment 20000438 PARAMETER Experiment Name: At_Shoots__P Parameter: Age (day) Value: 14
  misc_feature: MA Experiment 20000438 PARAMETER Experiment Name: At_Shoots__P Parameter: Tissue Value: Shoots vs. Whole Plant
  misc_feature: MA Experiment ID: 20000453 Result: Up-regulated in Transcription
  misc_feature: MA Experiment 20000453 PARAMETER Experiment Name: At_100uM_ABA_P Parameter: Age (day) Value: 15
  misc_feature: MA Experiment 20000453 PARAMETER Experiment Name: At_100uM_ABA_P Parameter: Organism Value: A. thaliana
  misc_feature: MA Experiment 20000453 PARAMETER Experiment Name: At_100uM_ABA_P Parameter: Plant Line Value: WS
  misc_feature: MA Experiment 20000453 PARAMETER Experiment Name: At_100uM_ABA_P Parameter: Timepoint (hr) Value: 24
  misc_feature: MA Experiment 20000453 PARAMETER Experiment Name: At_100uM_ABA_P Parameter: Tissue Value: Aerial
  misc_feature: MA Experiment 20000453 PARAMETER Experiment Name: At_100uM_ABA_P Parameter: Treatment Value: 100uM ABA vs. No Treatment
  misc_feature: MA Experiment ID: 20000495 Result: Down-regulated in Transcription
  misc_feature: MA Experiment 20000495 PARAMETER Experiment Name: At_Guard_Cells_P Parameter: Harvest Date Value: 8/2/2002
  misc_feature: MA Experiment 20000495 PARAMETER Experiment Name: At_Guard_Cells_P Parameter: Organism Value: A. thaliana
  misc_feature: MA Experiment 20000495 PARAMETER Experiment Name: At_Guard_Cells_P Parameter: Tissue Value: Guard Cells vs. Leaves
  misc_feature: MA Experiment ID: 20000794 Result: Up-regulated in Transcription
  misc_feature: MA Experiment 20000794 PARAMETER Experiment Name: At_Petals_P Parameter: Age (day) Value: 23-25 days
  misc_feature: MA Experiment 20000794 PARAMETER Experiment Name: At_Petals_P Parameter: Plant Line Value: WS
  misc_feature: MA Experiment 20000794 PARAMETER Experiment Name: At_Petals_P Parameter: Tissue Value: Petals vs. Whole plant
  misc_feature: MA Experiment ID: 20001248 Result: Up-regulated in Transcription
  misc_feature: MA Experiment 20001248 PARAMETER Experiment Name: At_Far-red-induction_P Parameter: Age (day) Value: 7
  misc_feature: MA Experiment 20001248 PARAMETER Experiment Name: At_Far-red-induction_P Parameter: Light Value: Far-red vs. White
  misc_feature: MA Experiment 20001248 PARAMETER Experiment Name: At_Far-red-induction_P Parameter: Organism Value: A. thaliana
  misc_feature: MA Experiment 20001248 PARAMETER Experiment Name: At_Far-red-induction_P Parameter: Plant Line Value: Columbia
  misc_feature: MA Experiment 20001248 PARAMETER Experiment Name: At_Far-red-induction_P Parameter: Timepoint (hr) Value: 4
  misc_feature: MA Experiment 20001248 PARAMETER Experiment Name: At_Far-red-induction_P Parameter: Tissue Value: Whole Plant
  misc_feature: MA Experiment ID: 20001450 Result: Up-regulated in Transcription
  misc_feature: MA Experiment 20001450 PARAMETER Experiment Name: At_Far-red-induction_P Parameter: Age (day) Value: 7
  misc_feature: MA Experiment 20001450 PARAMETER Experiment Name: At_Far-red-induction_P Parameter: Light Value: Far-red vs. White
  misc_feature: MA Experiment 20001450 PARAMETER Experiment Name: At_Far-red-induction_P Parameter: Organism Value: A. thaliana
  misc_feature: MA Experiment 20001450 PARAMETER Experiment Name: At_Far-red-induction_P Parameter: Plant Line Value: Columbia
  misc_feature: MA Experiment 20001450 PARAMETER Experiment Name: At_Far-red-induction_P Parameter: Timepoint (hr) Value: 8
  misc_feature: MA Experiment 20001450 PARAMETER Experiment Name: At_Far-red-induction_P Parameter: Tissue Value: Whole Plant
  misc_feature: MA Experiment ID: 20001451 Result: Up-regulated in Transcription
  misc_feature: MA Experiment 20001451 PARAMETER Experiment Name: At_Far-red-induction_P Parameter: Age (day) Value: 7
  misc_feature: MA Experiment 20001451 PARAMETER Experiment Name: At_Far-red-induction_P Parameter: Light Value: Far-red vs. White
  misc_feature: MA Experiment 20001451 PARAMETER Experiment Name: At_Far-red-induction_P Parameter: Organism Value: A. thaliana
  misc_feature: MA Experiment 20001451 PARAMETER Experiment Name: At_Far-red-induction_P Parameter: Plant Line Value: Columbia
  misc_feature: MA Experiment 20001451 PARAMETER Experiment Name: At_Far-red-induction_P Parameter: Timepoint (hr) Value: 24
  misc_feature: MA Experiment 20001451 PARAMETER Experiment Name: At_Far-red-induction_P Parameter: Tissue Value: Whole Plant
  misc_feature: MA Experiment ID: 20001556 Result: Down-regulated in Transcription
  misc_feature: MA Experiment 20001556 PARAMETER Experiment Name: At_Drought_Soil_Dry_P Parameter: Age (day) Value: 26
  misc_feature: MA Experiment 20001556 PARAMETER Experiment Name: At_Drought_Soil_Dry_P Parameter: Organism Value: A. thaliana
  misc_feature: MA Experiment 20001556 PARAMETER Experiment Name: At_Drought_Soil_Dry_P Parameter: Plant Line Value: WS
  misc_feature: MA Experiment 20001556 PARAMETER Experiment Name: At_Drought_Soil_Dry_P Parameter: Post Timepoint (hr) Value: None
  misc_feature: MA Experiment 20001556 PARAMETER Experiment Name: At_Drought_Soil_Dry_P Parameter: Post-Treatment Value: None
  misc_feature: MA Experiment 20001556 PARAMETER Experiment Name: At_Drought_Soil_Dry_P Parameter: Timepoint (day) Value: 12
  misc_feature: MA Experiment 20001556 PARAMETER Experiment Name: At_Drought_Soil_Dry_P Parameter: Treatment Value: Drought vs. No Drought
  misc_feature: MA Experiment ID: 20001558 Result: Down-regulated in Transcription
  misc_feature: MA Experiment 20001558 PARAMETER Experiment Name: At_Drought_Soil_Dry_P Parameter: Age (day) Value: 27
  misc_feature: MA Experiment 20001558 PARAMETER Experiment Name: At_Drought_Soil_Dry_P Parameter: Organism Value: A. thaliana
  misc_feature: MA Experiment 20001558 PARAMETER Experiment Name: At_Drought_Soil_Dry_P Parameter: Plant Line Value: WS
  misc_feature: MA Experiment 20001558 PARAMETER Experiment Name: At_Drought_Soil_Dry_P Parameter: Post Timepoint (hr) Value: 6
  misc_feature: MA Experiment 20001558 PARAMETER Experiment Name: At_Drought_Soil_Dry_P Parameter: Post-Treatment Value: Re-Water vs. No Drought
  misc_feature: MA Experiment 20001558 PARAMETER Experiment Name: At_Drought_Soil_Dry_P Parameter: Timepoint (day) Value: 13
  misc_feature: MA Experiment 20001558 PARAMETER Experiment Name: At_Drought_Soil_Dry_P Parameter: Treatment Value: Drought vs. No Drought
  misc_feature: MA Experiment ID: 20001560 Result: Down-regulated in Transcription
  misc_feature: MA Experiment 20001560 PARAMETER Experiment Name: At_Drought_Soil_Dry_P Parameter: Age (day) Value: 28
  misc_feature: MA Experiment 20001560 PARAMETER Experiment Name: At_Drought_Soil_Dry_P Parameter: Organism Value: A. thaliana
  misc_feature: MA Experiment 20001560 PARAMETER Experiment Name: At_Drought_Soil_Dry_P Parameter: Plant Line Value: WS
  misc_feature: MA Experiment 20001560 PARAMETER Experiment Name: At_Drought_Soil_Dry_P Parameter: Post Timepoint (hr) Value: None
  misc_feature: MA Experiment 20001560 PARAMETER Experiment Name: At_Drought_Soil_Dry_P Parameter: Post-Treatment Value: None
  misc_feature: MA Experiment 20001560 PARAMETER Experiment Name: At_Drought_Soil_Dry_P Parameter: Timepoint (day) Value: 14
  misc_feature: MA Experiment 20001560 PARAMETER Experiment Name: At_Drought_Soil_Dry_P Parameter: Treatment Value: Drought vs. No Drought

SEQ ID NO: 33759 - protein, 300 aa, Arabidopsis thaliana; identical to SEQ ID NO: 30169
  peptide (1)..(300): Ceres Seq. ID no. 12605071
  misc_feature (76)..(295): Pfam Name: Dehydrin Pfam Description: Dehydrin
  misc_feature (76)..(295): Pfam Name: Dehydrin Pfam Description: Dehydrin
  misc_feature (63)..(298): Homolog of NCBI NO: 26418686 NR Description: dehydrin [Citrus x paradisi]
  misc_feature (36)..(215): Homolog of NCBI NO: 24417358 NR Description: unknown [Arabidopsis thaliana]
  misc_feature (95)..(299): Homolog of NCBI NO: 509262 NR Description: lti45 [Arabidopsis thaliana]
  misc_feature (36)..(239): Homolog of NCBI NO: 33410861 NR Description: cold-regulated protein Cor25 [Brassica rapa
  misc_feature (36)..(299): Homolog of NCBI NO: 30686836 NR Description: dehydrin (ERD10) [Arabidopsis thaliana]
  misc_feature (63)..(298): Homolog of NCBI NO: 26418686 NR Description: dehydrin [Citrus x paradisi]
  misc_feature (95)..(299): Homolog of NCBI NO: 509262 NR Description: lti45 [Arabidopsis thaliana]
  misc_feature (36)..(299): Homolog of NCBI NO: 30686836 NR Description: dehydrin (ERD10) [Arabidopsis thaliana]
  misc_feature (7)..(300): Homolog of NCBI NO: 99681 NR Description: cold-regulated protein cor47 - Arabidopsis
  misc_feature (36)..(300): Homolog of NCBI NO: 15217937 NR Description: hypothetical protein
  misc_feature (36)..(300): Homolog of NCBI NO: 975646 NR Description: dehydrin [Arabidopsis thaliana]
  misc_feature (36)..(299): Homolog of NCBI NO: 30686832 NR Description: dehydrin (ERD10) [Arabidopsis thaliana]
  misc_feature (36)..(298): Homolog of NCBI NO: 13751875 NR Description: unknown protein [Arabidopsis thaliana]
  misc_feature (36)..(239): Homolog of NCBI NO: 33410861 NR Description: cold-regulated protein Cor25 [Brassica rapa
  misc_feature (36)..(215): Homolog of NCBI NO: 24417358 NR Description: unknown [Arabidopsis thaliana]
  misc_feature (36)..(298): Homolog of NCBI NO: 13751875 NR Description: unknown protein [Arabidopsis thaliana]
  misc_feature (36)..(299): Homolog of NCBI NO: 30686832 NR Description: dehydrin (ERD10) [Arabidopsis thaliana]
  misc_feature (36)..(300): Homolog of NCBI NO: 975646 NR Description: dehydrin [Arabidopsis thaliana]
  misc_feature (36)..(300): Homolog of NCBI NO: 15217937 NR Description: hypothetical protein
  misc_feature (7)..(300): Homolog of NCBI NO: 99681 NR Description: cold-regulated protein cor47 - Arabidopsis

SEQ ID NO: 33760 - protein, 265 aa, Arabidopsis thaliana; identical to SEQ ID NO: 30170
  peptide (1)..(265): Ceres Seq. ID no. 12605072
  misc_feature (41)..(260): Pfam Name: Dehydrin Pfam Description: Dehydrin
  misc_feature (41)..(260): Pfam Name: Dehydrin Pfam Description: Dehydrin
  misc_feature (28)..(263): Homolog of NCBI NO: 26418686 NR Description: dehydrin [Citrus x paradisi]
  misc_feature (1)..(180): Homolog of NCBI NO: 24417358 NR Description: unknown [Arabidopsis thaliana]
  misc_feature (60)..(264): Homolog of NCBI NO: 509262 NR Description: lti45 [Arabidopsis thaliana]
  misc_feature (1)..(204): Homolog of NCBI NO: 33410861 NR Description: cold-regulated protein Cor25 [Brassica rapa
  misc_feature (1)..(264): Homolog of NCBI NO: 30686836 NR Description: dehydrin (ERD10) [Arabidopsis thaliana]
  misc_feature (28)..(263): Homolog of NCBI NO: 26418686 NR Description: dehydrin [Citrus x paradisi]
  misc_feature (60)..(264): Homolog of NCBI NO: 509262 NR Description: lti45 [Arabidopsis thaliana]
  misc_feature (1)..(264): Homolog of NCBI NO: 30686836 NR Description: dehydrin (ERD10) [Arabidopsis thaliana]
  misc_feature (1)..(265): Homolog of NCBI NO: 99681 NR Description: cold-regulated protein cor47 - Arabidopsis
  misc_feature (1)..(265): Homolog of NCBI NO: 15217937 NR Description: hypothetical protein
  misc_feature (1)..(265): Homolog of NCBI NO: 975646 NR Description: dehydrin [Arabidopsis thaliana]
  misc_feature (1)..(264): Homolog of NCBI NO: 30686832 NR Description: dehydrin (ERD10) [Arabidopsis thaliana]
  misc_feature (1)..(263): Homolog of NCBI NO: 13751875 NR Description: unknown protein [Arabidopsis thaliana]
  misc_feature (1)..(204): Homolog of NCBI NO: 33410861 NR Description: cold-regulated protein Cor25 [Brassica rapa
  misc_feature (1)..(180): Homolog of NCBI NO: 24417358 NR Description: unknown [Arabidopsis thaliana]
  misc_feature (1)..(263): Homolog of NCBI NO: 13751875 NR Description: unknown protein [Arabidopsis thaliana]
  misc_feature (1)..(264): Homolog of NCBI NO: 30686832 NR Description: dehydrin (ERD10) [Arabidopsis thaliana]
  misc_feature (1)..(265): Homolog of NCBI NO: 975646 NR Description: dehydrin [Arabidopsis thaliana]
  misc_feature (1)..(265): Homolog of NCBI NO: 15217937 NR Description: hypothetical protein
  misc_feature (1)..(265): Homolog of NCBI NO: 99681 NR Description: cold-regulated protein cor47 - Arabidopsis

SEQ ID NO: 33761 - DNA, 1139 bp, Arabidopsis thaliana; identical to SEQ ID NO: 22245
  misc_feature (1)..(1139): Ceres Seq. ID no. 12323678
  misc_feature: MA Experiment ID: 20000171 Result: Up-regulated in Transcription
  misc_feature: MA Experiment 20000171 PARAMETER Experiment Name: At_42deg_Heat_P Parameter: Age (day) Value: 14
  misc_feature: MA Experiment 20000171 PARAMETER Experiment Name: At_42deg_Heat_P Parameter: Organism Value: A. thaliana
  misc_feature: MA Experiment 20000171 PARAMETER Experiment Name: At_42deg_Heat_P Parameter: Plant Line Value: WS
  misc_feature: MA Experiment 20000171 PARAMETER Experiment Name: At_42deg_Heat_P Parameter: Temperature (deg C) Value: 42 vs. 22
  misc_feature: MA Experiment 20000171 PARAMETER Experiment Name: At_42deg_Heat_P Parameter: Timepoint (hr) Value: 1
  misc_feature: MA Experiment 20000171 PARAMETER Experiment Name: At_42deg_Heat_P Parameter: Tissue Value: Aerial
  misc_feature: MA Experiment ID: 20000173 Result: Up-regulated in Transcription
  misc_feature: MA Experiment 20000173 PARAMETER Experiment Name: At_42deg_Heat_P Parameter: Age (day) Value: 14
  misc_feature: MA Experiment 20000173 PARAMETER Experiment Name: At_42deg_Heat_P Parameter: Organism Value: A. thaliana
  misc_feature: MA Experiment 20000173 PARAMETER Experiment Name: At_42deg_Heat_P Parameter: Plant Line Value: WS
  misc_feature: MA Experiment 20000173 PARAMETER Experiment Name: At_42deg_Heat_P Parameter: Temperature (deg C) Value: 42 vs. 22
  misc_feature: MA Experiment 20000173 PARAMETER Experiment Name: At_42deg_Heat_P Parameter: Timepoint (hr) Value: 6
  misc_feature: MA Experiment 20000173 PARAMETER Experiment Name: At_42deg_Heat_P Parameter: Tissue Value: Aerial
  misc_feature: MA Experiment ID: 20000179 Result: Up-regulated in Transcription
  misc_feature: MA Experiment 20000179 PARAMETER Experiment Name: At_Germinating_Seeds_P Parameter: Age (hr) Value: 6 vs. 0
  misc_feature: MA Experiment 20000179 PARAMETER Experiment Name: At_Germinating_Seeds_P Parameter: Tissue Value: Germinating Seeds
  misc_feature: MA Experiment ID: 20000227 Result: Down-regulated in Transcription
  misc_feature: MA Experiment 20000227 PARAMETER Experiment Name: At_Root-Tips-vs-Tops_P Parameter: Tissue Value: Root Tips vs. Root Tops
  misc_feature: MA Experiment ID: 20000265 Result: Down-regulated in Transcription
  misc_feature: MA Experiment 20000265 PARAMETER Experiment Name: At_Open_Flower_P Parameter: Age (day) Value: 21
  misc_feature: MA Experiment 20000265 PARAMETER Experiment Name: At_Open_Flower_P Parameter: Plant Line Value: WS
  misc_feature: MA Experiment 20000265 PARAMETER Experiment Name: At_Open_Flower_P Parameter: Tissue Value: Closed Flower vs. Whole Plant
  misc_feature: MA Experiment ID: 20000436 Result: Up-regulated in Transcription
  misc_feature: MA Experiment 20000436 PARAMETER Experiment Name: At_Drought_P Parameter: Age (day) Value: 7
  misc_feature: MA Experiment 20000436 PARAMETER Experiment Name: At_Drought_P Parameter: Organism Value: A. thaliana
  misc_feature: MA Experiment 20000436 PARAMETER Experiment Name: At_Drought_P Parameter: Plant Line Value: WS
  misc_feature: MA Experiment 20000436 PARAMETER Experiment Name: At_Drought_P Parameter: Timepoint (hr) Value: 12
  misc_feature: MA Experiment 20000436 PARAMETER Experiment Name: At_Drought_P Parameter: Tissue Value: Whole Plant
  misc_feature: MA Experiment 20000436 PARAMETER Experiment Name: At_Drought_P Parameter: Treatment Value: Drought vs. No Drought
  misc_feature: MA Experiment ID: 20000437 Result: Up-regulated in Transcription
  misc_feature: MA Experiment 20000437 PARAMETER Experiment Name: At_Drought_P Parameter: Age (day) Value: 8
  misc_feature: MA Experiment 20000437 PARAMETER Experiment Name: At_Drought_P Parameter: Organism Value: A. thaliana
  misc_feature: MA Experiment 20000437 PARAMETER Experiment Name: At_Drought_P Parameter: Plant Line Value: WS
  misc_feature: MA Experiment 20000437 PARAMETER Experiment Name: At_Drought_P Parameter: Timepoint (hr) Value: 24
  misc_feature: MA Experiment 20000437 PARAMETER Experiment Name: At_Drought_P Parameter: Tissue Value: Whole Plant
  misc_feature: MA Experiment 20000437 PARAMETER Experiment Name: At_Drought_P Parameter: Treatment Value: Drought vs. No Drought
  misc_feature: MA Experiment ID: 20000794 Result: Up-regulated in Transcription
  misc_feature: MA Experiment 20000794 PARAMETER Experiment Name: At_Petals_P Parameter: Age (day) Value: 23-25 days
  misc_feature: MA Experiment 20000794 PARAMETER Experiment Name: At_Petals_P Parameter: Plant Line Value: WS
  misc_feature: MA Experiment 20000794 PARAMETER Experiment Name: At_Petals_P Parameter: Tissue Value: Petals vs. Whole plant
  misc_feature: MA Experiment ID: 20001451 Result: Up-regulated in Transcription
  misc_feature: MA Experiment 20001451 PARAMETER Experiment Name: At_Far-red-induction_P Parameter: Age (day) Value: 7
  misc_feature: MA Experiment 20001451 PARAMETER Experiment Name: At_Far-red-induction_P Parameter: Light Value: Far-red vs. White
  misc_feature: MA Experiment 20001451 PARAMETER Experiment Name: At_Far-red-induction_P Parameter: Organism Value: A. thaliana
  misc_feature: MA Experiment 20001451 PARAMETER Experiment Name: At_Far-red-induction_P Parameter: Plant Line Value: Columbia
  misc_feature: MA Experiment 20001451 PARAMETER Experiment Name: At_Far-red-induction_P Parameter: Timepoint (hr) Value: 24
  misc_feature: MA Experiment 20001451 PARAMETER Experiment Name: At_Far-red-induction_P Parameter: Tissue Value: Whole Plant
  misc_feature: MA Experiment ID: 20001554 Result: Up-regulated in Transcription
  misc_feature: MA Experiment 20001554 PARAMETER Experiment Name: At_Drought_Soil_Dry_P Parameter: Age (day) Value: 21
  misc_feature: MA Experiment 20001554 PARAMETER Experiment Name: At_Drought_Soil_Dry_P Parameter: Organism Value: A. thaliana
  misc_feature: MA Experiment 20001554 PARAMETER Experiment Name: At_Drought_Soil_Dry_P Parameter: Plant Line Value: WS
  misc_feature: MA Experiment 20001554 PARAMETER Experiment Name: At_Drought_Soil_Dry_P Parameter: Post Timepoint (hr) Value: None
  misc_feature: MA Experiment 20001554 PARAMETER Experiment Name: At_Drought_Soil_Dry_P Parameter: Post-Treatment Value: None
  misc_feature: MA Experiment 20001554 PARAMETER Experiment Name: At_Drought_Soil_Dry_P Parameter: Timepoint (day) Value: 7
  misc_feature: MA Experiment 20001554 PARAMETER Experiment Name: At_Drought_Soil_Dry_P Parameter: Treatment Value: Drought vs. No Drought
  misc_feature: MA Experiment ID: 20001908 Result: Up-regulated in Transcription
  misc_feature: MA Experiment 20001908 PARAMETER Experiment Name: At_Drought_Reproduction_P Parameter: Age (day) Value: 40
  misc_feature: MA Experiment 20001908 PARAMETER Experiment Name: At_Drought_Reproduction_P Parameter: Organism Value: A. thaliana
  misc_feature: MA Experiment 20001908 PARAMETER Experiment Name: At_Drought_Reproduction_P Parameter: Plant Line Value: WS
  misc_feature: MA Experiment 20001908 PARAMETER Experiment Name: At_Drought_Reproduction_P Parameter: Timepoint (day) Value: 10
  misc_feature: MA Experiment 20001908 PARAMETER Experiment Name: At_Drought_Reproduction_P Parameter: Tissue Value: Siliques
  misc_feature: MA Experiment 20001908 PARAMETER Experiment Name: At_Drought_Reproduction_P Parameter: Treatment Value: Drought vs. No Drought
  misc_feature: MA Experiment ID: 20001911 Result: Up-regulated in Transcription
  misc_feature: MA Experiment 20001911 PARAMETER Experiment Name: At_Drought_Reproduction_P Parameter: Age (day) Value: 40
  misc_feature: MA Experiment 20001911 PARAMETER Experiment Name: At_Drought_Reproduction_P Parameter: Organism Value: A. thaliana
  misc_feature: MA Experiment 20001911 PARAMETER Experiment Name: At_Drought_Reproduction_P Parameter: Plant Line Value: WS
  misc_feature: MA Experiment 20001911 PARAMETER Experiment Name: At_Drought_Reproduction_P Parameter: Timepoint (day) Value: 10
  misc_feature: MA Experiment 20001911 PARAMETER Experiment Name: At_Drought_Reproduction_P Parameter: Tissue Value: Flowers
  misc_feature: MA Experiment 20001911 PARAMETER Experiment Name: At_Drought_Reproduction_P Parameter: Treatment Value: Drought vs. No Drought

SEQ ID NO: 33762 - protein, 217 aa, Arabidopsis thaliana; identical to SEQ ID NO: 22246
  peptide (1)..(217): Ceres Seq. ID no. 12323679
  misc_feature (135)..(214): Homolog of NCBI NO: 30017516 NR Description: hypothetical protein [Oryza sativa (japonica
  misc_feature (42)..(207): Homolog of NCBI NO: 15241329 NR Description: putative protein; protein id: At5g20370.1
  misc_feature (2)..(216): Homolog of NCBI NO: 24461857 NR Description: CTV.15 [Poncirus trifoliata]
  misc_feature (1)..(216): Homolog of NCBI NO: 21618161 NR Description: serine-rich protein [Arabidopsis thaliana]
  misc_feature (1)..(216): Homolog of NCBI NO: 15238753 NR Description: serine-rich protein; protein id: At5g25280.1
  misc_feature (1)..(217): Homolog of NCBI NO: 15238947 NR Description: putative protein
  misc_feature (135)..(214): Homolog of NCBI NO: 30017516 NR Description: hypothetical protein [Oryza sativa (japonica
  misc_feature (42)..(207): Homolog of NCBI NO: 15241329 NR Description: putative protein; protein id: At5g20370.1
  misc_feature (2)..(216): Homolog of NCBI NO: 24461857 NR Description: CTV.15 [Poncirus trifoliata]
  misc_feature (1)..(216): Homolog of NCBI NO: 21618161 NR Description: serine-rich protein [Arabidopsis thaliana]
  misc_feature (1)..(216): Homolog of NCBI NO: 15238753 NR Description: serine-rich protein; protein id: At5g25280.1
  misc_feature (1)..(217): Homolog of NCBI NO: 15238947 NR Description: putative protein

SEQ ID NO: 33763 - protein, 133 aa, Arabidopsis thaliana; identical to SEQ ID NO: 22247
  peptide (1)..(133): Ceres Seq. ID no. 12323680
  misc_feature (51)..(130): Homolog of NCBI NO: 30017516 NR Description: hypothetical protein [Oryza sativa (japonica
  misc_feature (1)..(123): Homolog of NCBI NO: 15241329 NR Description: putative protein; protein id: At5g20370.1
  misc_feature (1)..(132): Homolog of NCBI NO: 24461857 NR Description: CTV.15 [Poncirus trifoliata]
  misc_feature (1)..(132): Homolog of NCBI NO: 21618161 NR Description: serine-rich protein [Arabidopsis thaliana]
  misc_feature (1)..(132): Homolog of NCBI NO: 15238753 NR Description: serine-rich protein; protein id: At5g25280.1
  misc_feature (1)..(133): Homolog of NCBI NO: 15238947 NR Description: putative protein
  misc_feature (51)..(130): Homolog of NCBI NO: 30017516 NR Description: hypothetical protein [Oryza sativa (japonica
  misc_feature (1)..(123): Homolog of NCBI NO: 15241329 NR Description: putative protein; protein id: At5g20370.1
  misc_feature (1)..(132): Homolog of NCBI NO: 24461857 NR Description: CTV.15 [Poncirus trifoliata]
  misc_feature (1)..(132): Homolog of NCBI NO: 21618161 NR Description: serine-rich protein [Arabidopsis thaliana]
  misc_feature (1)..(132): Homolog of NCBI NO: 15238753 NR Description: serine-rich protein; protein id: At5g25280.1
  misc_feature (1)..(133): Homolog of NCBI NO: 15238947 NR Description: putative protein

SEQ ID NO: 33764 - DNA, 787 bp, Arabidopsis thaliana; identical to SEQ ID NO: 30174
  misc_feature (1)..(787): Ceres Seq. ID no. 12332031

SEQ ID NO: 33765 - protein, 180 aa, Arabidopsis thaliana; identical to SEQ ID NO: 30175
  peptide (1)..(180): Ceres Seq. ID no. 12332032
  misc_feature (35)..(165): Homolog of NCBI NO: 7546725 NR Description: MFP1 attachment factor 1 [Lycopersicon esculentum]
  misc_feature (1)..(155): Homolog of NCBI NO: 21553983 NR Description: unknown [Arabidopsis thaliana]
  misc_feature (1)..(155): Homolog of NCBI NO: 18421176 NR Description: Expressed protein
  misc_feature (1)..(163): Homolog of NCBI NO: 21618109 NR Description: MFP1 attachment factor 1 [Arabidopsis thaliana]
  misc_feature (1)..(163): Homolog of NCBI NO: 15239170 NR Description: putative protein
  misc_feature (1)..(180): Homolog of NCBI NO: 21553809 NR Description: unknown [Arabidopsis thaliana]
  misc_feature (1)..(180): Homolog of NCBI NO: 18401618 NR Description: expressed protein

SEQ ID NO: 33766 - protein, 153 aa, Arabidopsis thaliana; identical to SEQ ID NO: 30176
  peptide (1)..(153): Ceres Seq. ID no. 12332033
  misc_feature (8)..(138): Homolog of NCBI NO: 7546725 NR Description: MFP1 attachment factor 1 [Lycopersicon esculentum]
  misc_feature (1)..(128): Homolog of NCBI NO: 21553983 NR Description: unknown [Arabidopsis thaliana]
  misc_feature (1)..(128): Homolog of NCBI NO: 18421176 NR Description: Expressed protein
  misc_feature (1)..(136): Homolog of NCBI NO: 21618109 NR Description: MFP1 attachment factor 1 [Arabidopsis thaliana]
  misc_feature (1)..(136): Homolog of NCBI NO: 15239170 NR Description: putative protein
  misc_feature (1)..(153): Homolog of NCBI NO: 21553809 NR Description: unknown [Arabidopsis thaliana]
  misc_feature (1)..(153): Homolog of NCBI NO: 18401618 NR Description: expressed protein

SEQ ID NO: 33767 - protein, 94 aa, Arabidopsis thaliana; identical to SEQ ID NO: 30177
  peptide (1)..(94): Ceres Seq. ID no. 12332034

SEQ ID NO: 33768 - DNA, 897 bp, Arabidopsis thaliana; identical to SEQ ID NO: 30178
  misc_feature (1)..(897): Ceres Seq. ID no. 13490026
  misc_feature: MA Experiment ID: 108461 Result: Up-regulated in Transcription
  misc_feature: MA Experiment 108461 PARAMETER Experiment Name: At_Germinating_Seeds_cDNA_P Parameter: Age (day) Value: 1 vs. 0
  misc_feature: MA Experiment 108461 PARAMETER Experiment Name: At_Germinating_Seeds_cDNA_P Parameter: Tissue Value: Germinating Seeds
  misc_feature: MA Experiment ID: 108573 Result: Down-regulated in Transcription
  misc_feature: MA Experiment 108573 PARAMETER Experiment Name: At_Drought_cDNA_P Parameter: Timepoint (hr) Value: 6
  misc_feature: MA Experiment 108573 PARAMETER Experiment Name: At_Drought_cDNA_P Parameter: Tissue Value: Aerial
  misc_feature: MA Experiment 108573 PARAMETER Experiment Name: At_Drought_cDNA_P Parameter: Treatment Value: Drought vs. No Drought
  misc_feature: MA Experiment ID: 108577 Result: Down-regulated in Transcription
  misc_feature: MA Experiment 108577 PARAMETER Experiment Name: At_42deg_Heat_cDNA_P Parameter: Temperature (deg C) Value: 42 vs. 22
  misc_feature: MA Experiment 108577 PARAMETER Experiment Name: At_42deg_Heat_cDNA_P Parameter: Timepoint (hr) Value: 6
  misc_feature: MA Experiment 108577 PARAMETER Experiment Name: At_42deg_Heat_cDNA_P Parameter: Tissue Value: Aerial
  misc_feature: MA Experiment ID: 20000112 Result: Down-regulated in Transcription
  misc_feature: MA Experiment 20000112 PARAMETER Experiment Name: At_42deg_Heat_cDNA_P Parameter: Temperature (deg C) Value: 42 vs. 22
  misc_feature: MA Experiment 20000112 PARAMETER Experiment Name: At_42deg_Heat_cDNA_P Parameter: Timepoint (hr) Value: 2
  misc_feature: MA Experiment 20000112 PARAMETER Experiment Name: At_42deg_Heat_cDNA_P Parameter: Tissue Value: Aerial
  misc_feature: MA Experiment ID: 20000113 Result: Down-regulated in Transcription
  misc_feature: MA Experiment 20000113 PARAMETER Experiment Name: At_42deg_Heat_cDNA_P Parameter: Temperature (deg C) Value: 42 vs. 22
  misc_feature: MA Experiment 20000113 PARAMETER Experiment Name: At_42deg_Heat_cDNA_P Parameter: Timepoint (hr) Value: 8
  misc_feature: MA Experiment 20000113 PARAMETER Experiment Name: At_42deg_Heat_cDNA_P Parameter: Tissue Value: Aerial
  misc_feature: MA Experiment ID: 20000173 Result: Down-regulated in Transcription
  misc_feature: MA Experiment 20000173 PARAMETER Experiment Name: At_42deg_Heat_P Parameter: Age (day) Value: 14
  misc_feature: MA Experiment 20000173 PARAMETER Experiment Name: At_42deg_Heat_P Parameter: Organism Value: A. thaliana
  misc_feature: MA Experiment 20000173 PARAMETER Experiment Name: At_42deg_Heat_P Parameter: Plant Line Value: WS
  misc_feature: MA Experiment 20000173 PARAMETER Experiment Name: At_42deg_Heat_P Parameter: Temperature (deg C) Value: 42 vs. 22
  misc_feature: MA Experiment 20000173 PARAMETER Experiment Name: At_42deg_Heat_P Parameter: Timepoint (hr) Value: 6
  misc_feature: MA Experiment 20000173 PARAMETER Experiment Name: At_42deg_Heat_P Parameter: Tissue Value: Aerial
  misc_feature: MA Experiment ID: 20000179 Result: Up-regulated in Transcription
  misc_feature: MA Experiment 20000179 PARAMETER Experiment Name: At_Germinating_Seeds_P Parameter: Age (hr) Value: 6 vs. 0
  misc_feature: MA Experiment 20000179 PARAMETER Experiment Name: At_Germinating_Seeds_P Parameter: Tissue Value: Germinating Seeds
  misc_feature: MA Experiment ID: 20000180 Result: Up-regulated in Transcription
  misc_feature: MA Experiment 20000180 PARAMETER Experiment Name: At_Germinating_Seeds_P Parameter: Age (hr) Value: 24 vs. 0
  misc_feature: MA Experiment 20000180 PARAMETER Experiment Name: At_Germinating_Seeds_P Parameter: Tissue Value: Germinating Seeds
  misc_feature: MA Experiment ID: 20000437 Result: Down-regulated in Transcription
  misc_feature: MA Experiment 20000437 PARAMETER Experiment Name: At_Drought_P Parameter: Age (day) Value: 8
  misc_feature: MA Experiment 20000437 PARAMETER Experiment Name: At_Drought_P Parameter: Organism Value: A. thaliana
  misc_feature: MA Experiment 20000437 PARAMETER Experiment Name: At_Drought_P Parameter: Plant Line Value: WS
  misc_feature: MA Experiment 20000437 PARAMETER Experiment Name: At_Drought_P Parameter: Timepoint (hr) Value: 24
  misc_feature: MA Experiment 20000437 PARAMETER Experiment Name: At_Drought_P Parameter: Tissue Value: Whole Plant
  misc_feature: MA Experiment 20000437 PARAMETER Experiment Name: At_Drought_P Parameter: Treatment Value: Drought vs. No Drought
  misc_feature: MA Experiment ID: 20000794 Result: Down-regulated in Transcription
  misc_feature: MA Experiment 20000794 PARAMETER Experiment Name: At_Petals_P Parameter: Age (day) Value: 23-25 days
  misc_feature: MA Experiment 20000794 PARAMETER Experiment Name: At_Petals_P Parameter: Plant Line Value: WS
  misc_feature: MA Experiment 20000794 PARAMETER Experiment Name: At_Petals_P Parameter: Tissue Value: Petals vs. Whole plant
  misc_feature: MA Experiment ID: 20001911 Result: Down-regulated in Transcription
  misc_feature: MA Experiment 20001911 PARAMETER Experiment Name: At_Drought_Reproduction_P Parameter: Age (day) Value: 40
  misc_feature: MA Experiment 20001911 PARAMETER Experiment Name: At_Drought_Reproduction_P Parameter: Organism Value: A. thaliana
  misc_feature: MA Experiment 20001911 PARAMETER Experiment Name: At_Drought_Reproduction_P Parameter: Plant Line Value: WS
  misc_feature: MA Experiment 20001911 PARAMETER Experiment Name: At_Drought_Reproduction_P Parameter: Timepoint (day) Value: 10
  misc_feature: MA Experiment 20001911 PARAMETER Experiment Name: At_Drought_Reproduction_P Parameter: Tissue Value: Flowers
  misc_feature: MA Experiment 20001911 PARAMETER Experiment Name: At_Drought_Reproduction_P Parameter: Treatment Value: Drought vs. No Drought

SEQ ID NO: 33769 - protein, 217 aa, Arabidopsis thaliana; identical to SEQ ID NO: 30179
  peptide (1)..(217): Ceres Seq. ID no. 13490027
  misc_feature (14)..(175): Pfam Name: Ras family Pfam Description: Ras family
  misc_feature (58)..(216): Homolog of NCBI NO: 25294121 NR Description: protein F22G5.24 [imported] - Arabidopsis
  misc_feature (1)..(216): Homolog of NCBI NO: 15237828 NR Description: GTP binding protein, putative [Arabidopsis
  misc_feature (1)..(216): Homolog of NCBI NO: 3024506 NR Description: RAS-RELATED PROTEIN RAB11A
  misc_feature (1)..(216): Homolog of NCBI NO: 15222396 NR Description: GTP-binding protein, putative [Arabidopsis
  misc_feature (1)..(216): Homolog of NCBI NO: 15232652 NR Description: GTP-binding protein, putative [Arabidopsis
  misc_feature (1)..(216): Homolog of NCBI NO: 34897394 NR Description: Ras-related GTP-binding protein
  misc_feature (1)..(216): Homolog of NCBI NO: 1405561 NR Description: FSGTP1 [Fagus sylvatica]
  misc_feature (1)..(216): Homolog of NCBI NO: 3024528 NR Description: RAS-RELATED PROTEIN RAB2BV
  misc_feature (1)..(216): Homolog of NCBI NO: 3024501 NR Description: RAS-RELATED PROTEIN RAB11C
  misc_feature (1)..(217): Homolog of NCBI NO: 15217568 NR Description: GTP-binding protein, putative [Arabidopsis

SEQ ID NO: 33770 - DNA, 1307 bp, Arabidopsis thaliana; identical to SEQ ID NO: 30180
  misc_feature (1)..(1307): Ceres Seq. ID no. 12335859
  misc_feature: MA Experiment ID: 108434 Result: Up-regulated in Transcription
  misc_feature: MA Experiment 108434 PARAMETER Experiment Name: At_Root_Tips_cDNA_P Parameter: Tissue Value: Root Tips
  misc_feature: MA Experiment ID: 108462 Result: Down-regulated in Transcription
  misc_feature: MA Experiment 108462 PARAMETER Experiment Name: At_Germinating_Seeds_cDNA_P Parameter: Age (day) Value: 2 vs. 0
  misc_feature: MA Experiment 108462 PARAMETER Experiment Name: At_Germinating_Seeds_cDNA_P Parameter: Tissue Value: Germinating Seeds
  misc_feature: MA Experiment ID: 108463 Result: Down-regulated in Transcription
  misc_feature: MA Experiment 108463 PARAMETER Experiment Name: At_Germinating_Seeds_cDNA_P Parameter: Age (day) Value: 3 vs. 0
  misc_feature: MA Experiment 108463 PARAMETER Experiment Name: At_Germinating_Seeds_cDNA_P Parameter: Tissue Value: Germinating Seeds
  misc_feature: MA Experiment ID: 108464 Result: Down-regulated in Transcription
  misc_feature: MA Experiment 108464 PARAMETER Experiment Name: At_Germinating_Seeds_cDNA_P Parameter: Age (day) Value: 4 vs. 0
  misc_feature: MA Experiment 108464 PARAMETER Experiment Name: At_Germinating_Seeds_cDNA_P Parameter: Tissue Value: Germinating Seeds
  misc_feature: MA Experiment ID: 108609 Result: Down-regulated in Transcription
  misc_feature: MA Experiment 108609 PARAMETER Experiment Name: At_100uM_ABA_cDNA_P Parameter: Timepoint (hr) Value: 24
  misc_feature: MA Experiment 108609 PARAMETER Experiment Name: At_100uM_ABA_cDNA_P Parameter: Tissue Value: Aerial
  misc_feature: MA Experiment 108609 PARAMETER Experiment Name: At_100uM_ABA_cDNA_P Parameter: Treatment Value: 100uM ABA vs. No Treatment
  misc_feature: MA Experiment ID: 20000093 Result: Up-regulated in Transcription
  misc_feature: MA Experiment 20000093 PARAMETER Experiment Name: At_42deg_Heat_cDNA_P Parameter: Temperature (deg C) Value: 42 vs. 22
  misc_feature: MA Experiment 20000093 PARAMETER Experiment Name: At_42deg_Heat_cDNA_P Parameter: Timepoint (hr) Value: 0.5
  misc_feature: MA Experiment 20000093 PARAMETER Experiment Name: At_42deg_Heat_cDNA_P Parameter: Tissue Value: Aerial
  misc_feature: MA Experiment ID: 20000112 Result: Up-regulated in Transcription
  misc_feature: MA Experiment 20000112 PARAMETER Experiment Name: At_42deg_Heat_cDNA_P Parameter: Temperature (deg C) Value: 42 vs. 22
  misc_feature: MA Experiment 20000112 PARAMETER Experiment Name: At_42deg_Heat_cDNA_P Parameter: Timepoint (hr) Value: 2
  misc_feature: MA Experiment 20000112 PARAMETER Experiment Name: At_42deg_Heat_cDNA_P Parameter: Tissue Value: Aerial
  misc_feature: MA Experiment ID: 20000436 Result: Down-regulated in Transcription
  misc_feature: MA Experiment 20000436 PARAMETER Experiment Name: At_Drought_P Parameter: Age (day) Value: 7
  misc_feature: MA Experiment 20000436 PARAMETER Experiment Name: At_Drought_P Parameter: Organism Value: A. thaliana
  misc_feature: MA Experiment 20000436 PARAMETER Experiment Name: At_Drought_P Parameter: Plant Line Value: WS
  misc_feature: MA Experiment 20000436 PARAMETER Experiment Name: At_Drought_P Parameter: Timepoint (hr) Value: 12
  misc_feature: MA Experiment 20000436 PARAMETER Experiment Name: At_Drought_P Parameter: Tissue Value: Whole Plant
  misc_feature: MA Experiment 20000436 PARAMETER Experiment Name: At_Drought_P Parameter: Treatment Value: Drought vs. No Drought
  misc_feature: MA Experiment ID: 20000437 Result: Down-regulated in Transcription
  misc_feature: MA Experiment 20000437 PARAMETER Experiment Name: At_Drought_P Parameter: Age (day) Value: 8
  misc_feature: MA Experiment 20000437 PARAMETER Experiment Name: At_Drought_P Parameter: Organism Value: A. thaliana
  misc_feature: MA Experiment 20000437 PARAMETER Experiment Name: At_Drought_P Parameter: Plant Line Value: WS
  misc_feature: MA Experiment 20000437 PARAMETER Experiment Name: At_Drought_P Parameter: Timepoint (hr) Value: 24
  misc_feature: MA Experiment 20000437 PARAMETER Experiment Name: At_Drought_P Parameter: Tissue Value: Whole Plant
  misc_feature: MA Experiment 20000437 PARAMETER Experiment Name: At_Drought_P Parameter: Treatment Value: Drought vs. No Drought
  misc_feature: MA Experiment ID: 20000794 Result: Down-regulated in Transcription
  misc_feature: MA Experiment 20000794 PARAMETER Experiment Name: At_Petals_P Parameter: Age (day) Value: 23-25 days
  misc_feature: MA Experiment 20000794 PARAMETER Experiment Name: At_Petals_P Parameter: Plant Line Value: WS
  misc_feature: MA Experiment 20000794 PARAMETER Experiment Name: At_Petals_P Parameter: Tissue Value: Petals vs. Whole plant
  misc_feature: MA Experiment ID: 20001247 Result: Down-regulated in Transcription
  misc_feature: MA Experiment 20001247 PARAMETER Experiment Name: At_Far-red-induction_P Parameter: Age (day) Value: 7
  misc_feature: MA Experiment 20001247 PARAMETER Experiment Name: At_Far-red-induction_P Parameter: Light Value: Far-red vs. White
  misc_feature: MA Experiment 20001247 PARAMETER Experiment Name: At_Far-red-induction_P Parameter: Organism Value: A. thaliana
  misc_feature: MA Experiment 20001247 PARAMETER Experiment Name: At_Far-red-induction_P Parameter: Plant Line Value: Columbia
  misc_feature: MA Experiment 20001247 PARAMETER Experiment Name: At_Far-red-induction_P Parameter: Timepoint (hr) Value: 1
  misc_feature: MA Experiment 20001247 PARAMETER Experiment Name: At_Far-red-induction_P Parameter: Tissue Value: Whole Plant
  misc_feature: MA Experiment ID: 20001450 Result: Down-regulated in Transcription
  misc_feature: MA Experiment 20001450 PARAMETER Experiment Name: At_Far-red-induction_P Parameter: Age (day) Value: 7
  misc_feature: MA Experiment 20001450 PARAMETER Experiment Name: At_Far-red-induction_P Parameter: Light Value: Far-red vs. White
  misc_feature: MA Experiment 20001450 PARAMETER Experiment Name: At_Far-red-induction_P Parameter: Organism Value: A. thaliana
  misc_feature: MA Experiment 20001450 PARAMETER Experiment Name: At_Far-red-induction_P Parameter: Plant Line Value: Columbia
  misc_feature: MA Experiment 20001450 PARAMETER Experiment Name: At_Far-red-induction_P Parameter: Timepoint (hr) Value: 8
  misc_feature: MA Experiment 20001450 PARAMETER Experiment Name: At_Far-red-induction_P Parameter: Tissue Value: Whole Plant
  misc_feature: MA Experiment ID: 20001451 Result: Down-regulated in Transcription
  misc_feature: MA Experiment 20001451 PARAMETER Experiment Name: At_Far-red-induction_P Parameter: Age (day) Value: 7
  misc_feature: MA Experiment 20001451 PARAMETER Experiment Name: At_Far-red-induction_P Parameter: Light Value: Far-red vs. White
  misc_feature: MA Experiment 20001451 PARAMETER Experiment Name: At_Far-red-induction_P Parameter: Organism Value: A. thaliana
  misc_feature: MA Experiment 20001451 PARAMETER Experiment Name: At_Far-red-induction_P Parameter: Plant Line Value: Columbia
  misc_feature: MA Experiment 20001451 PARAMETER Experiment Name: At_Far-red-induction_P Parameter: Timepoint (hr) Value: 24
  misc_feature: MA Experiment 20001451 PARAMETER Experiment Name: At_Far-red-induction_P Parameter: Tissue Value: Whole Plant
  misc_feature: MA Experiment ID: 20001558 Result: Up-regulated in Transcription
  misc_feature: MA Experiment 20001558 PARAMETER Experiment Name: At_Drought_Soil_Dry_P Parameter: Age (day) Value: 27
  misc_feature: MA Experiment 20001558 PARAMETER Experiment Name: At_Drought_Soil_Dry_P Parameter: Organism Value: A. thaliana
  misc_feature: MA Experiment 20001558 PARAMETER Experiment Name: At_Drought_Soil_Dry_P Parameter: Plant Line Value: WS
  misc_feature: MA Experiment 20001558 PARAMETER Experiment Name: At_Drought_Soil_Dry_P Parameter: Post Timepoint (hr) Value: 6
  misc_feature: MA Experiment 20001558 PARAMETER Experiment Name: At_Drought_Soil_Dry_P Parameter: Post-Treatment Value: Re-Water vs. No Drought
  misc_feature: MA Experiment 20001558 PARAMETER Experiment Name: At_Drought_Soil_Dry_P Parameter: Timepoint (day) Value: 13
  misc_feature: MA Experiment 20001558 PARAMETER Experiment Name: At_Drought_Soil_Dry_P Parameter: Treatment Value: Drought vs. No Drought

SEQ ID NO: 33771 - protein, 366 aa, Arabidopsis thaliana; identical to SEQ ID NO: 30181
  peptide (1)..(366): Ceres Seq. ID no. 12335860
  misc_feature (36)..(224): Pfam Name: Formyl transferase Pfam Description: Formyl transferase
  misc_feature (38)..(357): Homolog of NCBI NO: 15643294 NR Description: methionyl-tRNA formyltransferase [Thermotoga
  misc_feature (38)..(366): Homolog of NCBI NO: 21282828 NR Description: methionyl-tRNA formyltransferase
  misc_feature (38)..(366): Homolog of NCBI NO: 15924206 NR Description: methionyl-tRNA formyltransferase
  misc_feature (38)..(366): Homolog of NCBI NO: 27467809 NR Description: methionyl-tRNA formyltransferase
  misc_feature (156)..(349): Homolog of NCBI NO: 15864563 NR Description: fmt putative protein [Brassica napus]
  misc_feature (170)..(366): Homolog of NCBI NO: 6069504 NR Description: S-locus protein 8 [Brassica rapa]
  misc_feature (13)..(319): Homolog of NCBI NO: 34911294 NR Description: similar to formyl transferase
  misc_feature (13)..(366): Homolog of NCBI NO: 7657875 NR Description: Fmt protein [Brassica napus var. napus]
  misc_feature (12)..(366): Homolog of NCBI NO: 29824361 NR Description: putative formyl transferase [Arabidopsis thaliana]
  misc_feature (12)..(366): Homolog of NCBI NO: 15219681 NR Description: formyl transferase, putative; protein id:

SEQ ID NO: 33772 - protein, 355 aa, Arabidopsis thaliana; identical to SEQ ID NO: 30182
  peptide (1)..(355): Ceres Seq. ID no. 12335861
  misc_feature (25)..(213): Pfam Name: Formyl transferase Pfam Description: Formyl transferase
  misc_feature (27)..(346): Homolog of NCBI NO: 15643294 NR Description: methionyl-tRNA formyltransferase [Thermotoga
  misc_feature (27)..(355): Homolog of NCBI NO: 21282828 NR Description: methionyl-tRNA formyltransferase
  misc_feature (27)..(355): Homolog of NCBI NO: 15924206 NR Description: methionyl-tRNA formyltransferase
  misc_feature (27)..(355): Homolog of NCBI NO: 27467809 NR Description: methionyl-tRNA formyltransferase
  misc_feature (145)..(338): Homolog of NCBI NO: 15864563 NR Description: fmt putative protein [Brassica napus]
  misc_feature (159)..(355): Homolog of NCBI NO: 6069504 NR Description: S-locus protein 8 [Brassica rapa]
  misc_feature (2)..(308): Homolog of NCBI NO: 34911294 NR Description: similar to formyl transferase
  misc_feature (2)..(355): Homolog of NCBI NO: 7657875 NR Description: Fmt protein [Brassica napus var. napus]
  misc_feature (1)..(355): Homolog of NCBI NO: 29824361 NR Description: putative formyl transferase [Arabidopsis thaliana]
  misc_feature (1)..(355): Homolog of NCBI NO: 15219681 NR Description: formyl transferase, putative; protein id:

SEQ ID NO: 33773 - DNA, 1213 bp, Arabidopsis thaliana; identical to SEQ ID NO: 30183
  misc_feature (1)..(1213): Ceres Seq. ID no. 12339711
  misc_feature: MA Experiment ID: 20000111 Result: Down-regulated in Transcription
  misc_feature: MA Experiment 20000111 PARAMETER Experiment Name: At_42deg_Heat_cDNA_P Parameter: Temperature (deg C) Value: 42 vs. 22
  misc_feature: MA Experiment 20000111 PARAMETER Experiment Name: At_42deg_Heat_cDNA_P Parameter: Timepoint (hr) Value: 6
  misc_feature: MA Experiment 20000111 PARAMETER Experiment Name: At_42deg_Heat_cDNA_P Parameter: Tissue Value: Aerial
  misc_feature: MA Experiment ID: 20000184 Result: Down-regulated in Transcription
  misc_feature: MA Experiment 20000184 PARAMETER Experiment Name: At_Shoots__P Parameter: Age (day) Value: 7
  misc_feature: MA Experiment 20000184 PARAMETER Experiment Name: At_Shoots__P Parameter: Tissue Value: Shoots vs. Whole Plant

SEQ ID NO: 33774 - protein, 158 aa, Arabidopsis thaliana; identical to SEQ ID NO: 30184
  peptide (1)..(158): Ceres Seq. ID no. 12339712
  misc_feature (1)..(154): Pfam Name: Protein of unknown function (DUF516) Pfam Description: Protein of unknown function (DUF516)
  misc_feature (1)..(82): Homolog of NCBI NO: 20094375 NR Description: Uncharacterized protein conserved in archaea
  misc_feature (1)..(84): Homolog of NCBI NO: 14520224 NR Description: hypothetical protein [Pyrococcus abyssi]
  misc_feature (1)..(81): Homolog of NCBI NO: 11498233 NR Description: conserved hypothetical protein [Archaeoglobus
  misc_feature (1)..(81): Homolog of NCBI NO: 14601434 NR Description: hypothetical protein [Aeropyrum pernix]
  misc_feature (1)..(91): Homolog of NCBI NO: 14589968 NR Description: hypothetical protein [Pyrococcus horikoshii]
  misc_feature (1)..(86): Homolog of NCBI NO: 15668338 NR Description: conserved hypothetical protein [Methanococcus
  misc_feature (1)..(85): Homolog of NCBI NO: 18978354 NR Description: hypothetical protein [Pyrococcus furiosus DSM
  misc_feature (1)..(80): Homolog of NCBI NO: 22406443 NR Description: hypothetical protein [Ferroplasma acidarmanus]
  misc_feature (1)..(157): Homolog of NCBI NO: 38636945 NR Description: putative GEKO1 [Oryza sativa (japonica
  misc_feature (1)..(158): Homolog of NCBI NO: 15227708 NR Description: unknown protein; protein id: At2g03800.1

SEQ ID NO: 33775 - protein, 151 aa, Arabidopsis thaliana; identical to SEQ ID NO: 30185
  peptide (1)..(151): Ceres Seq. ID no. 12339713
  misc_feature (72)..(145): Pfam Name: Protein of unknown function (DUF516) Pfam Description: Protein of unknown function (DUF516)
  misc_feature (27)..(119): Homolog of NCBI NO: 14589968 NR Description: hypothetical protein [Pyrococcus horikoshii]
  misc_feature (93)..(135): Homolog of NCBI NO: 15668338 NR Description: conserved hypothetical protein [Methanococcus
  misc_feature (27)..(119): Homolog of NCBI NO: 18978354 NR Description: hypothetical protein [Pyrococcus furiosus DSM
  misc_feature (27)..(119): Homolog of NCBI NO: 22406443 NR Description: hypothetical protein [Ferroplasma acidarmanus]
  misc_feature (24)..(139): Homolog of NCBI NO: 38636945 NR Description: putative GEKO1 [Oryza sativa (japonica
  misc_feature (1)..(145): Homolog of NCBI NO: 15227708 NR Description: unknown protein; protein id: At2g03800.1

SEQ ID NO: 33776 - protein, 138 aa, Arabidopsis thaliana; identical to SEQ ID NO: 30186
  peptide (1)..(138): Ceres Seq. ID no. 12339714
  misc_feature (1)..(134): Pfam Name: Protein of unknown function (DUF516) Pfam Description: Protein of unknown function (DUF516)
  misc_feature (1)..(62): Homolog of NCBI NO: 20094375 NR Description: Uncharacterized protein conserved in archaea
  misc_feature (1)..(64): Homolog of NCBI NO: 14520224 NR Description: hypothetical protein [Pyrococcus abyssi]
  misc_feature (1)..(61): Homolog of NCBI NO: 11498233 NR Description: conserved hypothetical protein [Archaeoglobus
  misc_feature (1)..(61): Homolog of NCBI NO: 14601434 NR Description: hypothetical protein [Aeropyrum pernix]
  misc_feature (1)..(71): Homolog of NCBI NO: 14589968 NR Description: hypothetical protein [Pyrococcus horikoshii]
  misc_feature (1)..(66): Homolog of NCBI NO: 15668338 NR Description: conserved hypothetical protein [Methanococcus
  misc_feature (1)..(65): Homolog of NCBI NO: 18978354 NR Description: hypothetical protein [Pyrococcus furiosus DSM
  misc_feature (1)..(60): Homolog of NCBI NO: 22406443 NR Description: hypothetical protein [Ferroplasma acidarmanus]
  misc_feature (1)..(137): Homolog of NCBI NO: 38636945 NR Description: putative GEKO1 [Oryza sativa (japonica
  misc_feature (1)..(138): Homolog of NCBI NO: 15227708 NR Description: unknown protein; protein id: At2g03800.1

SEQ ID NO: 33777 - DNA, 1224 bp, Arabidopsis thaliana; identical to SEQ ID NO: 30187
  misc_feature (1)..(1224): Ceres Seq. ID no. 12333622
  misc_feature: MA Experiment ID: 108435 Result: Down-regulated in Transcription
  misc_feature: MA Experiment 108435 PARAMETER Experiment Name: At_stm_Mutants_cDNA_P Parameter: Plant Line Value: wt Landsburg vs stm
  misc_feature: MA Experiment 108435 PARAMETER Experiment Name: At_stm_Mutants_cDNA_P Parameter: Tissue Value: Shoot Apical Meristem Region
  misc_feature: MA Experiment ID: 108501 Result: Down-regulated in Transcription
  misc_feature: MA Experiment 108501 PARAMETER Experiment Name: At_ap2_floral_buds_cDNA_P Parameter: Plant Line Value: ap2 (Ler.)
  misc_feature: MA Experiment 108501 PARAMETER Experiment Name: At_ap2_floral_buds_cDNA_P Parameter: Tissue Value: Closed Flower
  misc_feature: MA Experiment ID: 108577 Result: Down-regulated in Transcription
  misc_feature: MA Experiment 108577 PARAMETER Experiment Name: At_42deg_Heat_cDNA_P Parameter: Temperature (deg C) Value: 42 vs. 22
  misc_feature: MA Experiment 108577 PARAMETER Experiment Name: At_42deg_Heat_cDNA_P Parameter: Timepoint (hr) Value: 6
  misc_feature: MA Experiment 108577 PARAMETER Experiment Name: At_42deg_Heat_cDNA_P Parameter: Tissue Value: Aerial
  misc_feature: MA Experiment ID: 108594 Result: Up-regulated in Transcription
  misc_feature: MA Experiment 108594 PARAMETER Experiment Name: At_Ler-rhl_Root_cDNA_P Parameter: Plant Line Value: null
  misc_feature: MA Experiment ID: 108595 Result: Down-regulated in Transcription
  misc_feature: MA Experiment 108595 PARAMETER Experiment Name: At_Ler-pi_Ovule_cDNA_P Parameter: Plant Line Value: null
  misc_feature: MA Experiment ID: 20000087 Result: Down-regulated in Transcription
  misc_feature: MA Experiment 20000087 PARAMETER Experiment Name: At_100uM_ABA_Mutants_cDNA_P Parameter: Plant Line Value: WS
  misc_feature: MA Experiment 20000087 PARAMETER Experiment Name: At_100uM_ABA_Mutants_cDNA_P Parameter: Timepoint (hr) Value: 6
  misc_feature: MA Experiment 20000087 PARAMETER Experiment Name: At_100uM_ABA_Mutants_cDNA_P Parameter: Tissue Value: Aerial
  misc_feature: MA Experiment 20000087 PARAMETER Experiment Name: At_100uM_ABA_Mutants_cDNA_P Parameter: Treatment Value: 100uM ABA vs. No Treatment
  misc_feature: MA Experiment ID: 20000111 Result: Down-regulated in Transcription
  misc_feature: MA Experiment 20000111 PARAMETER Experiment Name: At_42deg_Heat_cDNA_P Parameter: Temperature (deg C) Value: 42 vs. 22
  misc_feature: MA Experiment 20000111 PARAMETER Experiment Name: At_42deg_Heat_cDNA_P Parameter: Timepoint (hr) Value: 6
  misc_feature: MA Experiment 20000111 PARAMETER Experiment Name: At_42deg_Heat_cDNA_P Parameter: Tissue Value: Aerial
  misc_feature: MA Experiment ID: 20000113 Result: Down-regulated in Transcription
  misc_feature: MA Experiment 20000113 PARAMETER Experiment Name: At_42deg_Heat_cDNA_P Parameter: Temperature (deg C) Value: 42 vs. 22
  misc_feature: MA Experiment 20000113 PARAMETER Experiment Name: At_42deg_Heat_cDNA_P Parameter: Timepoint (hr) Value: 8
  misc_feature: MA Experiment 20000113 PARAMETER Experiment Name: At_42deg_Heat_cDNA_P Parameter: Tissue Value: Aerial
  misc_feature: MA Experiment ID: 20000173 Result: Down-regulated in Transcription
  misc_feature: MA Experiment 20000173 PARAMETER Experiment Name: At_42deg_Heat_P Parameter: Age (day) Value: 14
  misc_feature: MA Experiment 20000173 PARAMETER Experiment Name: At_42deg_Heat_P Parameter: Organism Value: A. thaliana
  misc_feature: MA Experiment 20000173 PARAMETER Experiment Name: At_42deg_Heat_P Parameter: Plant Line Value: WS
  misc_feature: MA Experiment 20000173 PARAMETER Experiment Name: At_42deg_Heat_P Parameter: Temperature (deg C) Value: 42 vs. 22
  misc_feature: MA Experiment 20000173 PARAMETER Experiment Name: At_42deg_Heat_P Parameter: Timepoint (hr) Value: 6
  misc_feature: MA Experiment 20000173 PARAMETER Experiment Name: At_42deg_Heat_P Parameter: Tissue Value: Aerial
  misc_feature: MA Experiment ID: 20000185 Result: Down-regulated in Transcription
  misc_feature: MA Experiment 20000185 PARAMETER Experiment Name: At_Roots__P Parameter: Age (day) Value: 7 vs. 21
  misc_feature: MA Experiment 20000185 PARAMETER Experiment Name: At_Roots__P Parameter: Organism Value: A. thaliana
  misc_feature: MA Experiment 20000185 PARAMETER Experiment Name: At_Roots__P Parameter: Tissue Value: Roots vs. Whole Plant
  misc_feature: MA Experiment ID: 20000437 Result: Down-regulated in Transcription
  misc_feature: MA Experiment 20000437 PARAMETER Experiment Name: At_Drought_P Parameter: Age (day) Value: 8
  misc_feature: MA Experiment 20000437 PARAMETER Experiment Name: At_Drought_P Parameter: Organism Value: A. thaliana
  misc_feature: MA Experiment 20000437 PARAMETER Experiment Name: At_Drought_P Parameter: Plant Line Value: WS
  misc_feature: MA Experiment 20000437 PARAMETER Experiment Name: At_Drought_P Parameter: Timepoint (hr) Value: 24
  misc_feature: MA Experiment 20000437 PARAMETER Experiment Name: At_Drought_P Parameter: Tissue Value: Whole Plant
  misc_feature: MA Experiment 20000437 PARAMETER Experiment Name: At_Drought_P Parameter: Treatment Value: Drought vs. No Drought
  misc_feature: MA Experiment ID: 20000439 Result: Down-regulated in Transcription
  misc_feature: MA Experiment 20000439 PARAMETER Experiment Name: At_Roots__P Parameter: Age (day) Value: 14 vs. 21
  misc_feature: MA Experiment 20000439 PARAMETER Experiment Name: At_Roots__P Parameter: Organism Value: A. thaliana
  misc_feature: MA Experiment 20000439 PARAMETER Experiment Name: At_Roots__P Parameter: Tissue Value: Roots vs. Whole Plant
  misc_feature: MA Experiment ID: 20001555 Result: Down-regulated in Transcription
  misc_feature: MA Experiment 20001555 PARAMETER Experiment Name: At_Drought_Soil_Dry_P Parameter: Age (day) Value: 24
  misc_feature: MA Experiment 20001555 PARAMETER Experiment Name: At_Drought_Soil_Dry_P Parameter: Organism Value: A. thaliana
  misc_feature: MA Experiment 20001555 PARAMETER Experiment Name: At_Drought_Soil_Dry_P Parameter: Plant Line Value: WS
  misc_feature: MA Experiment 20001555 PARAMETER Experiment Name: At_Drought_Soil_Dry_P Parameter: Post Timepoint (hr) Value: None
  misc_feature: MA Experiment 20001555 PARAMETER Experiment Name: At_Drought_Soil_Dry_P Parameter: Post-Treatment Value: None
  misc_feature: MA Experiment 20001555 PARAMETER Experiment Name: At_Drought_Soil_Dry_P Parameter: Timepoint (day) Value: 10
  misc_feature: MA Experiment 20001555 PARAMETER Experiment Name: At_Drought_Soil_Dry_P Parameter: Treatment Value: Drought vs. No Drought
  misc_feature: MA Experiment ID: 20001557 Result: Down-regulated in Transcription
  misc_feature: MA Experiment 20001557 PARAMETER Experiment Name: At_Drought_Soil_Dry_P Parameter: Age (day) Value: 27
  misc_feature: MA Experiment 20001557 PARAMETER Experiment Name: At_Drought_Soil_Dry_P Parameter: Organism Value: A. thaliana
  misc_feature: MA Experiment 20001557 PARAMETER Experiment Name: At_Drought_Soil_Dry_P Parameter: Plant Line Value: WS
  misc_feature: MA Experiment 20001557 PARAMETER Experiment Name: At_Drought_Soil_Dry_P Parameter: Post Timepoint (hr) Value: 3
  misc_feature: MA Experiment 20001557 PARAMETER Experiment Name: At_Drought_Soil_Dry_P Parameter: Post-Treatment Value: Re-Water vs. No Drought
  misc_feature: MA Experiment 20001557 PARAMETER Experiment Name: At_Drought_Soil_Dry_P Parameter: Timepoint (day) Value: 13
  misc_feature: MA Experiment 20001557 PARAMETER Experiment Name: At_Drought_Soil_Dry_P Parameter: Treatment Value: Drought vs. No Drought
  misc_feature: MA Experiment ID: 20001904 Result: Down-regulated in Transcription
  misc_feature: MA Experiment 20001904 PARAMETER Experiment Name: At_Drought_Reproduction_P Parameter: Age (day) Value: 37
  misc_feature: MA Experiment 20001904 PARAMETER Experiment Name: At_Drought_Reproduction_P Parameter: Organism Value: A. thaliana
  misc_feature: MA Experiment 20001904 PARAMETER Experiment Name: At_Drought_Reproduction_P Parameter: Plant Line Value: WS
  misc_feature: MA Experiment 20001904 PARAMETER Experiment Name: At_Drought_Reproduction_P Parameter: Timepoint (day) Value: 7
  misc_feature: MA Experiment 20001904 PARAMETER Experiment Name: At_Drought_Reproduction_P Parameter: Tissue Value: Rosettes
  misc_feature: MA Experiment 20001904 PARAMETER Experiment Name: At_Drought_Reproduction_P Parameter: Treatment Value: Drought vs. No Drought
  misc_feature: MA Experiment ID: 20001905 Result: Down-regulated in Transcription
  misc_feature: MA Experiment 20001905 PARAMETER Experiment Name: At_Drought_Reproduction_P Parameter: Age (day) Value: 40
  misc_feature: MA Experiment 20001905 PARAMETER Experiment Name: At_Drought_Reproduction_P Parameter: Organism Value: A. thaliana
  misc_feature: MA Experiment 20001905 PARAMETER Experiment Name: At_Drought_Reproduction_P Parameter: Plant Line Value: WS
  misc_feature: MA Experiment 20001905 PARAMETER Experiment Name: At_Drought_Reproduction_P Parameter: Timepoint (day) Value: 10
  misc_feature: MA Experiment 20001905 PARAMETER Experiment Name: At_Drought_Reproduction_P Parameter: Tissue Value: Rosettes
  misc_feature: MA Experiment 20001905 PARAMETER Experiment Name: At_Drought_Reproduction_P Parameter: Treatment Value: Drought vs. No Drought

SEQ ID NO: 33778 - protein, 358 aa, Arabidopsis thaliana; identical to SEQ ID NO: 30188
  peptide (1)..(358): Ceres Seq. ID no. 12333623
  misc_feature (30)..(354): Pfam Name: Fructose-1-6-bisphosphatase Pfam Description: Fructose-1-6-bisphosphatase
  misc_feature (18)..(356): Homolog of NCBI NO: 3913640 NR Description: FRUCTOSE-1,6-BISPHOSPHATASE, CYTOSOLIC
  misc_feature (18)..(356): Homolog of NCBI NO: 6684169 NR Description: fructose-1,6-bisphosphatase [Porteresia coarctata]
  misc_feature (30)..(356): Homolog of NCBI NO: 5305145 NR Description: fructose-1,6-bisphosphatase [Pisum sativum]
  misc_feature (18)..(355): Homolog of NCBI NO: 4741918 NR Description: cytosolic fructose-1,6-bisphosphatase [Musa
  misc_feature (18)..(356): Homolog of NCBI NO: 1169586 NR Description: FRUCTOSE-1,6-BISPHOSPHATASE, CYTOSOLIC
  misc_feature (18)..(356): Homolog of NCBI NO: 20278691 NR Description: cytoplasmic fructose-1,6-bisphosphatase [Pisum
  misc_feature (18)..(356): Homolog of NCBI NO: 11139718 NR Description: cytosolic fructose-1,6-bisphosphatase [Beta
  misc_feature (18)..(356): Homolog of NCBI NO: 119748 NR Description: FRUCTOSE-1,6-BISPHOSPHATASE, CYTOSOLIC
  misc_feature (18)..(356): Homolog of NCBI NO: 1169585 NR Description: FRUCTOSE-1,6-BISPHOSPHATASE, CYTOSOLIC
  misc_feature (18)..(358): Homolog of NCBI NO: 15218438 NR Description: fructose 1,6-bisphosphatase, putative; protein

SEQ ID NO: 33779 - protein, 341 aa, Arabidopsis thaliana; identical to SEQ ID NO: 30189
  peptide (1)..(341): Ceres Seq. ID no. 12333624
  misc_feature (13)..(337): Pfam Name: Fructose-1-6-bisphosphatase Pfam Description: Fructose-1-6-bisphosphatase
  misc_feature (1)..(339): Homolog of NCBI NO: 3913640 NR Description: FRUCTOSE-1,6-BISPHOSPHATASE, CYTOSOLIC
  misc_feature (1)..(339): Homolog of NCBI NO: 6684169 NR Description: fructose-1,6-bisphosphatase [Porteresia coarctata]
  misc_feature (13)..(339): Homolog of NCBI NO: 5305145 NR Description: fructose-1,6-bisphosphatase [Pisum sativum]
  misc_feature (1)..(338): Homolog of NCBI NO: 4741918 NR Description: cytosolic fructose-1,6-bisphosphatase [Musa
  misc_feature (1)..(339): Homolog of NCBI NO: 1169586 NR Description: FRUCTOSE-1,6-BISPHOSPHATASE, CYTOSOLIC
  misc_feature (1)..(339): Homolog of NCBI NO: 20278691 NR Description: cytoplasmic fructose-1,6-bisphosphatase [Pisum
  misc_feature (1)..(339): Homolog of NCBI NO: 11139718 NR Description: cytosolic fructose-1,6-bisphosphatase [Beta
  misc_feature (1)..(339): Homolog of NCBI NO: 119748 NR Description: FRUCTOSE-1,6-BISPHOSPHATASE, CYTOSOLIC
  misc_feature (1)..(339): Homolog of NCBI NO: 1169585 NR Description: FRUCTOSE-1,6-BISPHOSPHATASE, CYTOSOLIC
  misc_feature (1)..(341): Homolog of NCBI NO: 15218438 NR Description: fructose 1,6-bisphosphatase, putative; protein

SEQ ID NO: 33780 - protein, 329 aa, Arabidopsis thaliana; identical to SEQ ID NO: 30190
  peptide (1)..(329): Ceres Seq. ID no. 12333625
  misc_feature (1)..(325): Pfam Name: Fructose-1-6-bisphosphatase Pfam Description: Fructose-1-6-bisphosphatase
  misc_feature (1)..(327): Homolog of NCBI NO: 3913640 NR Description: FRUCTOSE-1,6-BISPHOSPHATASE, CYTOSOLIC
  misc_feature (1)..(327): Homolog of NCBI NO: 6684169 NR Description: fructose-1,6-bisphosphatase [Porteresia coarctata]
  misc_feature (1)..(327): Homolog of NCBI NO: 5305145 NR Description: fructose-1,6-bisphosphatase [Pisum sativum]
  misc_feature (1)..(326): Homolog of NCBI NO: 4741918 NR Description: cytosolic fructose-1,6-bisphosphatase [Musa
  misc_feature (1)..(327): Homolog of NCBI NO: 1169586 NR Description: FRUCTOSE-1,6-BISPHOSPHATASE, CYTOSOLIC
  misc_feature (1)..(327): Homolog of NCBI NO: 20278691 NR Description: cytoplasmic fructose-1,6-bisphosphatase [Pisum
  misc_feature (1)..(327): Homolog of NCBI NO: 11139718 NR Description: cytosolic fructose-1,6-bisphosphatase [Beta
  misc_feature (1)..(327): Homolog of NCBI NO: 119748 NR Description: FRUCTOSE-1,6-BISPHOSPHATASE, CYTOSOLIC
  misc_feature (1)..(327): Homolog of NCBI NO: 1169585 NR Description: FRUCTOSE-1,6-BISPHOSPHATASE, CYTOSOLIC
  misc_feature (1)..(329): Homolog of NCBI NO: 15218438 NR Description: fructose 1,6-bisphosphatase, putative; protein

SEQ ID NO: 33781 - DNA, 765 bp, Arabidopsis thaliana; identical to SEQ ID NO: 30191
  misc_feature (1)..(765): Ceres Seq. ID no. 12333665
  misc_feature: MA Experiment ID: 108434 Result: Down-regulated in Transcription
  misc_feature: MA Experiment 108434 PARAMETER Experiment Name: At_Root_Tips_cDNA_P Parameter: Tissue Value: Root Tips
  misc_feature: MA Experiment ID: 108573 Result: Up-regulated in Transcription
  misc_feature: MA Experiment 108573 PARAMETER Experiment Name: At_Drought_cDNA_P Parameter: Timepoint (hr) Value: 6
  misc_feature: MA Experiment 108573 PARAMETER Experiment Name: At_Drought_cDNA_P Parameter: Tissue Value: Aerial
  misc_feature: MA Experiment 108573 PARAMETER Experiment Name: At_Drought_cDNA_P Parameter: Treatment Value: Drought vs. No Drought
  misc_feature: MA Experiment ID: 108574 Result: Up-regulated in Transcription
  misc_feature: MA Experiment 108574 PARAMETER Experiment Name: At_Wounding__cDNA_P Parameter: Timepoint (hr) Value: 1
  misc_feature: MA Experiment 108574 PARAMETER Experiment Name: At_Wounding__cDNA_P Parameter: Tissue Value: Aerial
  misc_feature: MA Experiment 108574 PARAMETER Experiment Name: At_Wounding__cDNA_P Parameter: Treatment Value: Wounding vs. No Wounding
  misc_feature: MA Experiment ID: 108576 Result: Up-regulated in Transcription
  misc_feature: MA Experiment 108576 PARAMETER Experiment Name: At_42deg_Heat_cDNA_P Parameter: Temperature (deg C) Value: 42 vs. 22
  misc_feature: MA Experiment 108576 PARAMETER Experiment Name: At_42deg_Heat_cDNA_P Parameter: Timepoint (hr) Value: 1
  misc_feature: MA Experiment 108576 PARAMETER Experiment Name: At_42deg_Heat_cDNA_P Parameter: Tissue Value: Aerial
  misc_feature: MA Experiment ID: 108577 Result: Up-regulated in Transcription
  misc_feature: MA Experiment 108577 PARAMETER Experiment Name: At_42deg_Heat_cDNA_P Parameter: Temperature (deg C) Value: 42 vs. 22
  misc_feature: MA Experiment 108577 PARAMETER Experiment Name: At_42deg_Heat_cDNA_P Parameter: Timepoint (hr) Value: 6
  misc_feature: MA Experiment 108577 PARAMETER Experiment Name: At_42deg_Heat_cDNA_P Parameter: Tissue Value: Aerial
  misc_feature: MA Experiment ID: 108579 Result: Up-regulated in Transcription
  misc_feature: MA Experiment 108579 PARAMETER Experiment Name: At_4deg_Cold_cDNA_P Parameter: Temperature (deg C) Value: 4 vs. 22
  misc_feature: MA Experiment 108579 PARAMETER Experiment Name: At_4deg_Cold_cDNA_P Parameter: Timepoint (hr) Value: 6
  misc_feature: MA Experiment 108579 PARAMETER Experiment Name: At_4deg_Cold_cDNA_P Parameter: Tissue Value: Aerial
  misc_feature: MA Experiment ID: 108595 Result: Up-regulated in Transcription
  misc_feature: MA Experiment 108595 PARAMETER Experiment Name: At_Ler-pi_Ovule_cDNA_P Parameter: Plant Line Value: null
  misc_feature: MA Experiment ID: 20000069 Result: Up-regulated in Transcription
  misc_feature: MA Experiment 20000069 PARAMETER Experiment Name: At_100uM_ABA_Mutants_cDNA_P Parameter: Plant Line Value: CS23
  misc_feature: MA Experiment 20000069 PARAMETER Experiment Name: At_100uM_ABA_Mutants_cDNA_P Parameter: Timepoint (hr) Value: 6
  misc_feature: MA Experiment 20000069 PARAMETER Experiment Name: At_100uM_ABA_Mutants_cDNA_P Parameter: Tissue Value: Aerial
  misc_feature: MA Experiment 20000069 PARAMETER Experiment Name: At_100uM_ABA_Mutants_cDNA_P Parameter: Treatment Value: 100uM ABA vs. No Treatment
  misc_feature: MA Experiment ID: 20000070 Result: Up-regulated in Transcription
  misc_feature: MA Experiment 20000070 PARAMETER Experiment Name: At_100uM_ABA_Mutants_cDNA_P Parameter: Plant Line Value: CS24
  misc_feature: MA Experiment 20000070 PARAMETER Experiment Name: At_100uM_ABA_Mutants_cDNA_P Parameter: Timepoint (hr) Value: 6
  misc_feature: MA Experiment 20000070 PARAMETER Experiment Name: At_100uM_ABA_Mutants_cDNA_P Parameter: Tissue Value: Aerial
  misc_feature: MA Experiment 20000070 PARAMETER Experiment Name: At_100uM_ABA_Mutants_cDNA_P Parameter: Treatment Value: 100uM ABA vs. No Treatment
  misc_feature: MA Experiment ID: 20000071 Result: Up-regulated in Transcription
  misc_feature: MA Experiment 20000071 PARAMETER Experiment Name: At_100uM_ABA_Mutants_cDNA_P Parameter: Plant Line Value: CS8104
  misc_feature: MA Experiment 20000071 PARAMETER Experiment Name: At_100uM_ABA_Mutants_cDNA_P Parameter: Timepoint (hr) Value: 6
  misc_feature: MA Experiment 20000071 PARAMETER Experiment Name: At_100uM_ABA_Mutants_cDNA_P Parameter: Tissue Value: Aerial
  misc_feature: MA Experiment 20000071 PARAMETER Experiment Name: At_100uM_ABA_Mutants_cDNA_P Parameter: Treatment Value: 100uM ABA vs. No Treatment
  misc_feature: MA Experiment ID: 20000072 Result: Up-regulated in Transcription
  misc_feature: MA Experiment 20000072 PARAMETER Experiment Name: At_100uM_ABA_Mutants_cDNA_P Parameter: Plant Line Value: CS8105
  misc_feature: MA Experiment 20000072 PARAMETER Experiment Name: At_100uM_ABA_Mutants_cDNA_P Parameter: Timepoint (hr) Value: 6
  misc_feature: MA Experiment 20000072 PARAMETER Experiment Name: At_100uM_ABA_Mutants_cDNA_P Parameter: Tissue Value: Aerial
  misc_feature: MA Experiment 20000072 PARAMETER Experiment Name: At_100uM_ABA_Mutants_cDNA_P Parameter: Treatment Value: 100uM ABA vs. No Treatment
  misc_feature: MA Experiment ID: 20000086 Result: Up-regulated in Transcription
  misc_feature: MA Experiment 20000086 PARAMETER Experiment Name: At_100uM_ABA_Mutants_cDNA_P Parameter: Plant Line Value: CS22
  misc_feature: MA Experiment 20000086 PARAMETER Experiment Name: At_100uM_ABA_Mutants_cDNA_P Parameter: Timepoint (hr) Value: 6
  misc_feature: MA Experiment 20000086 PARAMETER Experiment Name: At_100uM_ABA_Mutants_cDNA_P Parameter: Tissue Value: Aerial
  misc_feature: MA Experiment 20000086 PARAMETER Experiment Name: At_100uM_ABA_Mutants_cDNA_P Parameter: Treatment Value: 100uM ABA vs. No Treatment
  misc_feature: MA Experiment ID: 20000087 Result: Up-regulated in Transcription
  misc_feature: MA Experiment 20000087 PARAMETER Experiment Name: At_100uM_ABA_Mutants_cDNA_P Parameter: Plant Line Value: WS
  misc_feature: MA Experiment 20000087 PARAMETER Experiment Name: At_100uM_ABA_Mutants_cDNA_P Parameter: Timepoint (hr) Value: 6
  misc_feature: MA Experiment 20000087 PARAMETER Experiment Name: At_100uM_ABA_Mutants_cDNA_P Parameter: Tissue Value: Aerial
  misc_feature: MA Experiment 20000087 PARAMETER Experiment Name: At_100uM_ABA_Mutants_cDNA_P Parameter: Treatment Value: 100uM ABA vs. No Treatment
  misc_feature: MA Experiment ID: 20000089 Result: Up-regulated in Transcription
  misc_feature: MA Experiment ID: 20000093 Result: Up-regulated in Transcription
  misc_feature: MA Experiment 20000093 PARAMETER Experiment Name: At_42deg_Heat_cDNA_P Parameter: Temperature (deg C) Value: 42 vs. 22
  misc_feature: MA Experiment 20000093 PARAMETER Experiment Name: At_42deg_Heat_cDNA_P Parameter: Timepoint (hr) Value: 0.5
  misc_feature: MA Experiment 20000093 PARAMETER Experiment Name: At_42deg_Heat_cDNA_P Parameter: Tissue Value: Aerial
  misc_feature: MA Experiment ID: 20000112 Result: Up-regulated in Transcription
  misc_feature: MA Experiment 20000112 PARAMETER Experiment Name: At_42deg_Heat_cDNA_P Parameter: Temperature (deg C) Value: 42 vs. 22
  misc_feature: MA Experiment 20000112 PARAMETER Experiment Name: At_42deg_Heat_cDNA_P Parameter: Timepoint (hr) Value: 2
  misc_feature: MA Experiment 20000112 PARAMETER Experiment Name: At_42deg_Heat_cDNA_P Parameter: Tissue Value: Aerial
  misc_feature: MA Experiment ID: 20000113 Result: Up-regulated in Transcription
  misc_feature: MA Experiment 20000113 PARAMETER Experiment Name: At_42deg_Heat_cDNA_P Parameter: Temperature (deg C) Value: 42 vs. 22
  misc_feature: MA Experiment 20000113 PARAMETER Experiment Name: At_42deg_Heat_cDNA_P Parameter: Timepoint (hr) Value: 8
  misc_feature: MA Experiment 20000113 PARAMETER Experiment Name: At_42deg_Heat_cDNA_P Parameter: Tissue Value: Aerial
  misc_feature: MA Experiment ID: 20000117 Result: Up-regulated in Transcription
  misc_feature: MA Experiment 20000117 PARAMETER Experiment Name: At_100uM_ABA_Mutants_cDNA_P Parameter: Plant Line Value: Columbia
  misc_feature: MA Experiment 20000117 PARAMETER Experiment Name: At_100uM_ABA_Mutants_cDNA_P Parameter: Timepoint (hr) Value: 6
  misc_feature: MA Experiment 20000117 PARAMETER Experiment Name: At_100uM_ABA_Mutants_cDNA_P Parameter: Tissue Value: Aerial
  misc_feature: MA Experiment 20000117 PARAMETER Experiment Name: At_100uM_ABA_Mutants_cDNA_P Parameter: Treatment Value: 100uM ABA vs. No Treatment
  misc_feature: MA Experiment ID: 20000144 Result: Up-regulated in Transcription
  misc_feature: MA Experiment 20000144 PARAMETER Experiment Name: At_42deg_Heat_cDNA_P Parameter: Temperature (deg C) Value: 42 vs. 22
  misc_feature: MA Experiment 20000144 PARAMETER Experiment Name: At_42deg_Heat_cDNA_P Parameter: Timepoint (hr) Value: 1
  misc_feature: MA Experiment 20000144 PARAMETER Experiment Name: At_42deg_Heat_cDNA_P Parameter: Tissue Value: Aerial
  misc_feature: MA Experiment ID: 20000171 Result: Up-regulated in Transcription
  misc_feature: MA Experiment 20000171 PARAMETER Experiment Name: At_42deg_Heat_P Parameter: Age (day) Value: 14
  misc_feature: MA Experiment 20000171 PARAMETER Experiment Name: At_42deg_Heat_P Parameter: Organism Value: A. thaliana
  misc_feature: MA Experiment 20000171 PARAMETER Experiment Name: At_42deg_Heat_P Parameter: Plant Line Value: WS
  misc_feature: MA Experiment 20000171 PARAMETER Experiment Name: At_42deg_Heat_P Parameter: Temperature (deg C) Value: 42 vs. 22
  misc_feature: MA Experiment 20000171 PARAMETER Experiment Name: At_42deg_Heat_P Parameter: Timepoint (hr) Value: 1
  misc_feature: MA Experiment 20000171 PARAMETER Experiment Name: At_42deg_Heat_P Parameter: Tissue Value: Aerial
  misc_feature: MA Experiment ID: 20000173 Result: Up-regulated in Transcription
  misc_feature: MA Experiment 20000173 PARAMETER Experiment Name: At_42deg_Heat_P Parameter: Age (day) Value: 14
  misc_feature: MA Experiment 20000173 PARAMETER Experiment Name: At_42deg_Heat_P Parameter: Organism Value: A. thaliana
  misc_feature: MA Experiment 20000173 PARAMETER Experiment Name: At_42deg_Heat_P Parameter: Plant Line Value: WS
  misc_feature: MA Experiment 20000173 PARAMETER Experiment Name: At_42deg_Heat_P Parameter: Temperature (deg C) Value: 42 vs. 22
  misc_feature: MA Experiment 20000173 PARAMETER Experiment Name: At_42deg_Heat_P Parameter: Timepoint (hr) Value: 6
  misc_feature: MA Experiment 20000173 PARAMETER Experiment Name: At_42deg_Heat_P Parameter: Tissue Value: Aerial
  misc_feature: MA Experiment ID: 20001248 Result: Down-regulated in Transcription
  misc_feature: MA Experiment 20001248 PARAMETER Experiment Name: At_Far-red-induction_P Parameter: Age (day) Value: 7
  misc_feature: MA Experiment 20001248 PARAMETER Experiment Name: At_Far-red-induction_P Parameter: Light Value: Far-red vs. White
  misc_feature: MA Experiment 20001248 PARAMETER Experiment Name: At_Far-red-induction_P Parameter: Organism Value: A. thaliana
  misc_feature: MA Experiment 20001248 PARAMETER Experiment Name: At_Far-red-induction_P Parameter: Plant Line Value: Columbia
  misc_feature: MA Experiment 20001248 PARAMETER Experiment Name: At_Far-red-induction_P Parameter: Timepoint (hr) Value: 4
  misc_feature: MA Experiment 20001248 PARAMETER Experiment Name: At_Far-red-induction_P Parameter: Tissue Value: Whole Plant
  misc_feature: MA Experiment ID: 20001557 Result: Down-regulated in Transcription
  misc_feature: MA Experiment 20001557 PARAMETER Experiment Name: At_Drought_Soil_Dry_P Parameter: Age (day) Value: 27
  misc_feature: MA Experiment 20001557 PARAMETER Experiment Name: At_Drought_Soil_Dry_P Parameter: Organism Value: A. thaliana
  misc_feature: MA Experiment 20001557 PARAMETER Experiment Name: At_Drought_Soil_Dry_P Parameter: Plant Line Value: WS
  misc_feature: MA Experiment 20001557 PARAMETER Experiment Name: At_Drought_Soil_Dry_P Parameter: Post Timepoint (hr) Value: 3
  misc_feature: MA Experiment 20001557 PARAMETER Experiment Name: At_Drought_Soil_Dry_P Parameter: Post-Treatment Value: Re-Water vs. No Drought
  misc_feature: MA Experiment 20001557 PARAMETER Experiment Name: At_Drought_Soil_Dry_P Parameter: Timepoint (day) Value: 13
  misc_feature: MA Experiment 20001557 PARAMETER Experiment Name: At_Drought_Soil_Dry_P Parameter: Treatment Value: Drought vs. No Drought
  misc_feature: MA Experiment ID: 20001558 Result: Down-regulated in Transcription
  misc_feature: MA Experiment 20001558 PARAMETER Experiment Name: At_Drought_Soil_Dry_P Parameter: Age (day) Value: 27
  misc_feature: MA Experiment 20001558 PARAMETER Experiment Name: At_Drought_Soil_Dry_P Parameter: Organism Value: A. thaliana
  misc_feature: MA Experiment 20001558 PARAMETER Experiment Name: At_Drought_Soil_Dry_P Parameter: Plant Line Value: WS
  misc_feature: MA Experiment 20001558 PARAMETER Experiment Name: At_Drought_Soil_Dry_P Parameter: Post Timepoint (hr) Value: 6
  misc_feature: MA Experiment 20001558 PARAMETER Experiment Name: At_Drought_Soil_Dry_P Parameter: Post-Treatment Value: Re-Water vs. No Drought
  misc_feature: MA Experiment 20001558 PARAMETER Experiment Name: At_Drought_Soil_Dry_P Parameter: Timepoint (day) Value: 13
  misc_feature: MA Experiment 20001558 PARAMETER Experiment Name: At_Drought_Soil_Dry_P Parameter: Treatment Value: Drought vs. No Drought
  misc_feature: MA Experiment ID: 20001908 Result: Up-regulated in Transcription
  misc_feature: MA Experiment 20001908 PARAMETER Experiment Name: At_Drought_Reproduction_P Parameter: Age (day) Value: 40
  misc_feature: MA Experiment 20001908 PARAMETER Experiment Name: At_Drought_Reproduction_P Parameter: Organism Value: A. thaliana
  misc_feature: MA Experiment 20001908 PARAMETER Experiment Name: At_Drought_Reproduction_P Parameter: Plant Line Value: WS
  misc_feature: MA Experiment 20001908 PARAMETER Experiment Name: At_Drought_Reproduction_P Parameter: Timepoint (day) Value: 10
  misc_feature: MA Experiment 20001908 PARAMETER Experiment Name: At_Drought_Reproduction_P Parameter: Tissue Value: Siliques
  misc_feature: MA Experiment 20001908 PARAMETER Experiment Name: At_Drought_Reproduction_P Parameter: Treatment Value: Drought vs. No Drought

SEQ ID NO: 33782 - protein, 203 aa, Arabidopsis thaliana; identical to SEQ ID NO: 30192
  peptide (1)..(203): Ceres Seq. ID no. 12333666
  misc_feature (34)..(180): Pfam Name: Lipocalin / cytosolic fatty-acid binding protein family Pfam Description: Lipocalin / cytosolic fatty-acid binding
  misc_feature (25)..(185): Homolog of NCBI NO: 23058021 NR Description: hypothetical protein [Pseudomonas fluorescens
  misc_feature (21)..(172): Homolog of NCBI NO: 21231866 NR Description: outer membrane lipoprotein
  misc_feature (18)..(178): Homolog of NCBI NO: 21233298 NR Description: outer membrane lipoprotein Blc
  misc_feature (14)..(172): Homolog of NCBI NO: 13474785 NR Description: outer membrane lipoprotein [Mesorhizobium loti]
  misc_feature (21)..(172): Homolog of NCBI NO: 21243293 NR Description: outer membrane lipoprotein Blc
  misc_feature (13)..(172): Homolog of NCBI NO: 13473955 NR Description: outer membrane lipoprotein [Mesorhizobium loti]
  misc_feature (18)..(178): Homolog of NCBI NO: 21244675 NR Description: outer membrane lipoprotein Blc
  misc_feature (18)..(203): Homolog of NCBI NO: 18650668 NR Description: temperature stress-induced lipocalin [Triticum
  misc_feature (24)..(203): Homolog of NCBI NO: 21553811 NR Description: outer membrane lipoprotein-like [Arabidopsis
  misc_feature (18)..(203): Homolog of NCBI NO: 15242942 NR Description: outer membrane lipoprotein - like

SEQ ID NO: 33783 - protein, 186 aa, Arabidopsis thaliana; identical to SEQ ID NO: 30193
  peptide (1)..(186): Ceres Seq. ID no. 12333667
  misc_feature (17)..(163): Pfam Name: Lipocalin / cytosolic fatty-acid binding protein family Pfam Description: Lipocalin / cytosolic fatty-acid binding
  misc_feature (8)..(168): Homolog of NCBI NO: 23058021 NR Description: hypothetical protein [Pseudomonas fluorescens
  misc_feature (4)..(155): Homolog of NCBI NO: 21231866 NR Description: outer membrane lipoprotein
  misc_feature (1)..(161): Homolog of NCBI NO: 21233298 NR Description: outer membrane lipoprotein Blc
  misc_feature (1)..(155): Homolog of NCBI NO: 13474785 NR Description: outer membrane lipoprotein [Mesorhizobium loti]
  misc_feature (4)..(155): Homolog of NCBI NO: 21243293 NR Description: outer membrane lipoprotein Blc
  misc_feature (1)..(155): Homolog of NCBI NO: 13473955 NR Description: outer membrane lipoprotein [Mesorhizobium loti]
  misc_feature (1)..(161): Homolog of NCBI NO: 21244675 NR Description: outer membrane lipoprotein Blc
  misc_feature (1)..(186): Homolog of NCBI NO: 18650668 NR Description: temperature stress-induced lipocalin [Triticum
  misc_feature (7)..(186): Homolog of NCBI NO: 21553811 NR Description: outer membrane lipoprotein-like [Arabidopsis
  misc_feature (1)..(186): Homolog of NCBI NO: 15242942 NR Description: outer membrane lipoprotein - like

SEQ ID NO: 33784 - protein, 180 aa, Arabidopsis thaliana; identical to SEQ ID NO: 30194
  peptide (1)..(180): Ceres Seq. ID no. 12333668
  misc_feature (11)..(157): Pfam Name: Lipocalin / cytosolic fatty-acid binding protein family Pfam Description: Lipocalin / cytosolic fatty-acid binding
  misc_feature (2)..(162): Homolog of NCBI NO: 23058021 NR Description: hypothetical protein [Pseudomonas fluorescens
  misc_feature (1)..(149): Homolog of NCBI NO: 21231866 NR Description: outer membrane lipoprotein
  misc_feature (1)..(155): Homolog of NCBI NO: 21233298 NR Description: outer membrane lipoprotein Blc
  misc_feature (1)..(149): Homolog of NCBI NO: 13474785 NR Description: outer membrane lipoprotein [Mesorhizobium loti]
  misc_feature (1)..(149): Homolog of NCBI NO: 21243293 NR Description: outer membrane lipoprotein Blc
  misc_feature (1)..(149): Homolog of NCBI NO: 13473955 NR Description: outer membrane lipoprotein [Mesorhizobium loti]
  misc_feature (1)..(155): Homolog of NCBI NO: 21244675 NR Description: outer membrane lipoprotein Blc
  misc_feature (1)..(180): Homolog of NCBI NO: 18650668 NR Description: temperature stress-induced lipocalin [Triticum
  misc_feature (1)..(180): Homolog of NCBI NO: 21553811 NR Description: outer membrane lipoprotein-like [Arabidopsis
  misc_feature (1)..(180): Homolog of NCBI NO: 15242942 NR Description: outer membrane lipoprotein - like

SEQ ID NO: 33785 - DNA, 1364 bp, Arabidopsis thaliana; identical to SEQ ID NO: 30195
  misc_feature (1)..(1364): Ceres Seq. ID no. 12335499
  misc_feature: MA Experiment ID: 108573 Result: Up-regulated in Transcription
  misc_feature: MA Experiment 108573 PARAMETER Experiment Name: At_Drought_cDNA_P Parameter: Timepoint (hr) Value: 6
  misc_feature: MA Experiment 108573 PARAMETER Experiment Name: At_Drought_cDNA_P Parameter: Tissue Value: Aerial
  misc_feature: MA Experiment 108573 PARAMETER Experiment Name: At_Drought_cDNA_P Parameter: Treatment Value: Drought vs. No Drought
  misc_feature: MA Experiment ID: 20000235 Result: Down-regulated in Transcription
  misc_feature: MA Experiment 20000235 PARAMETER Experiment Name: At_Siliques_P Parameter: Age (day) Value: 21
  misc_feature: MA Experiment 20000235 PARAMETER Experiment Name: At_Siliques_P Parameter: Organism Value: A. thaliana
  misc_feature: MA Experiment 20000235 PARAMETER Experiment Name: At_Siliques_P Parameter: Plant Line Value: WS
  misc_feature: MA Experiment 20000235 PARAMETER Experiment Name: At_Siliques_P Parameter: Tissue Value: 5-10mm Siliques vs. Whole Plant
  misc_feature: MA Experiment ID: 20000495 Result: Up-regulated in Transcription
  misc_feature: MA Experiment 20000495 PARAMETER Experiment Name: At_Guard_Cells_P Parameter: Harvest Date Value: 8/2/2002
  misc_feature: MA Experiment 20000495 PARAMETER Experiment Name: At_Guard_Cells_P Parameter: Organism Value: A. thaliana
  misc_feature: MA Experiment 20000495 PARAMETER Experiment Name: At_Guard_Cells_P Parameter: Tissue Value: Guard Cells vs. Leaves
  misc_feature: MA Experiment ID: 20000496 Result: Up-regulated in Transcription
  misc_feature: MA Experiment 20000496 PARAMETER Experiment Name: At_Guard_Cells_P Parameter: Harvest Date Value: 7/19/2002
  misc_feature: MA Experiment 20000496 PARAMETER Experiment Name: At_Guard_Cells_P Parameter: Organism Value: Canola
  misc_feature: MA Experiment 20000496 PARAMETER Experiment Name: At_Guard_Cells_P Parameter: Tissue Value: Guard Cells vs. Leaves
  misc_feature: MA Experiment ID: 20001451 Result: Up-regulated in Transcription
  misc_feature: MA Experiment 20001451 PARAMETER Experiment Name: At_Far-red-induction_P Parameter: Age (day) Value: 7
  misc_feature: MA Experiment 20001451 PARAMETER Experiment Name: At_Far-red-induction_P Parameter: Light Value: Far-red vs. White
  misc_feature: MA Experiment 20001451 PARAMETER Experiment Name: At_Far-red-induction_P Parameter: Organism Value: A. thaliana
  misc_feature: MA Experiment 20001451 PARAMETER Experiment Name: At_Far-red-induction_P Parameter: Plant Line Value: Columbia
  misc_feature: MA Experiment 20001451 PARAMETER Experiment Name: At_Far-red-induction_P Parameter: Timepoint (hr) Value: 24
  misc_feature: MA Experiment 20001451 PARAMETER Experiment Name: At_Far-red-induction_P Parameter: Tissue Value: Whole Plant

SEQ ID NO: 33786 - protein, 177 aa, Arabidopsis thaliana; identical to SEQ ID NO: 30196
  peptide (1)..(177): Ceres Seq. ID no. 12335500
  misc_feature (3)..(98): Pfam Name: TB2/DP1, HVA22 family Pfam Description: TB2/DP1, HVA22 family
  misc_feature (1)..(146): Homolog of NCBI NO: 21671921 NR Description: Putative protein with HVA22 domain
  misc_feature (12)..(156): Homolog of NCBI NO: 15222332 NR Description: hypothetical protein; protein id: At1g75700.1
  misc_feature (1)..(151): Homolog of NCBI NO: 20502988 NR Description: Putative InsB from Escherichia coli
  misc_feature (1)..(146): Homolog of NCBI NO: 37531658 NR Description: putative Magnaporthe grisea pathogenicity protein
  misc_feature (12)..(160): Homolog of NCBI NO: 25513732 NR Description: T20H2.26 protein - Arabidopsis thaliana
  misc_feature (1)..(160): Homolog of NCBI NO: 21553483 NR Description: pathogenicity protein PATH531-like protein
  misc_feature (1)..(160): Homolog of NCBI NO: 18394805 NR Description: expressed protein
  misc_feature (1)..(173): Homolog of NCBI NO: 21553813 NR Description: unknown [Arabidopsis thaliana]
  misc_feature (1)..(173): Homolog of NCBI NO: 18422223 NR Description: expressed protein
  misc_feature (12)..(173): Homolog of NCBI NO: 9759014 NR Description: gene_id:K16E1.3~unknown protein [Arabidopsis

SEQ ID NO: 33787 - protein, 167 aa, Arabidopsis thaliana; identical to SEQ ID NO: 30197
  peptide (1)..(167): Ceres Seq. ID no. 12335501
  misc_feature (69)..(160): Homolog of NCBI NO: 37531658 NR Description: putative Magnaporthe grisea pathogenicity protein
  misc_feature (39)..(163): Homolog of NCBI NO: 25513732 NR Description: T20H2.26 protein - Arabidopsis thaliana
  misc_feature (39)..(163): Homolog of NCBI NO: 21553483 NR Description: pathogenicity protein PATH531-like protein
  misc_feature (39)..(163): Homolog of NCBI NO: 18394805 NR Description: expressed protein
  misc_feature (39)..(167): Homolog of NCBI NO: 21553813 NR Description: unknown [Arabidopsis thaliana]
  misc_feature (39)..(167): Homolog of NCBI NO: 18422223 NR Description: expressed protein
  misc_feature (39)..(167): Homolog of NCBI NO: 9759014 NR Description: gene_id:K16E1.3~unknown protein [Arabidopsis

SEQ ID NO: 33788 - protein, 166 aa, Arabidopsis thaliana; identical to SEQ ID NO: 30198
  peptide (1)..(166): Ceres Seq. ID no. 12335502
  misc_feature (1)..(87): Pfam Name: TB2/DP1, HVA22 family Pfam Description: TB2/DP1, HVA22 family
  misc_feature (1)..(135): Homolog of NCBI NO: 21671921 NR Description: Putative protein with HVA22 domain
  misc_feature (1)..(145): Homolog of NCBI NO: 15222332 NR Description: hypothetical protein; protein id: At1g75700.1
  misc_feature (1)..(140): Homolog of NCBI NO: 20502988 NR Description: Putative InsB from Escherichia coli
  misc_feature (1)..(135): Homolog of NCBI NO: 37531658 NR Description: putative Magnaporthe grisea pathogenicity protein
  misc_feature (1)..(149): Homolog of NCBI NO: 25513732 NR Description: T20H2.26 protein - Arabidopsis thaliana
  misc_feature (1)..(149): Homolog of NCBI NO: 21553483 NR Description: pathogenicity protein PATH531-like protein
  misc_feature (1)..(149): Homolog of NCBI NO: 18394805 NR Description: expressed protein
  misc_feature (1)..(162): Homolog of NCBI NO: 21553813 NR Description: unknown [Arabidopsis thaliana]
  misc_feature (1)..(162): Homolog of NCBI NO: 18422223 NR Description: expressed protein
  misc_feature (1)..(162): Homolog of NCBI NO: 9759014 NR Description: gene_id:K16E1.3~unknown protein [Arabidopsis

SEQ ID NO: 33789 - DNA, 1355 bp, Arabidopsis thaliana; identical to SEQ ID NO: 30199
  misc_feature (1)..(1355): Ceres Seq. ID no. 12325051
  misc_feature: MA Experiment ID: 108573 Result: Up-regulated in Transcription
  misc_feature: MA Experiment 108573 PARAMETER Experiment Name: At_Drought_cDNA_P Parameter: Timepoint (hr) Value: 6
  misc_feature: MA Experiment 108573 PARAMETER Experiment Name: At_Drought_cDNA_P Parameter: Tissue Value: Aerial
  misc_feature: MA Experiment 108573 PARAMETER Experiment Name: At_Drought_cDNA_P Parameter: Treatment Value: Drought vs. No Drought
  misc_feature: MA Experiment ID: 20000173 Result: Down-regulated in Transcription
  misc_feature: MA Experiment 20000173 PARAMETER Experiment Name: At_42deg_Heat_P Parameter: Age (day) Value: 14
  misc_feature: MA Experiment 20000173 PARAMETER Experiment Name: At_42deg_Heat_P Parameter: Organism Value: A. thaliana
  misc_feature: MA Experiment 20000173 PARAMETER Experiment Name: At_42deg_Heat_P Parameter: Plant Line Value: WS
  misc_feature: MA Experiment 20000173 PARAMETER Experiment Name: At_42deg_Heat_P Parameter: Temperature (deg C) Value: 42 vs. 22
  misc_feature: MA Experiment 20000173 PARAMETER Experiment Name: At_42deg_Heat_P Parameter: Timepoint (hr) Value: 6
  misc_feature: MA Experiment 20000173 PARAMETER Experiment Name: At_42deg_Heat_P Parameter: Tissue Value: Aerial
  misc_feature: MA Experiment ID: 20000185 Result: Up-regulated in Transcription
  misc_feature: MA Experiment 20000185 PARAMETER Experiment Name: At_Roots__P Parameter: Age (day) Value: 7 vs. 21
  misc_feature: MA Experiment 20000185 PARAMETER Experiment Name: At_Roots__P Parameter: Organism Value: A. thaliana
  misc_feature: MA Experiment 20000185 PARAMETER Experiment Name: At_Roots__P Parameter: Tissue Value: Roots vs. Whole Plant
  misc_feature: MA Experiment ID: 20000227 Result: Down-regulated in Transcription
  misc_feature: MA Experiment 20000227 PARAMETER Experiment Name: At_Root-Tips-vs-Tops_P Parameter: Tissue Value: Root Tips vs. Root Tops
  misc_feature: MA Experiment ID: 20000439 Result: Up-regulated in Transcription
  misc_feature: MA Experiment 20000439 PARAMETER Experiment Name: At_Roots__P Parameter: Age (day) Value: 14 vs. 21
  misc_feature: MA Experiment 20000439 PARAMETER Experiment Name: At_Roots__P Parameter: Organism Value: A. thaliana
  misc_feature: MA Experiment 20000439 PARAMETER Experiment Name: At_Roots__P Parameter: Tissue Value: Roots vs. Whole Plant
  misc_feature: MA Experiment ID: 20000794 Result: Up-regulated in Transcription
  misc_feature: MA Experiment 20000794 PARAMETER Experiment Name: At_Petals_P Parameter: Age (day) Value: 23-25 days
  misc_feature: MA Experiment 20000794 PARAMETER Experiment Name: At_Petals_P Parameter: Plant Line Value: WS
  misc_feature: MA Experiment 20000794 PARAMETER Experiment Name: At_Petals_P Parameter: Tissue Value: Petals vs. Whole plant
  misc_feature: MA Experiment ID: 20001905 Result: Up-regulated in Transcription
  misc_feature: MA Experiment 20001905 PARAMETER Experiment Name: At_Drought_Reproduction_P Parameter: Age (day) Value: 40
  misc_feature: MA Experiment 20001905 PARAMETER Experiment Name: At_Drought_Reproduction_P Parameter: Organism Value: A. thaliana
  misc_feature: MA Experiment 20001905 PARAMETER Experiment Name: At_Drought_Reproduction_P Parameter: Plant Line Value: WS
  misc_feature: MA Experiment 20001905 PARAMETER Experiment Name: At_Drought_Reproduction_P Parameter: Timepoint (day) Value: 10
  misc_feature: MA Experiment 20001905 PARAMETER Experiment Name: At_Drought_Reproduction_P Parameter: Tissue Value: Rosettes
  misc_feature: MA Experiment 20001905 PARAMETER Experiment Name: At_Drought_Reproduction_P Parameter: Treatment Value: Drought vs. No Drought

SEQ ID NO: 33790 - protein, 320 aa, Arabidopsis thaliana; identical to SEQ ID NO: 30200
  peptide (1)..(320): Ceres Seq. ID no. 12325052
  misc_feature (34)..(128): Homolog of NCBI NO: 6631104 NR Description: etoposide-induced mRNA [Homo sapiens]
  misc_feature (154)..(271): Homolog of NCBI NO: 6631104 NR Description: etoposide-induced mRNA [Homo sapiens]
  misc_feature (34)..(128): Homolog of NCBI NO: 30585325 NR Description: Homo sapiens etoposide-induced mRNA [synthetic
  misc_feature (154)..(271): Homolog of NCBI NO: 30585325 NR Description: Homo sapiens etoposide-induced mRNA [synthetic
  misc_feature (34)..(128): Homolog of NCBI NO: 12803171 NR Description: Similar to etoposide-induced mRNA [Homo sapiens]
  misc_feature (154)..(271): Homolog of NCBI NO: 12803171 NR Description: Similar to etoposide-induced mRNA [Homo sapiens]
  misc_feature (34)..(128): Homolog of NCBI NO: 34863067 NR Description: similar to EI24 [Rattus norvegicus]
  misc_feature (154)..(271): Homolog of NCBI NO: 34863067 NR Description: similar to EI24 [Rattus norvegicus]
  misc_feature (1)..(52): Homolog of NCBI NO: 30680261 NR Description: predicted protein [Arabidopsis thaliana]
  misc_feature (119)..(213): Homolog of NCBI NO: 30680261 NR Description: predicted protein [Arabidopsis thaliana]

SEQ ID NO: 33791 - protein, 212 aa, Arabidopsis thaliana; identical to SEQ ID NO: 30201
  peptide (1)..(212): Ceres Seq. ID no. 12325053
  misc_feature (46)..(163): Homolog of NCBI NO: 6681289 NR Description: etoposide induced 2.4 mRNA [Mus musculus]
  misc_feature (1)..(20): Homolog of NCBI NO: 6631104 NR Description: etoposide-induced mRNA [Homo sapiens]
  misc_feature (46)..(163): Homolog of NCBI NO: 6631104 NR Description: etoposide-induced mRNA [Homo sapiens]
  misc_feature (1)..(20): Homolog of NCBI NO: 30585325 NR Description: Homo sapiens etoposide-induced mRNA [synthetic
  misc_feature (46)..(163): Homolog of NCBI NO: 30585325 NR Description: Homo sapiens etoposide-induced mRNA [synthetic
  misc_feature (1)..(20): Homolog of NCBI NO: 12803171 NR Description: Similar to etoposide-induced mRNA [Homo sapiens]
  misc_feature (46)..(163): Homolog of NCBI NO: 12803171 NR Description: Similar to etoposide-induced mRNA [Homo sapiens]
  misc_feature (1)..(20): Homolog of NCBI NO: 34863067 NR Description: similar to EI24 [Rattus norvegicus]
  misc_feature (46)..(163): Homolog of NCBI NO: 34863067 NR Description: similar to EI24 [Rattus norvegicus]
  misc_feature (11)..(105): Homolog of NCBI NO: 30680261 NR Description: predicted protein [Arabidopsis thaliana]

SEQ ID NO: 33792 - protein, 169 aa, Arabidopsis thaliana; identical to SEQ ID NO: 30202
  peptide (1)..(169): Ceres Seq. ID no. 12325054
  misc_feature (40)..(120): Homolog of NCBI NO: 17553308 NR Description: Etoposide-induced mRNA like (36.6 kD)
  misc_feature (1)..(126): Homolog of NCBI NO: 31223768 NR Description: ENSANGP00000010382 [Anopheles gambiae]
  misc_feature (1)..(125): Homolog of NCBI NO: 19920698 NR Description: CG15626-PA [Drosophila melanogaster]
  misc_feature (3)..(120): Homolog of NCBI NO: 6681289 NR Description: etoposide induced 2.4 mRNA [Mus musculus]
  misc_feature (3)..(120): Homolog of NCBI NO: 6631104 NR Description: etoposide-induced mRNA [Homo sapiens]
  misc_feature (3)..(120): Homolog of NCBI NO: 30585325 NR Description: Homo sapiens etoposide-induced mRNA [synthetic
  misc_feature (3)..(120): Homolog of NCBI NO: 12803171 NR Description: Similar to etoposide-induced mRNA [Homo sapiens]
  misc_feature (3)..(120): Homolog of NCBI NO: 34863067 NR Description: similar to EI24 [Rattus norvegicus]
  misc_feature (1)..(62): Homolog of NCBI NO: 30680261 NR Description: predicted protein [Arabidopsis thaliana]

SEQ ID NO: 33793 - DNA, 994 bp, Arabidopsis thaliana; identical to SEQ ID NO: 30203
  misc_feature (1)..(994): Ceres Seq. ID no. 13500011
  misc_feature: MA Experiment ID: 108434 Result: Up-regulated in Transcription
  misc_feature: MA Experiment 108434 PARAMETER Experiment Name: At_Root_Tips_cDNA_P Parameter: Tissue Value: Root Tips
  misc_feature: MA Experiment ID: 108435 Result: Up-regulated in Transcription
  misc_feature: MA Experiment 108435 PARAMETER Experiment Name: At_stm_Mutants_cDNA_P Parameter: Plant Line Value: wt Landsburg vs stm
  misc_feature: MA Experiment 108435 PARAMETER Experiment Name: At_stm_Mutants_cDNA_P Parameter: Tissue Value: Shoot Apical Meristem Region
  misc_feature: MA Experiment ID: 108461 Result: Up-regulated in Transcription
  misc_feature: MA Experiment 108461 PARAMETER Experiment Name: At_Germinating_Seeds_cDNA_P Parameter: Age (day) Value: 1 vs. 0
  misc_feature: MA Experiment 108461 PARAMETER Experiment Name: At_Germinating_Seeds_cDNA_P Parameter: Tissue Value: Germinating Seeds
  misc_feature: MA Experiment ID: 108462 Result: Down-regulated in Transcription
  misc_feature: MA Experiment 108462 PARAMETER Experiment Name: At_Germinating_Seeds_cDNA_P Parameter: Age (day) Value: 2 vs. 0
  misc_feature: MA Experiment 108462 PARAMETER Experiment Name: At_Germinating_Seeds_cDNA_P Parameter: Tissue Value: Germinating Seeds
  misc_feature: MA Experiment ID: 108463 Result: Down-regulated in Transcription
  misc_feature: MA Experiment 108463 PARAMETER Experiment Name: At_Germinating_Seeds_cDNA_P Parameter: Age (day) Value: 3 vs. 0
  misc_feature: MA Experiment 108463 PARAMETER Experiment Name: At_Germinating_Seeds_cDNA_P Parameter: Tissue Value: Germinating Seeds
  misc_feature: MA Experiment ID: 108464 Result: Down-regulated in Transcription
  misc_feature: MA Experiment 108464 PARAMETER Experiment Name: At_Germinating_Seeds_cDNA_P Parameter: Age (day) Value: 4 vs. 0
  misc_feature: MA Experiment 108464 PARAMETER Experiment Name: At_Germinating_Seeds_cDNA_P Parameter: Tissue Value: Germinating Seeds
  misc_feature: MA Experiment ID: 108501 Result: Up-regulated in Transcription
  misc_feature: MA Experiment 108501 PARAMETER Experiment Name: At_ap2_floral_buds_cDNA_P Parameter: Plant Line Value: ap2 (Ler.)
  misc_feature: MA Experiment 108501 PARAMETER Experiment Name: At_ap2_floral_buds_cDNA_P Parameter: Tissue Value: Closed Flower
  misc_feature: MA Experiment ID: 108595 Result: Up-regulated in Transcription
  misc_feature: MA Experiment 108595 PARAMETER Experiment Name: At_Ler-pi_Ovule_cDNA_P Parameter: Plant Line Value: null
  misc_feature: MA Experiment ID: 20000171 Result: Down-regulated in Transcription
  misc_feature: MA Experiment 20000171 PARAMETER Experiment Name: At_42deg_Heat_P Parameter: Age (day) Value: 14
  misc_feature: MA Experiment 20000171 PARAMETER Experiment Name: At_42deg_Heat_P Parameter: Organism Value: A. thaliana
  misc_feature: MA Experiment 20000171 PARAMETER Experiment Name: At_42deg_Heat_P Parameter: Plant Line Value: WS
  misc_feature: MA Experiment 20000171 PARAMETER Experiment Name: At_42deg_Heat_P Parameter: Temperature (deg C) Value: 42 vs. 22
  misc_feature: MA Experiment 20000171 PARAMETER Experiment Name: At_42deg_Heat_P Parameter: Timepoint (hr) Value: 1
  misc_feature: MA Experiment 20000171 PARAMETER Experiment Name: At_42deg_Heat_P Parameter: Tissue Value: Aerial
  misc_feature: MA Experiment ID: 20000173 Result: Down-regulated in Transcription
  misc_feature: MA Experiment 20000173 PARAMETER Experiment Name: At_42deg_Heat_P Parameter: Age (day) Value: 14
  misc_feature: MA Experiment 20000173 PARAMETER Experiment Name: At_42deg_Heat_P Parameter: Organism Value: A. thaliana
  misc_feature: MA Experiment 20000173 PARAMETER Experiment Name: At_42deg_Heat_P Parameter: Plant Line Value: WS
  misc_feature: MA Experiment 20000173 PARAMETER Experiment Name: At_42deg_Heat_P Parameter: Temperature (deg C) Value: 42 vs. 22
  misc_feature: MA Experiment 20000173 PARAMETER Experiment Name: At_42deg_Heat_P Parameter: Timepoint (hr) Value: 6
  misc_feature: MA Experiment 20000173 PARAMETER Experiment Name: At_42deg_Heat_P Parameter: Tissue Value: Aerial
  misc_feature: MA Experiment ID: 20000179 Result: Up-regulated in Transcription
  misc_feature: MA Experiment 20000179 PARAMETER Experiment Name: At_Germinating_Seeds_P Parameter: Age (hr) Value: 6 vs. 0
  misc_feature: MA Experiment 20000179 PARAMETER Experiment Name: At_Germinating_Seeds_P Parameter: Tissue Value: Germinating Seeds
  misc_feature: MA Experiment ID: 20000180 Result: Up-regulated in Transcription
  misc_feature: MA Experiment 20000180 PARAMETER Experiment Name: At_Germinating_Seeds_P Parameter: Age (hr) Value: 24 vs. 0
  misc_feature: MA Experiment 20000180 PARAMETER Experiment Name: At_Germinating_Seeds_P Parameter: Tissue Value: Germinating Seeds
  misc_feature: MA Experiment ID: 20000184 Result: Up-regulated in Transcription
  misc_feature: MA Experiment 20000184 PARAMETER Experiment Name: At_Shoots__P Parameter: Age (day) Value: 7
  misc_feature: MA Experiment 20000184 PARAMETER Experiment Name: At_Shoots__P Parameter: Tissue Value: Shoots vs. Whole Plant
  misc_feature: MA Experiment ID: 20000185 Result: Up-regulated in Transcription
  misc_feature: MA Experiment 20000185 PARAMETER Experiment Name: At_Roots__P Parameter: Age (day) Value: 7 vs. 21
  misc_feature: MA Experiment 20000185 PARAMETER Experiment Name: At_Roots__P Parameter: Organism Value: A. thaliana
  misc_feature: MA Experiment 20000185 PARAMETER Experiment Name: At_Roots__P Parameter: Tissue Value: Roots vs. Whole Plant
  misc_feature: MA Experiment ID: 20000227 Result: Up-regulated in Transcription
  misc_feature: MA Experiment 20000227 PARAMETER Experiment Name: At_Root-Tips-vs-Tops_P Parameter: Tissue Value: Root Tips vs. Root Tops
  misc_feature: MA Experiment ID: 20000234 Result: Up-regulated in Transcription
  misc_feature: MA Experiment 20000234 PARAMETER Experiment Name: At_Siliques_P Parameter: Age (day) Value: 21
  misc_feature: MA Experiment 20000234 PARAMETER Experiment Name: At_Siliques_P Parameter: Organism Value: A. thaliana
  misc_feature: MA Experiment 20000234 PARAMETER Experiment Name: At_Siliques_P Parameter: Plant Line Value: WS
  misc_feature: MA Experiment 20000234 PARAMETER Experiment Name: At_Siliques_P Parameter: Tissue Value: Less Than 5mm Siliques vs. Whole Plant
  misc_feature: MA Experiment ID: 20000235 Result: Up-regulated in Transcription
  misc_feature: MA Experiment 20000235 PARAMETER Experiment Name: At_Siliques_P Parameter: Age (day) Value: 21
  misc_feature: MA Experiment 20000235 PARAMETER Experiment Name: At_Siliques_P Parameter: Organism Value: A. thaliana
  misc_feature: MA Experiment 20000235 PARAMETER Experiment Name: At_Siliques_P Parameter: Plant Line Value: WS
  misc_feature: MA Experiment 20000235 PARAMETER Experiment Name: At_Siliques_P Parameter: Tissue Value: 5-10mm Siliques vs. Whole Plant
  misc_feature: MA Experiment ID: 20000264 Result: Up-regulated in Transcription
  misc_feature: MA Experiment 20000264 PARAMETER Experiment Name: At_Open_Flower_P Parameter: Age (day) Value: 21
  misc_feature: MA Experiment 20000264 PARAMETER Experiment Name: At_Open_Flower_P Parameter: Plant Line Value: WS
  misc_feature: MA Experiment 20000264 PARAMETER Experiment Name: At_Open_Flower_P Parameter: Tissue Value: Open Flower vs. Whole Plant
  misc_feature: MA Experiment ID: 20000265 Result: Up-regulated in Transcription
  misc_feature: MA Experiment 20000265 PARAMETER Experiment Name: At_Open_Flower_P Parameter: Age (day) Value: 21
  misc_feature: MA Experiment 20000265 PARAMETER Experiment Name: At_Open_Flower_P Parameter: Plant Line Value: WS
  misc_feature: MA Experiment 20000265 PARAMETER Experiment Name: At_Open_Flower_P Parameter: Tissue Value: Closed Flower vs. Whole Plant
  misc_feature: MA Experiment ID: 20000286 Result: Up-regulated in Transcription
  misc_feature: MA Experiment 20000286 PARAMETER Experiment Name: At_Open_Flower_P Parameter: Age (day) Value: 21
  misc_feature: MA Experiment 20000286 PARAMETER Experiment Name: At_Open_Flower_P Parameter: Plant Line Value: WS
  misc_feature: MA Experiment 20000286 PARAMETER Experiment Name: At_Open_Flower_P Parameter: Tissue Value: Half Open vs. Whole Plant
  misc_feature: MA Experiment ID: 20000436 Result: Down-regulated in Transcription
  misc_feature: MA Experiment 20000436 PARAMETER Experiment Name: At_Drought_P Parameter: Age (day) Value: 7
  misc_feature: MA Experiment 20000436 PARAMETER Experiment Name: At_Drought_P Parameter: Organism Value: A. thaliana
  misc_feature: MA Experiment 20000436 PARAMETER Experiment Name: At_Drought_P Parameter: Plant Line Value: WS
  misc_feature: MA Experiment 20000436 PARAMETER Experiment Name: At_Drought_P Parameter: Timepoint (hr) Value: 12
  misc_feature: MA Experiment 20000436 PARAMETER Experiment Name: At_Drought_P Parameter: Tissue Value: Whole Plant
  misc_feature: MA Experiment 20000436 PARAMETER Experiment Name: At_Drought_P Parameter: Treatment Value: Drought vs. No Drought
  misc_feature: MA Experiment ID: 20000437 Result: Down-regulated in Transcription
  misc_feature: MA Experiment 20000437 PARAMETER Experiment Name: At_Drought_P Parameter: Age (day) Value: 8
  misc_feature: MA Experiment 20000437 PARAMETER Experiment Name: At_Drought_P Parameter: Organism Value: A. thaliana
  misc_feature: MA Experiment 20000437 PARAMETER Experiment Name: At_Drought_P Parameter: Plant Line Value: WS
  misc_feature: MA Experiment 20000437 PARAMETER Experiment Name: At_Drought_P Parameter: Timepoint (hr) Value: 24
  misc_feature: MA Experiment 20000437 PARAMETER Experiment Name: At_Drought_P Parameter: Tissue Value: Whole Plant
  misc_feature: MA Experiment 20000437 PARAMETER Experiment Name: At_Drought_P Parameter: Treatment Value: Drought vs. No Drought
  misc_feature: MA Experiment ID: 20000439 Result: Up-regulated in Transcription
  misc_feature: MA Experiment 20000439 PARAMETER Experiment Name: At_Roots__P Parameter: Age (day) Value: 14 vs. 21
  misc_feature: MA Experiment 20000439 PARAMETER Experiment Name: At_Roots__P Parameter: Organism Value: A. thaliana
  misc_feature: MA Experiment 20000439 PARAMETER Experiment Name: At_Roots__P Parameter: Tissue Value: Roots vs. Whole Plant
  misc_feature: MA Experiment ID: 20000453 Result: Down-regulated in Transcription
  misc_feature: MA Experiment 20000453 PARAMETER Experiment Name: At_100uM_ABA_P Parameter: Age (day) Value: 15
  misc_feature: MA Experiment 20000453 PARAMETER Experiment Name: At_100uM_ABA_P Parameter: Organism Value: A. thaliana
  misc_feature: MA Experiment 20000453 PARAMETER Experiment Name: At_100uM_ABA_P Parameter: Plant Line Value: WS
  misc_feature: MA Experiment 20000453 PARAMETER Experiment Name: At_100uM_ABA_P Parameter: Timepoint (hr) Value: 24
  misc_feature: MA Experiment 20000453 PARAMETER Experiment Name: At_100uM_ABA_P Parameter: Tissue Value: Aerial
  misc_feature: MA Experiment 20000453 PARAMETER Experiment Name: At_100uM_ABA_P Parameter: Treatment Value: 100uM ABA vs. No Treatment
  misc_feature: MA Experiment ID: 20000495 Result: Up-regulated in Transcription
  misc_feature: MA Experiment 20000495 PARAMETER Experiment Name: At_Guard_Cells_P Parameter: Harvest Date Value: 8/2/2002
  misc_feature: MA Experiment 20000495 PARAMETER Experiment Name: At_Guard_Cells_P Parameter: Organism Value: A. thaliana
  misc_feature: MA Experiment 20000495 PARAMETER Experiment Name: At_Guard_Cells_P Parameter: Tissue Value: Guard Cells vs. Leaves
  misc_feature: MA Experiment ID: 20000496 Result: Up-regulated in Transcription
  misc_feature: MA Experiment 20000496 PARAMETER Experiment Name: At_Guard_Cells_P Parameter: Harvest Date Value: 7/19/2002
  misc_feature: MA Experiment 20000496 PARAMETER Experiment Name: At_Guard_Cells_P Parameter: Organism Value: Canola
  misc_feature: MA Experiment 20000496 PARAMETER Experiment Name: At_Guard_Cells_P Parameter: Tissue Value: Guard Cells vs. Leaves
  misc_feature: MA Experiment ID: 20001247 Result: Down-regulated in Transcription
  misc_feature: MA Experiment 20001247 PARAMETER Experiment Name: At_Far-red-induction_P Parameter: Age (day) Value: 7
  misc_feature: MA Experiment 20001247 PARAMETER Experiment Name: At_Far-red-induction_P Parameter: Light Value: Far-red vs. White
  misc_feature: MA Experiment 20001247 PARAMETER Experiment Name: At_Far-red-induction_P Parameter: Organism Value: A. thaliana
  misc_feature: MA Experiment 20001247 PARAMETER Experiment Name: At_Far-red-induction_P Parameter: Plant Line Value: Columbia
  misc_feature: MA Experiment 20001247 PARAMETER Experiment Name: At_Far-red-induction_P Parameter: Timepoint (hr) Value: 1
  misc_feature: MA Experiment 20001247 PARAMETER Experiment Name: At_Far-red-induction_P Parameter: Tissue Value: Whole Plant
  misc_feature: MA Experiment ID: 20001450 Result: Down-regulated in Transcription
  misc_feature: MA Experiment 20001450 PARAMETER Experiment Name: At_Far-red-induction_P Parameter: Age (day) Value: 7
  misc_feature: MA Experiment 20001450 PARAMETER Experiment Name: At_Far-red-induction_P Parameter: Light Value: Far-red vs. White
  misc_feature: MA Experiment 20001450 PARAMETER Experiment Name: At_Far-red-induction_P Parameter: Organism Value: A. thaliana
  misc_feature: MA Experiment 20001450 PARAMETER Experiment Name: At_Far-red-induction_P Parameter: Plant Line Value: Columbia
  misc_feature: MA Experiment 20001450 PARAMETER Experiment Name: At_Far-red-induction_P Parameter: Timepoint (hr) Value: 8
  misc_feature: MA Experiment 20001450 PARAMETER Experiment Name: At_Far-red-induction_P Parameter: Tissue Value: Whole Plant
  misc_feature: MA Experiment ID: 20001451 Result: Down-regulated in Transcription
  misc_feature: MA Experiment 20001451 PARAMETER Experiment Name: At_Far-red-induction_P Parameter: Age (day) Value: 7
  misc_feature: MA Experiment 20001451 PARAMETER Experiment Name: At_Far-red-induction_P Parameter: Light Value: Far-red vs. White
  misc_feature: MA Experiment 20001451 PARAMETER Experiment Name: At_Far-red-induction_P Parameter: Organism Value: A. thaliana
  misc_feature: MA Experiment 20001451 PARAMETER Experiment Name: At_Far-red-induction_P Parameter: Plant Line Value: Columbia
  misc_feature: MA Experiment 20001451 PARAMETER Experiment Name: At_Far-red-induction_P Parameter: Timepoint (hr) Value: 24
  misc_feature: MA Experiment 20001451 PARAMETER Experiment Name: At_Far-red-induction_P Parameter: Tissue Value: Whole Plant
  misc_feature: MA Experiment ID: 20001457 Result: Up-regulated in Transcription
  misc_feature: MA Experiment 20001457 PARAMETER Experiment Name: At_50mM_NH4NO3_L-to-H_P Parameter: Age (day) Value: Undefined
  misc_feature: MA Experiment 20001457 PARAMETER Experiment Name: At_50mM_NH4NO3_L-to-H_P Parameter: Organism Value: Undefined
  misc_feature: MA Experiment 20001457 PARAMETER Experiment Name: At_50mM_NH4NO3_L-to-H_P Parameter: Plant Line Value: Undefined
  misc_feature: MA Experiment 20001457 PARAMETER Experiment Name: At_50mM_NH4NO3_L-to-H_P Parameter: Timepoint (hr) Value: 0.5
  misc_feature: MA Experiment 20001457 PARAMETER Experiment Name: At_50mM_NH4NO3_L-to-H_P Parameter: Tissue Value: Siliques
  misc_feature: MA Experiment 20001457 PARAMETER Experiment Name: At_50mM_NH4NO3_L-to-H_P Parameter: Treatment Value: 50mM NH4NO3 vs. 100mM Manitol
  misc_feature: MA Experiment ID: 20001560 Result: Up-regulated in Transcription
  misc_feature: MA Experiment 20001560 PARAMETER Experiment Name: At_Drought_Soil_Dry_P Parameter: Age (day) Value: 28
  misc_feature: MA Experiment 20001560 PARAMETER Experiment Name: At_Drought_Soil_Dry_P Parameter: Organism Value: A. thaliana
  misc_feature: MA Experiment 20001560 PARAMETER Experiment Name: At_Drought_Soil_Dry_P Parameter: Plant Line Value: WS
  misc_feature: MA Experiment 20001560 PARAMETER Experiment Name: At_Drought_Soil_Dry_P Parameter: Post Timepoint (hr) Value: None
  misc_feature: MA Experiment 20001560 PARAMETER Experiment Name: At_Drought_Soil_Dry_P Parameter: Post-Treatment Value: None
  misc_feature: MA Experiment 20001560 PARAMETER Experiment Name: At_Drought_Soil_Dry_P Parameter: Timepoint (day) Value: 14
  misc_feature: MA Experiment 20001560 PARAMETER Experiment Name: At_Drought_Soil_Dry_P Parameter: Treatment Value: Drought vs. No Drought

SEQ ID NO: 33794 - protein, 272 aa, Arabidopsis thaliana; identical to SEQ ID NO: 30204
  peptide (1)..(272): Ceres Seq. ID no. 13500012
  misc_feature (56)..(268): Pfam Name: Thaumatin family Pfam Description: Thaumatin family
  misc_feature (29)..(268): Homolog of NCBI NO: 2435406 NR Description: thaumatin-like protein [Arabidopsis thaliana]
  misc_feature (29)..(268): Homolog of NCBI NO: 15222088 NR Description: thaumatin-like protein [Arabidopsis thaliana]
  misc_feature (29)..(268): Homolog of NCBI NO: 6273385 NR Description: SCUTL2 [Vitis vinifera]
  misc_feature (40)..(132): Homolog of NCBI NO: 25296198 NR Description: protein T10O22.21 [imported] - Arabidopsis
  misc_feature (169)..(269): Homolog of NCBI NO: 25296198 NR Description: protein T10O22.21 [imported] - Arabidopsis
  misc_feature (31)..(272): Homolog of NCBI NO: 7442175 NR Description: thaumatin-like protein - turnip
  misc_feature (31)..(269): Homolog of NCBI NO: 2129751 NR Description: thaumatin-like protein - Arabidopsis thaliana
  misc_feature (31)..(269): Homolog of NCBI NO: 15221033 NR Description: thaumatin-like protein [Arabidopsis thaliana]
  misc_feature (29)..(272): Homolog of NCBI NO: 21553814 NR Description: thaumatin-like protein [Arabidopsis thaliana]
  misc_feature (9)..(272): Homolog of NCBI NO: 15219508 NR Description: thaumatin-like protein (pathogenesis-related

SEQ ID NO: 33795 - protein, 264 aa, Arabidopsis thaliana; identical to SEQ ID NO: 30205
  peptide (1)..(264): Ceres Seq. ID no. 13500013
  misc_feature (48)..(260): Pfam Name: Thaumatin family Pfam Description: Thaumatin family
  misc_feature (21)..(260): Homolog of NCBI NO: 2435406 NR Description: thaumatin-like protein [Arabidopsis thaliana]
  misc_feature (21)..(260): Homolog of NCBI NO: 15222088 NR Description: thaumatin-like protein [Arabidopsis thaliana]
  misc_feature (21)..(260): Homolog of NCBI NO: 6273385 NR Description: SCUTL2 [Vitis vinifera]
  misc_feature (32)..(124): Homolog of NCBI NO: 25296198 NR Description: protein T10O22.21 [imported] - Arabidopsis
  misc_feature (161)..(261): Homolog of NCBI NO: 25296198 NR Description: protein T10O22.21 [imported] - Arabidopsis
  misc_feature (23)..(264): Homolog of NCBI NO: 7442175 NR Description: thaumatin-like protein - turnip
  misc_feature (23)..(261): Homolog of NCBI NO: 2129751 NR Description: thaumatin-like protein - Arabidopsis thaliana
  misc_feature (23)..(261): Homolog of NCBI NO: 15221033 NR Description: thaumatin-like protein [Arabidopsis thaliana]
  misc_feature (21)..(264): Homolog of NCBI NO: 21553814 NR Description: thaumatin-like protein [Arabidopsis thaliana]
  misc_feature (1)..(264): Homolog of NCBI NO: 15219508 NR Description: thaumatin-like protein (pathogenesis-related

SEQ ID NO: 33796 - protein, 244 aa, Arabidopsis thaliana; identical to SEQ ID NO: 30206
  peptide (1)..(244): Ceres Seq. ID no. 13500014
  misc_feature (28)..(240): Pfam Name: Thaumatin family Pfam Description: Thaumatin family
  misc_feature (1)..(240): Homolog of NCBI NO: 2435406 NR Description: thaumatin-like protein [Arabidopsis thaliana]
  misc_feature (1)..(240): Homolog of NCBI NO: 15222088 NR Description: thaumatin-like protein [Arabidopsis thaliana]
  misc_feature (1)..(240): Homolog of NCBI NO: 6273385 NR Description: SCUTL2 [Vitis vinifera]
  misc_feature (12)..(104): Homolog of NCBI NO: 25296198 NR Description: protein T10O22.21 [imported] - Arabidopsis
  misc_feature (141)..(241): Homolog of NCBI NO: 25296198 NR Description: protein T10O22.21 [imported] - Arabidopsis
  misc_feature (3)..(244): Homolog of NCBI NO: 7442175 NR Description: thaumatin-like protein - turnip
  misc_feature (3)..(241): Homolog of NCBI NO: 2129751 NR Description: thaumatin-like protein - Arabidopsis thaliana
  misc_feature (3)..(241): Homolog of NCBI NO: 15221033 NR Description: thaumatin-like protein [Arabidopsis thaliana]
  misc_feature (1)..(244): Homolog of NCBI NO: 21553814 NR Description: thaumatin-like protein [Arabidopsis thaliana]
  misc_feature (1)..(244): Homolog of NCBI NO: 15219508 NR Description: thaumatin-like protein (pathogenesis-related

SEQ ID NO: 33797 - DNA, 1179 bp, Arabidopsis thaliana; identical to SEQ ID NO: 30207
  misc_feature (1)..(1179): Ceres Seq. ID no. 12335675
  misc_feature: MA Experiment ID: 108461 Result: Up-regulated in Transcription
  misc_feature: MA Experiment 108461 PARAMETER Experiment Name: At_Germinating_Seeds_cDNA_P Parameter: Age (day) Value: 1 vs. 0
  misc_feature: MA Experiment 108461 PARAMETER Experiment Name: At_Germinating_Seeds_cDNA_P Parameter: Tissue Value: Germinating Seeds
  misc_feature: MA Experiment ID: 108463 Result: Down-regulated in Transcription
  misc_feature: MA Experiment 108463 PARAMETER Experiment Name: At_Germinating_Seeds_cDNA_P Parameter: Age (day) Value: 3 vs. 0
  misc_feature: MA Experiment 108463 PARAMETER Experiment Name: At_Germinating_Seeds_cDNA_P Parameter: Tissue Value: Germinating Seeds
  misc_feature: MA Experiment ID: 108464 Result: Down-regulated in Transcription
  misc_feature: MA Experiment 108464 PARAMETER Experiment Name: At_Germinating_Seeds_cDNA_P Parameter: Age (day) Value: 4 vs. 0
  misc_feature: MA Experiment 108464 PARAMETER Experiment Name: At_Germinating_Seeds_cDNA_P Parameter: Tissue Value: Germinating Seeds
  misc_feature: MA Experiment ID: 108595 Result: Down-regulated in Transcription
  misc_feature: MA Experiment 108595 PARAMETER Experiment Name: At_Ler-pi_Ovule_cDNA_P Parameter: Plant Line Value: null
  misc_feature: MA Experiment ID: 20000069 Result: Down-regulated in Transcription
  misc_feature: MA Experiment 20000069 PARAMETER Experiment Name: At_100uM_ABA_Mutants_cDNA_P Parameter: Plant Line Value: CS23
  misc_feature: MA Experiment 20000069 PARAMETER Experiment Name: At_100uM_ABA_Mutants_cDNA_P Parameter: Timepoint (hr) Value: 6
  misc_feature: MA Experiment 20000069 PARAMETER Experiment Name: At_100uM_ABA_Mutants_cDNA_P Parameter: Tissue Value: Aerial
  misc_feature: MA Experiment 20000069 PARAMETER Experiment Name: At_100uM_ABA_Mutants_cDNA_P Parameter: Treatment Value: 100uM ABA vs. No Treatment
  misc_feature: MA Experiment ID: 20000070 Result: Down-regulated in Transcription
  misc_feature: MA Experiment 20000070 PARAMETER Experiment Name: At_100uM_ABA_Mutants_cDNA_P Parameter: Plant Line Value: CS24
  misc_feature: MA Experiment 20000070 PARAMETER Experiment Name: At_100uM_ABA_Mutants_cDNA_P Parameter: Timepoint (hr) Value: 6
  misc_feature: MA Experiment 20000070 PARAMETER Experiment Name: At_100uM_ABA_Mutants_cDNA_P Parameter: Tissue Value: Aerial
  misc_feature: MA Experiment 20000070 PARAMETER Experiment Name: At_100uM_ABA_Mutants_cDNA_P Parameter: Treatment Value: 100uM ABA vs. No Treatment
  misc_feature: MA Experiment ID: 20000071 Result: Down-regulated in Transcription
  misc_feature: MA Experiment 20000071 PARAMETER Experiment Name: At_100uM_ABA_Mutants_cDNA_P Parameter: Plant Line Value: CS8104
  misc_feature: MA Experiment 20000071 PARAMETER Experiment Name: At_100uM_ABA_Mutants_cDNA_P Parameter: Timepoint (hr) Value: 6
  misc_feature: MA Experiment 20000071 PARAMETER Experiment Name: At_100uM_ABA_Mutants_cDNA_P Parameter: Tissue Value: Aerial
  misc_feature: MA Experiment 20000071 PARAMETER Experiment Name: At_100uM_ABA_Mutants_cDNA_P Parameter: Treatment Value: 100uM ABA vs. No Treatment
  misc_feature: MA Experiment ID: 20000086 Result: Down-regulated in Transcription
  misc_feature: MA Experiment 20000086 PARAMETER Experiment Name: At_100uM_ABA_Mutants_cDNA_P Parameter: Plant Line Value: CS22
  misc_feature: MA Experiment 20000086 PARAMETER Experiment Name: At_100uM_ABA_Mutants_cDNA_P Parameter: Timepoint (hr) Value: 6
  misc_feature: MA Experiment 20000086 PARAMETER Experiment Name: At_100uM_ABA_Mutants_cDNA_P Parameter: Tissue Value: Aerial
  misc_feature: MA Experiment 20000086 PARAMETER Experiment Name: At_100uM_ABA_Mutants_cDNA_P Parameter: Treatment Value: 100uM ABA vs. No Treatment
  misc_feature: MA Experiment ID: 20000117 Result: Down-regulated in Transcription
  misc_feature: MA Experiment 20000117 PARAMETER Experiment Name: At_100uM_ABA_Mutants_cDNA_P Parameter: Plant Line Value: Columbia
  misc_feature: MA Experiment 20000117 PARAMETER Experiment Name: At_100uM_ABA_Mutants_cDNA_P Parameter: Timepoint (hr) Value: 6
  misc_feature: MA Experiment 20000117 PARAMETER Experiment Name: At_100uM_ABA_Mutants_cDNA_P Parameter: Tissue Value: Aerial
  misc_feature: MA Experiment 20000117 PARAMETER Experiment Name: At_100uM_ABA_Mutants_cDNA_P Parameter: Treatment Value: 100uM ABA vs. No Treatment
  misc_feature: MA Experiment ID: 20000180 Result: Up-regulated in Transcription
  misc_feature: MA Experiment 20000180 PARAMETER Experiment Name: At_Germinating_Seeds_P Parameter: Age (hr) Value: 24 vs. 0
  misc_feature: MA Experiment 20000180 PARAMETER Experiment Name: At_Germinating_Seeds_P Parameter: Tissue Value: Germinating Seeds
  misc_feature: MA Experiment ID: 20000185 Result: Down-regulated in Transcription
  misc_feature: MA Experiment 20000185 PARAMETER Experiment Name: At_Roots__P Parameter: Age (day) Value: 7 vs. 21
  misc_feature: MA Experiment 20000185 PARAMETER Experiment Name: At_Roots__P Parameter: Organism Value: A. thaliana
  misc_feature: MA Experiment 20000185 PARAMETER Experiment Name: At_Roots__P Parameter: Tissue Value: Roots vs. Whole Plant
  misc_feature: MA Experiment ID: 20000437 Result: Down-regulated in Transcription
  misc_feature: MA Experiment 20000437 PARAMETER Experiment Name: At_Drought_P Parameter: Age (day) Value: 8
  misc_feature: MA Experiment 20000437 PARAMETER Experiment Name: At_Drought_P Parameter: Organism Value: A. thaliana
  misc_feature: MA Experiment 20000437 PARAMETER Experiment Name: At_Drought_P Parameter: Plant Line Value: WS
  misc_feature: MA Experiment 20000437 PARAMETER Experiment Name: At_Drought_P Parameter: Timepoint (hr) Value: 24
  misc_feature: MA Experiment 20000437 PARAMETER Experiment Name: At_Drought_P Parameter: Tissue Value: Whole Plant
  misc_feature: MA Experiment 20000437 PARAMETER Experiment Name: At_Drought_P Parameter: Treatment Value: Drought vs. No Drought
  misc_feature: MA Experiment ID: 20000439 Result: Down-regulated in Transcription
  misc_feature: MA Experiment 20000439 PARAMETER Experiment Name: At_Roots__P Parameter: Age (day) Value: 14 vs. 21
  misc_feature: MA Experiment 20000439 PARAMETER Experiment Name: At_Roots__P Parameter: Organism Value: A. thaliana
  misc_feature: MA Experiment 20000439 PARAMETER Experiment Name: At_Roots__P Parameter: Tissue Value: Roots vs. Whole Plant
  misc_feature: MA Experiment ID: 20000794 Result: Down-regulated in Transcription
  misc_feature: MA Experiment 20000794 PARAMETER Experiment Name: At_Petals_P Parameter: Age (day) Value: 23-25 days
  misc_feature: MA Experiment 20000794 PARAMETER Experiment Name: At_Petals_P Parameter: Plant Line Value: WS
  misc_feature: MA Experiment 20000794 PARAMETER Experiment Name: At_Petals_P Parameter: Tissue Value: Petals vs. Whole plant
  misc_feature: MA Experiment ID: 20001560 Result: Up-regulated in Transcription
  misc_feature: MA Experiment 20001560 PARAMETER Experiment Name: At_Drought_Soil_Dry_P Parameter: Age (day) Value: 28
  misc_feature: MA Experiment 20001560 PARAMETER Experiment Name: At_Drought_Soil_Dry_P Parameter: Organism Value: A. thaliana
  misc_feature: MA Experiment 20001560 PARAMETER Experiment Name: At_Drought_Soil_Dry_P Parameter: Plant Line Value: WS
  misc_feature: MA Experiment 20001560 PARAMETER Experiment Name: At_Drought_Soil_Dry_P Parameter: Post Timepoint (hr) Value: None
  misc_feature: MA Experiment 20001560 PARAMETER Experiment Name: At_Drought_Soil_Dry_P Parameter: Post-Treatment Value: None
  misc_feature: MA Experiment 20001560 PARAMETER Experiment Name: At_Drought_Soil_Dry_P Parameter: Timepoint (day) Value: 14
  misc_feature: MA Experiment 20001560 PARAMETER Experiment Name: At_Drought_Soil_Dry_P Parameter: Treatment Value: Drought vs. No Drought
  misc_feature: MA Experiment ID: 20001757 Result: Up-regulated in Transcription
  misc_feature: MA Experiment 20001757 PARAMETER Experiment Name: At_50mM_NH4NO3_L-to-H_P Parameter: Timepoint (hr) Value: 6
  misc_feature: MA Experiment 20001757 PARAMETER Experiment Name: At_50mM_NH4NO3_L-to-H_P Parameter: Tissue Value: Leaf
  misc_feature: MA Experiment 20001757 PARAMETER Experiment Name: At_50mM_NH4NO3_L-to-H_P Parameter: Treatment Value: 50mM NH4NO3 vs 100mM Mannitol
  misc_feature: MA Experiment ID: 20001911 Result: Down-regulated in Transcription
  misc_feature: MA Experiment 20001911 PARAMETER Experiment Name: At_Drought_Reproduction_P Parameter: Age (day) Value: 40
  misc_feature: MA Experiment 20001911 PARAMETER Experiment Name: At_Drought_Reproduction_P Parameter: Organism Value: A. thaliana
  misc_feature: MA Experiment 20001911 PARAMETER Experiment Name: At_Drought_Reproduction_P Parameter: Plant Line Value: WS
  misc_feature: MA Experiment 20001911 PARAMETER Experiment Name: At_Drought_Reproduction_P Parameter: Timepoint (day) Value: 10
  misc_feature: MA Experiment 20001911 PARAMETER Experiment Name: At_Drought_Reproduction_P Parameter: Tissue Value: Flowers
  misc_feature: MA Experiment 20001911 PARAMETER Experiment Name: At_Drought_Reproduction_P Parameter: Treatment Value: Drought vs. No Drought

SEQ ID NO: 33798 - protein, 353 aa, Arabidopsis thaliana; identical to SEQ ID NO: 30208
  peptide (1)..(353): Ceres Seq. ID no. 12335676
  misc_feature (61)..(223): Pfam Name: NAD binding domain of 6-phosphogluconate dehydrogenase Pfam Description: NAD binding domain of 6-phosphogluconate
  misc_feature (64)..(344): Homolog of NCBI NO: 13277568 NR Description: Similar to RIKEN cDNA 3930401K13 gene [Homo
  misc_feature (65)..(346): Homolog of NCBI NO: 23054597 NR Description: hypothetical protein [Geobacter metallireducens]
  misc_feature (65)..(346): Homolog of NCBI NO: 39996474 NR Description: 3-hydroxyisobutyrate dehydrogenase family protein
  misc_feature (62)..(349): Homolog of NCBI NO: 18404556 NR Description: expressed protein
  misc_feature (62)..(348): Homolog of NCBI NO: 29368238 NR Description: gamma hydroxybutyrate dehydrogenase-like protein
  misc_feature (62)..(349): Homolog of NCBI NO: 15375068 NR Description: gamma hydroxybutyrate dehydrogenase [Arabidopsis
  misc_feature (44)..(347): Homolog of NCBI NO: 34914300 NR Description: putative gamma hydroxybutyrate dehydrogenase
  misc_feature (11)..(353): Homolog of NCBI NO: 18394513 NR Description: Expressed protein
  misc_feature (1)..(132): Homolog of NCBI NO: 8778467 NR Description: F1L3.35 [Arabidopsis thaliana]
  misc_feature (132)..(353): Homolog of NCBI NO: 8778467 NR Description: F1L3.35 [Arabidopsis thaliana]

SEQ ID NO: 33799 - protein, 343 aa, Arabidopsis thaliana; identical to SEQ ID NO: 30209
  peptide (1)..(343): Ceres Seq. ID no. 12335677
  misc_feature (51)..(213): Pfam Name: NAD binding domain of 6-phosphogluconate dehydrogenase Pfam Description: NAD binding domain of 6-phosphogluconate
  misc_feature (54)..(334): Homolog of NCBI NO: 13277568 NR Description: Similar to RIKEN cDNA 3930401K13 gene [Homo
  misc_feature (55)..(336): Homolog of NCBI NO: 23054597 NR Description: hypothetical protein [Geobacter metallireducens]
  misc_feature (55)..(336): Homolog of NCBI NO: 39996474 NR Description: 3-hydroxyisobutyrate dehydrogenase family protein
  misc_feature (52)..(339): Homolog of NCBI NO: 18404556 NR Description: expressed protein
  misc_feature (52)..(338): Homolog of NCBI NO: 29368238 NR Description: gamma hydroxybutyrate dehydrogenase-like protein
  misc_feature (52)..(339): Homolog of NCBI NO: 15375068 NR Description: gamma hydroxybutyrate dehydrogenase [Arabidopsis
  misc_feature (34)..(337): Homolog of NCBI NO: 34914300 NR Description: putative gamma hydroxybutyrate dehydrogenase
  misc_feature (1)..(343): Homolog of NCBI NO: 18394513 NR Description: Expressed protein
  misc_feature (1)..(122): Homolog of NCBI NO: 8778467 NR Description: F1L3.35 [Arabidopsis thaliana]
  misc_feature (122)..(343): Homolog of NCBI NO: 8778467 NR Description: F1L3.35 [Arabidopsis thaliana]

SEQ ID NO: 33800 - protein, 285 aa, Arabidopsis thaliana; identical to SEQ ID NO: 30210
  peptide (1)..(285): Ceres Seq. ID no. 12335678
  misc_feature (1)..(155): Pfam Name: NAD binding domain of 6-phosphogluconate dehydrogenase Pfam Description: NAD binding domain of 6-phosphogluconate
  misc_feature (1)..(276): Homolog of NCBI NO: 13277568 NR Description: Similar to RIKEN cDNA 3930401K13 gene [Homo
  misc_feature (1)..(278): Homolog of NCBI NO: 23054597 NR Description: hypothetical protein [Geobacter metallireducens]
  misc_feature (1)..(278): Homolog of NCBI NO: 39996474 NR Description: 3-hydroxyisobutyrate dehydrogenase family protein
  misc_feature (1)..(281): Homolog of NCBI NO: 18404556 NR Description: expressed protein
  misc_feature (1)..(280): Homolog of NCBI NO: 29368238 NR Description: gamma hydroxybutyrate dehydrogenase-like protein
  misc_feature (1)..(281): Homolog of NCBI NO: 15375068 NR Description: gamma hydroxybutyrate dehydrogenase [Arabidopsis
  misc_feature (1)..(279): Homolog of NCBI NO: 34914300 NR Description: putative gamma hydroxybutyrate dehydrogenase
  misc_feature (1)..(285): Homolog of NCBI NO: 18394513 NR Description: Expressed protein
  misc_feature (1)..(64): Homolog of NCBI NO: 8778467 NR Description: F1L3.35 [Arabidopsis thaliana]
  misc_feature (64)..(285): Homolog of NCBI NO: 8778467 NR Description: F1L3.35 [Arabidopsis thaliana]

SEQ ID NO: 33801 - DNA, 1132 bp, Arabidopsis thaliana; identical to SEQ ID NO: 30211
  misc_feature (1)..(1132): Ceres Seq. ID no. 13490255
  misc_feature: MA Experiment ID: 108434 Result: Down-regulated in Transcription
  misc_feature: MA Experiment 108434 PARAMETER Experiment Name: At_Root_Tips_cDNA_P Parameter: Tissue Value: Root Tips
  misc_feature: MA Experiment ID: 108461 Result: Up-regulated in Transcription
  misc_feature: MA Experiment 108461 PARAMETER Experiment Name: At_Germinating_Seeds_cDNA_P Parameter: Age (day) Value: 1 vs. 0
  misc_feature: MA Experiment 108461 PARAMETER Experiment Name: At_Germinating_Seeds_cDNA_P Parameter: Tissue Value: Germinating Seeds
  misc_feature: MA Experiment ID: 108462 Result: Up-regulated in Transcription
  misc_feature: MA Experiment 108462 PARAMETER Experiment Name: At_Germinating_Seeds_cDNA_P Parameter: Age (day) Value: 2 vs. 0
  misc_feature: MA Experiment 108462 PARAMETER Experiment Name: At_Germinating_Seeds_cDNA_P Parameter: Tissue Value: Germinating Seeds
  misc_feature: MA Experiment ID: 108464 Result: Up-regulated in Transcription
  misc_feature: MA Experiment 108464 PARAMETER Experiment Name: At_Germinating_Seeds_cDNA_P Parameter: Age (day) Value: 4 vs. 0
  misc_feature: MA Experiment 108464 PARAMETER Experiment Name: At_Germinating_Seeds_cDNA_P Parameter: Tissue Value: Germinating Seeds
  misc_feature: MA Experiment ID: 108488 Result: Down-regulated in Transcription
  misc_feature: MA Experiment ID: 108574 Result: Down-regulated in Transcription
  misc_feature: MA Experiment 108574 PARAMETER Experiment Name: At_Wounding__cDNA_P Parameter: Timepoint (hr) Value: 1
  misc_feature: MA Experiment 108574 PARAMETER Experiment Name: At_Wounding__cDNA_P Parameter: Tissue Value: Aerial
  misc_feature: MA Experiment 108574 PARAMETER Experiment Name: At_Wounding__cDNA_P Parameter: Treatment Value: Wounding vs. No Wounding
  misc_feature: MA Experiment ID: 108577 Result: Down-regulated in Transcription
  misc_feature: MA Experiment 108577 PARAMETER Experiment Name: At_42deg_Heat_cDNA_P Parameter: Temperature (deg C) Value: 42 vs. 22
  misc_feature: MA Experiment 108577 PARAMETER Experiment Name: At_42deg_Heat_cDNA_P Parameter: Timepoint (hr) Value: 6
  misc_feature: MA Experiment 108577 PARAMETER Experiment Name: At_42deg_Heat_cDNA_P Parameter: Tissue Value: Aerial
  misc_feature: MA Experiment ID: 108579 Result: Down-regulated in Transcription
  misc_feature: MA Experiment 108579 PARAMETER Experiment Name: At_4deg_Cold_cDNA_P Parameter: Temperature (deg C) Value: 4 vs. 22
  misc_feature: MA Experiment 108579 PARAMETER Experiment Name: At_4deg_Cold_cDNA_P Parameter: Timepoint (hr) Value: 6
  misc_feature: MA Experiment 108579 PARAMETER Experiment Name: At_4deg_Cold_cDNA_P Parameter: Tissue Value: Aerial
  misc_feature: MA Experiment ID: 108608 Result: Down-regulated in Transcription
  misc_feature: MA Experiment 108608 PARAMETER Experiment Name: At_100uM_ABA_cDNA_P Parameter: Timepoint (hr) Value: 1
  misc_feature: MA Experiment 108608 PARAMETER Experiment Name: At_100uM_ABA_cDNA_P Parameter: Tissue Value: Aerial
  misc_feature: MA Experiment 108608 PARAMETER Experiment Name: At_100uM_ABA_cDNA_P Parameter: Treatment Value: 100uM ABA vs. No Treatment
  misc_feature: MA Experiment ID: 108667 Result: Down-regulated in Transcription
  misc_feature: MA Experiment 108667 PARAMETER Experiment Name: At_2mM_SA_cDNA_P Parameter: Plant Line Value: WS
  misc_feature: MA Experiment 108667 PARAMETER Experiment Name: At_2mM_SA_cDNA_P Parameter: Timepoint (hr) Value: 1
  misc_feature: MA Experiment 108667 PARAMETER Experiment Name: At_2mM_SA_cDNA_P Parameter: Treatment Value: 2mM SA vs. No Treatment
  misc_feature: MA Experiment ID: 20000069 Result: Up-regulated in Transcription
  misc_feature: MA Experiment 20000069 PARAMETER Experiment Name: At_100uM_ABA_Mutants_cDNA_P Parameter: Plant Line Value: CS23
  misc_feature: MA Experiment 20000069 PARAMETER Experiment Name: At_100uM_ABA_Mutants_cDNA_P Parameter: Timepoint (hr) Value: 6
  misc_feature: MA Experiment 20000069 PARAMETER Experiment Name: At_100uM_ABA_Mutants_cDNA_P Parameter: Tissue Value: Aerial
  misc_feature: MA Experiment 20000069 PARAMETER Experiment Name: At_100uM_ABA_Mutants_cDNA_P Parameter: Treatment Value: 100uM ABA vs. No Treatment
  misc_feature: MA Experiment ID: 20000070 Result: Up-regulated in Transcription
  misc_feature: MA Experiment 20000070 PARAMETER Experiment Name: At_100uM_ABA_Mutants_cDNA_P Parameter: Plant Line Value: CS24
  misc_feature: MA Experiment 20000070 PARAMETER Experiment Name: At_100uM_ABA_Mutants_cDNA_P Parameter: Timepoint (hr) Value: 6
  misc_feature: MA Experiment 20000070 PARAMETER Experiment Name: At_100uM_ABA_Mutants_cDNA_P Parameter: Tissue Value: Aerial
  misc_feature: MA Experiment 20000070 PARAMETER Experiment Name: At_100uM_ABA_Mutants_cDNA_P Parameter: Treatment Value: 100uM ABA vs. No Treatment
  misc_feature: MA Experiment ID: 20000071 Result: Up-regulated in Transcription
  misc_feature: MA Experiment 20000071 PARAMETER Experiment Name: At_100uM_ABA_Mutants_cDNA_P Parameter: Plant Line Value: CS8104
  misc_feature: MA Experiment 20000071 PARAMETER Experiment Name: At_100uM_ABA_Mutants_cDNA_P Parameter: Timepoint (hr) Value: 6
  misc_feature: MA Experiment 20000071 PARAMETER Experiment Name: At_100uM_ABA_Mutants_cDNA_P Parameter: Tissue Value: Aerial
  misc_feature: MA Experiment 20000071 PARAMETER Experiment Name: At_100uM_ABA_Mutants_cDNA_P Parameter: Treatment Value: 100uM ABA vs. No Treatment
  misc_feature: MA Experiment ID: 20000088 Result: Up-regulated in Transcription
  misc_feature: MA Experiment 20000088 PARAMETER Experiment Name: At_100uM_ABA_Mutants_cDNA_P Parameter: Plant Line Value: Landsberg
  misc_feature: MA Experiment 20000088 PARAMETER Experiment Name: At_100uM_ABA_Mutants_cDNA_P Parameter: Timepoint (hr) Value: 6
  misc_feature: MA Experiment 20000088 PARAMETER Experiment Name: At_100uM_ABA_Mutants_cDNA_P Parameter: Tissue Value: Aerial
  misc_feature: MA Experiment 20000088 PARAMETER Experiment Name: At_100uM_ABA_Mutants_cDNA_P Parameter: Treatment Value: 100uM ABA vs. No Treatment
  misc_feature: MA Experiment ID: 20000089 Result: Up-regulated in Transcription
  misc_feature: MA Experiment ID: 20000117 Result: Up-regulated in Transcription
  misc_feature: MA Experiment 20000117 PARAMETER Experiment Name: At_100uM_ABA_Mutants_cDNA_P Parameter: Plant Line Value: Columbia
  misc_feature: MA Experiment 20000117 PARAMETER Experiment Name: At_100uM_ABA_Mutants_cDNA_P Parameter: Timepoint (hr) Value: 6
  misc_feature: MA Experiment 20000117 PARAMETER Experiment Name: At_100uM_ABA_Mutants_cDNA_P Parameter: Tissue Value: Aerial
  misc_feature: MA Experiment 20000117 PARAMETER Experiment Name: At_100uM_ABA_Mutants_cDNA_P Parameter: Treatment Value: 100uM ABA vs. No Treatment
  misc_feature: MA Experiment ID: 20000213 Result: Down-regulated in Transcription
  misc_feature: MA Experiment 20000213 PARAMETER Experiment Name: At_4deg_Cold_P Parameter: Timepoint (hr) Value: 2
  misc_feature: MA Experiment ID: 20000224 Result: Down-regulated in Transcription
  misc_feature: MA Experiment ID: 20000227 Result: Down-regulated in Transcription
  misc_feature: MA Experiment 20000227 PARAMETER Experiment Name: At_Root-Tips-vs-Tops_P Parameter: Tissue Value: Root Tips vs. Root Tops
  misc_feature: MA Experiment ID: 20000234 Result: Down-regulated in Transcription
  misc_feature: MA Experiment 20000234 PARAMETER Experiment Name: At_Siliques_P Parameter: Age (day) Value: 21
  misc_feature: MA Experiment 20000234 PARAMETER Experiment Name: At_Siliques_P Parameter: Organism Value: A. thaliana
  misc_feature: MA Experiment 20000234 PARAMETER Experiment Name: At_Siliques_P Parameter: Plant Line Value: WS
  misc_feature: MA Experiment 20000234 PARAMETER Experiment Name: At_Siliques_P Parameter: Tissue Value: Less Than 5mm Siliques vs. Whole Plant
  misc_feature: MA Experiment ID: 20000235 Result: Down-regulated in Transcription
  misc_feature: MA Experiment 20000235 PARAMETER Experiment Name: At_Siliques_P Parameter: Age (day) Value: 21
  misc_feature: MA Experiment 20000235 PARAMETER Experiment Name: At_Siliques_P Parameter: Organism Value: A. thaliana
  misc_feature: MA Experiment 20000235 PARAMETER Experiment Name: At_Siliques_P Parameter: Plant Line Value: WS
  misc_feature: MA Experiment 20000235 PARAMETER Experiment Name: At_Siliques_P Parameter: Tissue Value: 5-10mm Siliques vs. Whole Plant
  misc_feature: MA Experiment ID: 20000264 Result: Down-regulated in Transcription
  misc_feature: MA Experiment 20000264 PARAMETER Experiment Name: At_Open_Flower_P Parameter: Age (day) Value: 21
  misc_feature: MA Experiment 20000264 PARAMETER Experiment Name: At_Open_Flower_P Parameter: Plant Line Value: WS
  misc_feature: MA Experiment 20000264 PARAMETER Experiment Name: At_Open_Flower_P Parameter: Tissue Value: Open Flower vs. Whole Plant
  misc_feature: MA Experiment ID: 20000265 Result: Down-regulated in Transcription
  misc_feature: MA Experiment 20000265 PARAMETER Experiment Name: At_Open_Flower_P Parameter: Age (day) Value: 21
  misc_feature: MA Experiment 20000265 PARAMETER Experiment Name: At_Open_Flower_P Parameter: Plant Line Value: WS
  misc_feature: MA Experiment 20000265 PARAMETER Experiment Name: At_Open_Flower_P Parameter: Tissue Value: Closed Flower vs. Whole Plant
  misc_feature: MA Experiment ID: 20000286 Result: Down-regulated in Transcription
  misc_feature: MA Experiment 20000286 PARAMETER Experiment Name: At_Open_Flower_P Parameter: Age (day) Value: 21
  misc_feature: MA Experiment 20000286 PARAMETER Experiment Name: At_Open_Flower_P Parameter: Plant Line Value: WS
  misc_feature: MA Experiment 20000286 PARAMETER Experiment Name: At_Open_Flower_P Parameter: Tissue Value: Half Open vs. Whole Plant
  misc_feature: MA Experiment ID: 20000438 Result: Down-regulated in Transcription
  misc_feature: MA Experiment 20000438 PARAMETER Experiment Name: At_Shoots__P Parameter: Age (day) Value: 14
  misc_feature: MA Experiment 20000438 PARAMETER Experiment Name: At_Shoots__P Parameter: Tissue Value: Shoots vs. Whole Plant
  misc_feature: MA Experiment ID: 20000527 Result: Down-regulated in Transcription
  misc_feature: MA Experiment 20000527 PARAMETER Experiment Name: At_10percent_PEG_P Parameter: Age (day) Value: 20
  misc_feature: MA Experiment 20000527 PARAMETER Experiment Name: At_10percent_PEG_P Parameter: Organism Value: A. thaliana
  misc_feature: MA Experiment 20000527 PARAMETER Experiment Name: At_10percent_PEG_P Parameter: Plant Line Value: WS
  misc_feature: MA Experiment 20000527 PARAMETER Experiment Name: At_10percent_PEG_P Parameter: Timepoint (day) Value: 20
  misc_feature: MA Experiment 20000527 PARAMETER Experiment Name: At_10percent_PEG_P Parameter: Tissue Value: Whole Plant
  misc_feature: MA Experiment 20000527 PARAMETER Experiment Name: At_10percent_PEG_P Parameter: Treatment Value: 10percent PEG vs. No Treatment
  misc_feature: MA Experiment ID: 20001248 Result: Up-regulated in Transcription
  misc_feature: MA Experiment 20001248 PARAMETER Experiment Name: At_Far-red-induction_P Parameter: Age (day) Value: 7
  misc_feature: MA Experiment 20001248 PARAMETER Experiment Name: At_Far-red-induction_P Parameter: Light Value: Far-red vs. White
  misc_feature: MA Experiment 20001248 PARAMETER Experiment Name: At_Far-red-induction_P Parameter: Organism Value: A. thaliana
  misc_feature: MA Experiment 20001248 PARAMETER Experiment Name: At_Far-red-induction_P Parameter: Plant Line Value: Columbia
  misc_feature: MA Experiment 20001248 PARAMETER Experiment Name: At_Far-red-induction_P Parameter: Timepoint (hr) Value: 4
  misc_feature: MA Experiment 20001248 PARAMETER Experiment Name: At_Far-red-induction_P Parameter: Tissue Value: Whole Plant
  misc_feature: MA Experiment ID: 20001560 Result: Down-regulated in Transcription
  misc_feature: MA Experiment 20001560 PARAMETER Experiment Name: At_Drought_Soil_Dry_P Parameter: Age (day) Value: 28
  misc_feature: MA Experiment 20001560 PARAMETER Experiment Name: At_Drought_Soil_Dry_P Parameter: Organism Value: A. thaliana
  misc_feature: MA Experiment 20001560 PARAMETER Experiment Name: At_Drought_Soil_Dry_P Parameter: Plant Line Value: WS
  misc_feature: MA Experiment 20001560 PARAMETER Experiment Name: At_Drought_Soil_Dry_P Parameter: Post Timepoint (hr) Value: None
  misc_feature: MA Experiment 20001560 PARAMETER Experiment Name: At_Drought_Soil_Dry_P Parameter: Post-Treatment Value: None
  misc_feature: MA Experiment 20001560 PARAMETER Experiment Name: At_Drought_Soil_Dry_P Parameter: Timepoint (day) Value: 14
  misc_feature: MA Experiment 20001560 PARAMETER Experiment Name: At_Drought_Soil_Dry_P Parameter: Treatment Value: Drought vs. No Drought

SEQ ID NO: 33802 - protein, 202 aa, Arabidopsis thaliana; identical to SEQ ID NO: 30212
  peptide (1)..(202): Ceres Seq. ID no. 13490256
  misc_feature (1)..(163): Homolog of NCBI NO: 24586353 NR Description: CG18812-PC [Drosophila melanogaster]
  misc_feature (1)..(163): Homolog of NCBI NO: 24586355 NR Description: CG18812-PB [Drosophila melanogaster]
  misc_feature (1)..(163): Homolog of NCBI NO: 24586357 NR Description: CG18812-PA [Drosophila melanogaster]
  misc_feature (14)..(49): Homolog of NCBI NO: 22830926 NR Description: P0466H10.24 [Oryza sativa (japonica
  misc_feature (41)..(196): Homolog of NCBI NO: 22830926 NR Description: P0466H10.24 [Oryza sativa (japonica
  misc_feature (14)..(202): Homolog of NCBI NO: 21593697 NR Description: unknown [Arabidopsis thaliana]
  misc_feature (14)..(202): Homolog of NCBI NO: 18398797 NR Description: expressed protein [Arabidopsis thaliana]
  misc_feature (9)..(202): Homolog of NCBI NO: 38345848 NR Description: OSJNBa0084K11.12 [Oryza sativa (japonica
  misc_feature (1)..(202): Homolog of NCBI NO: 21553817 NR Description: unknown [Arabidopsis thaliana]
  misc_feature (1)..(202): Homolog of NCBI NO: 15237117 NR Description: expressed protein [Arabidopsis thaliana]

SEQ ID NO: 33803 - DNA, 1440 bp, Arabidopsis thaliana; identical to SEQ ID NO: 30213
  misc_feature (1)..(1440): Ceres Seq. ID no. 13488422
  misc_feature: MA Experiment ID: 108461 Result: Up-regulated in Transcription
  misc_feature: MA Experiment 108461 PARAMETER Experiment Name: At_Germinating_Seeds_cDNA_P Parameter: Age (day) Value: 1 vs. 0
  misc_feature: MA Experiment 108461 PARAMETER Experiment Name: At_Germinating_Seeds_cDNA_P Parameter: Tissue Value: Germinating Seeds
  misc_feature: MA Experiment ID: 108462 Result: Up-regulated in Transcription
  misc_feature: MA Experiment 108462 PARAMETER Experiment Name: At_Germinating_Seeds_cDNA_P Parameter: Age (day) Value: 2 vs. 0
  misc_feature: MA Experiment 108462 PARAMETER Experiment Name: At_Germinating_Seeds_cDNA_P Parameter: Tissue Value: Germinating Seeds
  misc_feature: MA Experiment ID: 108463 Result: Up-regulated in Transcription
  misc_feature: MA Experiment 108463 PARAMETER Experiment Name: At_Germinating_Seeds_cDNA_P Parameter: Age (day) Value: 3 vs. 0
  misc_feature: MA Experiment 108463 PARAMETER Experiment Name: At_Germinating_Seeds_cDNA_P Parameter: Tissue Value: Germinating Seeds
  misc_feature: MA Experiment ID: 108464 Result: Up-regulated in Transcription
  misc_feature: MA Experiment 108464 PARAMETER Experiment Name: At_Germinating_Seeds_cDNA_P Parameter: Age (day) Value: 4 vs. 0
  misc_feature: MA Experiment 108464 PARAMETER Experiment Name: At_Germinating_Seeds_cDNA_P Parameter: Tissue Value: Germinating Seeds
  misc_feature: MA Experiment ID: 20000070 Result: Down-regulated in Transcription
  misc_feature: MA Experiment 20000070 PARAMETER Experiment Name: At_100uM_ABA_Mutants_cDNA_P Parameter: Plant Line Value: CS24
  misc_feature: MA Experiment 20000070 PARAMETER Experiment Name: At_100uM_ABA_Mutants_cDNA_P Parameter: Timepoint (hr) Value: 6
  misc_feature: MA Experiment 20000070 PARAMETER Experiment Name: At_100uM_ABA_Mutants_cDNA_P Parameter: Tissue Value: Aerial
  misc_feature: MA Experiment 20000070 PARAMETER Experiment Name: At_100uM_ABA_Mutants_cDNA_P Parameter: Treatment Value: 100uM ABA vs. No Treatment
  misc_feature: MA Experiment ID: 20000087 Result: Down-regulated in Transcription
  misc_feature: MA Experiment 20000087 PARAMETER Experiment Name: At_100uM_ABA_Mutants_cDNA_P Parameter: Plant Line Value: WS
  misc_feature: MA Experiment 20000087 PARAMETER Experiment Name: At_100uM_ABA_Mutants_cDNA_P Parameter: Timepoint (hr) Value: 6
  misc_feature: MA Experiment 20000087 PARAMETER Experiment Name: At_100uM_ABA_Mutants_cDNA_P Parameter: Tissue Value: Aerial
  misc_feature: MA Experiment 20000087 PARAMETER Experiment Name: At_100uM_ABA_Mutants_cDNA_P Parameter: Treatment Value: 100uM ABA vs. No Treatment
  misc_feature: MA Experiment ID: 20000117 Result: Down-regulated in Transcription
  misc_feature: MA Experiment 20000117 PARAMETER Experiment Name: At_100uM_ABA_Mutants_cDNA_P Parameter: Plant Line Value: Columbia
  misc_feature: MA Experiment 20000117 PARAMETER Experiment Name: At_100uM_ABA_Mutants_cDNA_P Parameter: Timepoint (hr) Value: 6
  misc_feature: MA Experiment 20000117 PARAMETER Experiment Name: At_100uM_ABA_Mutants_cDNA_P Parameter: Tissue Value: Aerial
  misc_feature: MA Experiment 20000117 PARAMETER Experiment Name: At_100uM_ABA_Mutants_cDNA_P Parameter: Treatment Value: 100uM ABA vs. No Treatment
  misc_feature: MA Experiment ID: 20000179 Result: Up-regulated in Transcription
  misc_feature: MA Experiment 20000179 PARAMETER Experiment Name: At_Germinating_Seeds_P Parameter: Age (hr) Value: 6 vs. 0
  misc_feature: MA Experiment 20000179 PARAMETER Experiment Name: At_Germinating_Seeds_P Parameter: Tissue Value: Germinating Seeds
  misc_feature: MA Experiment ID: 20000180 Result: Up-regulated in Transcription
  misc_feature: MA Experiment 20000180 PARAMETER Experiment Name: At_Germinating_Seeds_P Parameter: Age (hr) Value: 24 vs. 0
  misc_feature: MA Experiment 20000180 PARAMETER Experiment Name: At_Germinating_Seeds_P Parameter: Tissue Value: Germinating Seeds
  misc_feature: MA Experiment ID: 20000182 Result: Down-regulated in Transcription
  misc_feature: MA Experiment 20000182 PARAMETER Experiment Name: At_2mM_SA_P Parameter: Age (day) Value: 14
  misc_feature: MA Experiment 20000182 PARAMETER Experiment Name: At_2mM_SA_P Parameter: Organism Value: A. thaliana
  misc_feature: MA Experiment 20000182 PARAMETER Experiment Name: At_2mM_SA_P Parameter: Plant Line Value: WS
  misc_feature: MA Experiment 20000182 PARAMETER Experiment Name: At_2mM_SA_P Parameter: Timepoint (hr) Value: 6
  misc_feature: MA Experiment 20000182 PARAMETER Experiment Name: At_2mM_SA_P Parameter: Tissue Value: Aerial
  misc_feature: MA Experiment 20000182 PARAMETER Experiment Name: At_2mM_SA_P Parameter: Treatment Value: 2mM SA vs. No Treatment
  misc_feature: MA Experiment ID: 20000185 Result: Down-regulated in Transcription
  misc_feature: MA Experiment 20000185 PARAMETER Experiment Name: At_Roots__P Parameter: Age (day) Value: 7 vs. 21
  misc_feature: MA Experiment 20000185 PARAMETER Experiment Name: At_Roots__P Parameter: Organism Value: A. thaliana
  misc_feature: MA Experiment 20000185 PARAMETER Experiment Name: At_Roots__P Parameter: Tissue Value: Roots vs. Whole Plant
  misc_feature: MA Experiment ID: 20000234 Result: Up-regulated in Transcription
  misc_feature: MA Experiment 20000234 PARAMETER Experiment Name: At_Siliques_P Parameter: Age (day) Value: 21
  misc_feature: MA Experiment 20000234 PARAMETER Experiment Name: At_Siliques_P Parameter: Organism Value: A. thaliana
  misc_feature: MA Experiment 20000234 PARAMETER Experiment Name: At_Siliques_P Parameter: Plant Line Value: WS
  misc_feature: MA Experiment 20000234 PARAMETER Experiment Name: At_Siliques_P Parameter: Tissue Value: Less Than 5mm Siliques vs. Whole Plant
  misc_feature: MA Experiment ID: 20000235 Result: Up-regulated in Transcription
  misc_feature: MA Experiment 20000235 PARAMETER Experiment Name: At_Siliques_P Parameter: Age (day) Value: 21
  misc_feature: MA Experiment 20000235 PARAMETER Experiment Name: At_Siliques_P Parameter: Organism Value: A. thaliana
  misc_feature: MA Experiment 20000235 PARAMETER Experiment Name: At_Siliques_P Parameter: Plant Line Value: WS
  misc_feature: MA Experiment 20000235 PARAMETER Experiment Name: At_Siliques_P Parameter: Tissue Value: 5-10mm Siliques vs. Whole Plant
  misc_feature: MA Experiment ID: 20000437 Result: Down-regulated in Transcription
  misc_feature: MA Experiment 20000437 PARAMETER Experiment Name: At_Drought_P Parameter: Age (day) Value: 8
  misc_feature: MA Experiment 20000437 PARAMETER Experiment Name: At_Drought_P Parameter: Organism Value: A. thaliana
  misc_feature: MA Experiment 20000437 PARAMETER Experiment Name: At_Drought_P Parameter: Plant Line Value: WS
  misc_feature: MA Experiment 20000437 PARAMETER Experiment Name: At_Drought_P Parameter: Timepoint (hr) Value: 24
  misc_feature: MA Experiment 20000437 PARAMETER Experiment Name: At_Drought_P Parameter: Tissue Value: Whole Plant
  misc_feature: MA Experiment 20000437 PARAMETER Experiment Name: At_Drought_P Parameter: Treatment Value: Drought vs. No Drought
  misc_feature: MA Experiment ID: 20000438 Result: Up-regulated in Transcription
  misc_feature: MA Experiment 20000438 PARAMETER Experiment Name: At_Shoots__P Parameter: Age (day) Value: 14
  misc_feature: MA Experiment 20000438 PARAMETER Experiment Name: At_Shoots__P Parameter: Tissue Value: Shoots vs. Whole Plant
  misc_feature: MA Experiment ID: 20000439 Result: Down-regulated in Transcription
  misc_feature: MA Experiment 20000439 PARAMETER Experiment Name: At_Roots__P Parameter: Age (day) Value: 14 vs. 21
  misc_feature: MA Experiment 20000439 PARAMETER Experiment Name: At_Roots__P Parameter: Organism Value: A. thaliana
  misc_feature: MA Experiment 20000439 PARAMETER Experiment Name: At_Roots__P Parameter: Tissue Value: Roots vs. Whole Plant
  misc_feature: MA Experiment ID: 20000794 Result: Down-regulated in Transcription
  misc_feature: MA Experiment 20000794 PARAMETER Experiment Name: At_Petals_P Parameter: Age (day) Value: 23-25 days
  misc_feature: MA Experiment 20000794 PARAMETER Experiment Name: At_Petals_P Parameter: Plant Line Value: WS
  misc_feature: MA Experiment 20000794 PARAMETER Experiment Name: At_Petals_P Parameter: Tissue Value: Petals vs. Whole plant
  misc_feature: MA Experiment ID: 20001248 Result: Down-regulated in Transcription
  misc_feature: MA Experiment 20001248 PARAMETER Experiment Name: At_Far-red-induction_P Parameter: Age (day) Value: 7
  misc_feature: MA Experiment 20001248 PARAMETER Experiment Name: At_Far-red-induction_P Parameter: Light Value: Far-red vs. White
  misc_feature: MA Experiment 20001248 PARAMETER Experiment Name: At_Far-red-induction_P Parameter: Organism Value: A. thaliana
  misc_feature: MA Experiment 20001248 PARAMETER Experiment Name: At_Far-red-induction_P Parameter: Plant Line Value: Columbia
  misc_feature: MA Experiment 20001248 PARAMETER Experiment Name: At_Far-red-induction_P Parameter: Timepoint (hr) Value: 4
  misc_feature: MA Experiment 20001248 PARAMETER Experiment Name: At_Far-red-induction_P Parameter: Tissue Value: Whole Plant
  misc_feature: MA Experiment ID: 20001450 Result: Down-regulated in Transcription
  misc_feature: MA Experiment 20001450 PARAMETER Experiment Name: At_Far-red-induction_P Parameter: Age (day) Value: 7
  misc_feature: MA Experiment 20001450 PARAMETER Experiment Name: At_Far-red-induction_P Parameter: Light Value: Far-red vs. White
  misc_feature: MA Experiment 20001450 PARAMETER Experiment Name: At_Far-red-induction_P Parameter: Organism Value: A. thaliana
  misc_feature: MA Experiment 20001450 PARAMETER Experiment Name: At_Far-red-induction_P Parameter: Plant Line Value: Columbia
  misc_feature: MA Experiment 20001450 PARAMETER Experiment Name: At_Far-red-induction_P Parameter: Timepoint (hr) Value: 8
  misc_feature: MA Experiment 20001450 PARAMETER Experiment Name: At_Far-red-induction_P Parameter: Tissue Value: Whole Plant
  misc_feature: MA Experiment ID: 20001556 Result: Up-regulated in Transcription
  misc_feature: MA Experiment 20001556 PARAMETER Experiment Name: At_Drought_Soil_Dry_P Parameter: Age (day) Value: 26
  misc_feature: MA Experiment 20001556 PARAMETER Experiment Name: At_Drought_Soil_Dry_P Parameter: Organism Value: A. thaliana
  misc_feature: MA Experiment 20001556 PARAMETER Experiment Name: At_Drought_Soil_Dry_P Parameter: Plant Line Value: WS
  misc_feature: MA Experiment 20001556 PARAMETER Experiment Name: At_Drought_Soil_Dry_P Parameter: Post Timepoint (hr) Value: None
  misc_feature: MA Experiment 20001556 PARAMETER Experiment Name: At_Drought_Soil_Dry_P Parameter: Post-Treatment Value: None
  misc_feature: MA Experiment 20001556 PARAMETER Experiment Name: At_Drought_Soil_Dry_P Parameter: Timepoint (day) Value: 12
  misc_feature: MA Experiment 20001556 PARAMETER Experiment Name: At_Drought_Soil_Dry_P Parameter: Treatment Value: Drought vs. No Drought
  misc_feature: MA Experiment ID: 20001558 Result: Up-regulated in Transcription
  misc_feature: MA Experiment 20001558 PARAMETER Experiment Name: At_Drought_Soil_Dry_P Parameter: Age (day) Value: 27
  misc_feature: MA Experiment 20001558 PARAMETER Experiment Name: At_Drought_Soil_Dry_P Parameter: Organism Value: A. thaliana
  misc_feature: MA Experiment 20001558 PARAMETER Experiment Name: At_Drought_Soil_Dry_P Parameter: Plant Line Value: WS
  misc_feature: MA Experiment 20001558 PARAMETER Experiment Name: At_Drought_Soil_Dry_P Parameter: Post Timepoint (hr) Value: 6
  misc_feature: MA Experiment 20001558 PARAMETER Experiment Name: At_Drought_Soil_Dry_P Parameter: Post-Treatment Value: Re-Water vs. No Drought
  misc_feature: MA Experiment 20001558 PARAMETER Experiment Name: At_Drought_Soil_Dry_P Parameter: Timepoint (day) Value: 13
  misc_feature: MA Experiment 20001558 PARAMETER Experiment Name: At_Drought_Soil_Dry_P Parameter: Treatment Value: Drought vs. No Drought
  misc_feature: MA Experiment ID: 20001560 Result: Up-regulated in Transcription
  misc_feature: MA Experiment 20001560 PARAMETER Experiment Name: At_Drought_Soil_Dry_P Parameter: Age (day) Value: 28
  misc_feature: MA Experiment 20001560 PARAMETER Experiment Name: At_Drought_Soil_Dry_P Parameter: Organism Value: A. thaliana
  misc_feature: MA Experiment 20001560 PARAMETER Experiment Name: At_Drought_Soil_Dry_P Parameter: Plant Line Value: WS
  misc_feature: MA Experiment 20001560 PARAMETER Experiment Name: At_Drought_Soil_Dry_P Parameter: Post Timepoint (hr) Value: None
  misc_feature: MA Experiment 20001560 PARAMETER Experiment Name: At_Drought_Soil_Dry_P Parameter: Post-Treatment Value: None
  misc_feature: MA Experiment 20001560 PARAMETER Experiment Name: At_Drought_Soil_Dry_P Parameter: Timepoint (day) Value: 14
  misc_feature: MA Experiment 20001560 PARAMETER Experiment Name: At_Drought_Soil_Dry_P Parameter: Treatment Value: Drought vs. No Drought
  misc_feature: MA Experiment ID: 20001757 Result: Up-regulated in Transcription
  misc_feature: MA Experiment 20001757 PARAMETER Experiment Name: At_50mM_NH4NO3_L-to-H_P Parameter: Timepoint (hr) Value: 6
  misc_feature: MA Experiment 20001757 PARAMETER Experiment Name: At_50mM_NH4NO3_L-to-H_P Parameter: Tissue Value: Leaf
  misc_feature: MA Experiment 20001757 PARAMETER Experiment Name: At_50mM_NH4NO3_L-to-H_P Parameter: Treatment Value: 50mM NH4NO3 vs 100mM Mannitol
  misc_feature: MA Experiment ID: 20001905 Result: Down-regulated in Transcription
  misc_feature: MA Experiment 20001905 PARAMETER Experiment Name: At_Drought_Reproduction_P Parameter: Age (day) Value: 40
  misc_feature: MA Experiment 20001905 PARAMETER Experiment Name: At_Drought_Reproduction_P Parameter: Organism Value: A. thaliana
  misc_feature: MA Experiment 20001905 PARAMETER Experiment Name: At_Drought_Reproduction_P Parameter: Plant Line Value: WS
  misc_feature: MA Experiment 20001905 PARAMETER Experiment Name: At_Drought_Reproduction_P Parameter: Timepoint (day) Value: 10
  misc_feature: MA Experiment 20001905 PARAMETER Experiment Name: At_Drought_Reproduction_P Parameter: Tissue Value: Rosettes
  misc_feature: MA Experiment 20001905 PARAMETER Experiment Name: At_Drought_Reproduction_P Parameter: Treatment Value: Drought vs. No Drought
  misc_feature: MA Experiment ID: 20001906 Result: Down-regulated in Transcription
  misc_feature: MA Experiment 20001906 PARAMETER Experiment Name: At_Drought_Reproduction_P Parameter: Age (day) Value: 35
  misc_feature: MA Experiment 20001906 PARAMETER Experiment Name: At_Drought_Reproduction_P Parameter: Organism Value: A. thaliana
  misc_feature: MA Experiment 20001906 PARAMETER Experiment Name: At_Drought_Reproduction_P Parameter: Plant Line Value: WS
  misc_feature: MA Experiment 20001906 PARAMETER Experiment Name: At_Drought_Reproduction_P Parameter: Timepoint (day) Value: 5
  misc_feature: MA Experiment 20001906 PARAMETER Experiment Name: At_Drought_Reproduction_P Parameter: Tissue Value: Siliques
  misc_feature: MA Experiment 20001906 PARAMETER Experiment Name: At_Drought_Reproduction_P Parameter: Treatment Value: Drought vs. No Drought
  misc_feature: MA Experiment ID: 20001911 Result: Down-regulated in Transcription
  misc_feature: MA Experiment 20001911 PARAMETER Experiment Name: At_Drought_Reproduction_P Parameter: Age (day) Value: 40
  misc_feature: MA Experiment 20001911 PARAMETER Experiment Name: At_Drought_Reproduction_P Parameter: Organism Value: A. thaliana
  misc_feature: MA Experiment 20001911 PARAMETER Experiment Name: At_Drought_Reproduction_P Parameter: Plant Line Value: WS
  misc_feature: MA Experiment 20001911 PARAMETER Experiment Name: At_Drought_Reproduction_P Parameter: Timepoint (day) Value: 10
  misc_feature: MA Experiment 20001911 PARAMETER Experiment Name: At_Drought_Reproduction_P Parameter: Tissue Value: Flowers
  misc_feature: MA Experiment 20001911 PARAMETER Experiment Name: At_Drought_Reproduction_P Parameter: Treatment Value: Drought vs. No Drought

SEQ ID NO: 33804 - protein, 451 aa, Arabidopsis thaliana; identical to SEQ ID NO: 30214
  peptide (1)..(451): Ceres Seq. ID no. 13488423
  misc_feature (120)..(345): Pfam Name: Isoflavone reductase Pfam Description: Isoflavone reductase
  misc_feature (120)..(377): Homolog of NCBI NO: 21673823 NR Description: conserved hypothetical protein [Chlorobium
  misc_feature (121)..(372): Homolog of NCBI NO: 23043621 NR Description: hypothetical protein [Trichodesmium erythraeum
  misc_feature (120)..(378): Homolog of NCBI NO: 21673318 NR Description: conserved hypothetical protein [Chlorobium
  misc_feature (195)..(442): Homolog of NCBI NO: 21328662 NR Description: conserved hypothetical protein [uncultured
  misc_feature (115)..(448): Homolog of NCBI NO: 22959007 NR Description: hypothetical protein [Rhodobacter sphaeroides]
  misc_feature (112)..(447): Homolog of NCBI NO: 21673889 NR Description: conserved hypothetical protein [Chlorobium
  misc_feature (104)..(448): Homolog of NCBI NO: 33865497 NR Description: conserved hypothetical protein [Synechococcus sp.
  misc_feature (35)..(451): Homolog of NCBI NO: 21553818 NR Description: unknown [Arabidopsis thaliana]
  misc_feature (35)..(451): Homolog of NCBI NO: 15239530 NR Description: isoflavone reductase-related [Arabidopsis
  misc_feature (35)..(451): Homolog of NCBI NO: 26449404 NR Description: unknown protein [Arabidopsis thaliana]

SEQ ID NO: 33805 - protein, 417 aa, Arabidopsis thaliana; identical to SEQ ID NO: 30215
  peptide (1)..(417): Ceres Seq. ID no. 13488424
  misc_feature (86)..(311): Pfam Name: Isoflavone reductase Pfam Description: Isoflavone reductase
  misc_feature (86)..(343): Homolog of NCBI NO: 21673823 NR Description: conserved hypothetical protein [Chlorobium
  misc_feature (87)..(338): Homolog of NCBI NO: 23043621 NR Description: hypothetical protein [Trichodesmium erythraeum
  misc_feature (86)..(344): Homolog of NCBI NO: 21673318 NR Description: conserved hypothetical protein [Chlorobium
  misc_feature (161)..(408): Homolog of NCBI NO: 21328662 NR Description: conserved hypothetical protein [uncultured
  misc_feature (81)..(414): Homolog of NCBI NO: 22959007 NR Description: hypothetical protein [Rhodobacter sphaeroides]
  misc_feature (78)..(413): Homolog of NCBI NO: 21673889 NR Description: conserved hypothetical protein [Chlorobium
  misc_feature (70)..(414): Homolog of NCBI NO: 33865497 NR Description: conserved hypothetical protein [Synechococcus sp.
  misc_feature (1)..(417): Homolog of NCBI NO: 21553818 NR Description: unknown [Arabidopsis thaliana]
  misc_feature (1)..(417): Homolog of NCBI NO: 15239530 NR Description: isoflavone reductase-related [Arabidopsis
  misc_feature (1)..(417): Homolog of NCBI NO: 26449404 NR Description: unknown protein [Arabidopsis thaliana]

SEQ ID NO: 33806 - protein, 315 aa, Arabidopsis thaliana; identical to SEQ ID NO: 30216
  peptide (1)..(315): Ceres Seq. ID no. 13488425
  misc_feature (1)..(209): Pfam Name: Isoflavone reductase Pfam Description: Isoflavone reductase
  misc_feature (1)..(241): Homolog of NCBI NO: 21673823 NR Description: conserved hypothetical protein [Chlorobium
  misc_feature (1)..(236): Homolog of NCBI NO: 23043621 NR Description: hypothetical protein [Trichodesmium erythraeum
  misc_feature (1)..(242): Homolog of NCBI NO: 21673318 NR Description: conserved hypothetical protein [Chlorobium
  misc_feature (59)..(306): Homolog of NCBI NO: 21328662 NR Description: conserved hypothetical protein [uncultured
  misc_feature (1)..(312): Homolog of NCBI NO: 22959007 NR Description: hypothetical protein [Rhodobacter sphaeroides]
  misc_feature (1)..(311): Homolog of NCBI NO: 21673889 NR Description: conserved hypothetical protein [Chlorobium
  misc_feature (1)..(312): Homolog of NCBI NO: 33865497 NR Description: conserved hypothetical protein [Synechococcus sp.
  misc_feature (1)..(315): Homolog of NCBI NO: 21553818 NR Description: unknown [Arabidopsis thaliana]
  misc_feature (1)..(315): Homolog of NCBI NO: 15239530 NR Description: isoflavone reductase-related [Arabidopsis
  misc_feature (1)..(315): Homolog of NCBI NO: 26449404 NR Description: unknown protein [Arabidopsis thaliana]

SEQ ID NO: 33807 - DNA, 716 bp, Arabidopsis thaliana; identical to SEQ ID NO: 30217
  misc_feature (1)..(716): Ceres Seq. ID no. 13499521
  misc_feature: MA Experiment ID: 108434 Result: Up-regulated in Transcription
  misc_feature: MA Experiment 108434 PARAMETER Experiment Name: At_Root_Tips_cDNA_P Parameter: Tissue Value: Root Tips
  misc_feature: MA Experiment ID: 20000794 Result: Down-regulated in Transcription
  misc_feature: MA Experiment 20000794 PARAMETER Experiment Name: At_Petals_P Parameter: Age (day) Value: 23-25 days
  misc_feature: MA Experiment 20000794 PARAMETER Experiment Name: At_Petals_P Parameter: Plant Line Value: WS
  misc_feature: MA Experiment 20000794 PARAMETER Experiment Name: At_Petals_P Parameter: Tissue Value: Petals vs. Whole plant

SEQ ID NO: 33808 - protein, 202 aa, Arabidopsis thaliana; identical to SEQ ID NO: 30218
  peptide (1)..(202): Ceres Seq. ID no. 13499522
  misc_feature (21)..(188): Homolog of NCBI NO: 17533405 NR Description: Putative protein, with a coiled coil domain, of
  misc_feature (25)..(199): Homolog of NCBI NO: 33328806 NR Description: meg-2-like protein [Rattus norvegicus]
  misc_feature (19)..(197): Homolog of NCBI NO: 24585112 NR Description: CG10470-PA [Drosophila melanogaster]
  misc_feature (20)..(188): Homolog of NCBI NO: 39587169 NR Description: Hypothetical protein CBG00622 [Caenorhabditis
  misc_feature (16)..(199): Homolog of NCBI NO: 23956188 NR Description: RIKEN cDNA 1190006A08 [Mus musculus]
  misc_feature (16)..(199): Homolog of NCBI NO: 3283893 NR Description: unknown [Homo sapiens]
  misc_feature (7)..(202): Homolog of NCBI NO: 21554161 NR Description: unknown [Arabidopsis thaliana]
  misc_feature (7)..(202): Homolog of NCBI NO: 15240119 NR Description: expressed protein [Arabidopsis thaliana]
  misc_feature (7)..(202): Homolog of NCBI NO: 21553820 NR Description: unknown [Arabidopsis thaliana]
  misc_feature (7)..(202): Homolog of NCBI NO: 18399454 NR Description: expressed protein [Arabidopsis thaliana]

SEQ ID NO: 33809 - protein, 196 aa, Arabidopsis thaliana; identical to SEQ ID NO: 30219
  peptide (1)..(196): Ceres Seq. ID no. 13499523
  misc_feature (15)..(182): Homolog of NCBI NO: 17533405 NR Description: Putative protein, with a coiled coil domain, of
  misc_feature (19)..(193): Homolog of NCBI NO: 33328806 NR Description: meg-2-like protein [Rattus norvegicus]
  misc_feature (13)..(191): Homolog of NCBI NO: 24585112 NR Description: CG10470-PA [Drosophila melanogaster]
  misc_feature (14)..(182): Homolog of NCBI NO: 39587169 NR Description: Hypothetical protein CBG00622 [Caenorhabditis
  misc_feature (10)..(193): Homolog of NCBI NO: 23956188 NR Description: RIKEN cDNA 1190006A08 [Mus musculus]
  misc_feature (10)..(193): Homolog of NCBI NO: 3283893 NR Description: unknown [Homo sapiens]
  misc_feature (1)..(196): Homolog of NCBI NO: 21554161 NR Description: unknown [Arabidopsis thaliana]
  misc_feature (1)..(196): Homolog of NCBI NO: 15240119 NR Description: expressed protein [Arabidopsis thaliana]
  misc_feature (1)..(196): Homolog of NCBI NO: 21553820 NR Description: unknown [Arabidopsis thaliana]
  misc_feature (1)..(196): Homolog of NCBI NO: 18399454 NR Description: expressed protein [Arabidopsis thaliana]

SEQ ID NO: 33810 - protein, 136 aa, Arabidopsis thaliana; identical to SEQ ID NO: 30220
  peptide (1)..(136): Ceres Seq. ID no. 13499524
  misc_feature (1)..(122): Homolog of NCBI NO: 17533405 NR Description: Putative protein, with a coiled coil domain, of
  misc_feature (1)..(133): Homolog of NCBI NO: 33328806 NR Description: meg-2-like protein [Rattus norvegicus]
  misc_feature (1)..(131): Homolog of NCBI NO: 24585112 NR Description: CG10470-PA [Drosophila melanogaster]
  misc_feature (1)..(122): Homolog of NCBI NO: 39587169 NR Description: Hypothetical protein CBG00622 [Caenorhabditis
  misc_feature (1)..(133): Homolog of NCBI NO: 23956188 NR Description: RIKEN cDNA 1190006A08 [Mus musculus]
  misc_feature (1)..(133): Homolog of NCBI NO: 3283893 NR Description: unknown [Homo sapiens]
  misc_feature (1)..(136): Homolog of NCBI NO: 21554161 NR Description: unknown [Arabidopsis thaliana]
  misc_feature (1)..(136): Homolog of NCBI NO: 15240119 NR Description: expressed protein [Arabidopsis thaliana]
  misc_feature (1)..(136): Homolog of NCBI NO: 21553820 NR Description: unknown [Arabidopsis thaliana]
  misc_feature (1)..(136): Homolog of NCBI NO: 18399454 NR Description: expressed protein [Arabidopsis thaliana]

SEQ ID NO: 33811 - DNA, 1022 bp, Arabidopsis thaliana; identical to SEQ ID NO: 30221
  misc_feature (1)..(1022): Ceres Seq. ID no. 12393636
  misc_feature: MA Experiment ID: 108434 Result: Up-regulated in Transcription
  misc_feature: MA Experiment 108434 PARAMETER Experiment Name: At_Root_Tips_cDNA_P Parameter: Tissue Value: Root Tips
  misc_feature: MA Experiment ID: 108462 Result: Down-regulated in Transcription
  misc_feature: MA Experiment 108462 PARAMETER Experiment Name: At_Germinating_Seeds_cDNA_P Parameter: Age (day) Value: 2 vs. 0
  misc_feature: MA Experiment 108462 PARAMETER Experiment Name: At_Germinating_Seeds_cDNA_P Parameter: Tissue Value: Germinating Seeds
  misc_feature: MA Experiment ID: 108463 Result: Down-regulated in Transcription
  misc_feature: MA Experiment 108463 PARAMETER Experiment Name: At_Germinating_Seeds_cDNA_P Parameter: Age (day) Value: 3 vs. 0
  misc_feature: MA Experiment 108463 PARAMETER Experiment Name: At_Germinating_Seeds_cDNA_P Parameter: Tissue Value: Germinating Seeds
  misc_feature: MA Experiment ID: 108464 Result: Down-regulated in Transcription
  misc_feature: MA Experiment 108464 PARAMETER Experiment Name: At_Germinating_Seeds_cDNA_P Parameter: Age (day) Value: 4 vs. 0
  misc_feature: MA Experiment 108464 PARAMETER Experiment Name: At_Germinating_Seeds_cDNA_P Parameter: Tissue Value: Germinating Seeds
  misc_feature: MA Experiment ID: 108573 Result: Down-regulated in Transcription
  misc_feature: MA Experiment 108573 PARAMETER Experiment Name: At_Drought_cDNA_P Parameter: Timepoint (hr) Value: 6
  misc_feature: MA Experiment 108573 PARAMETER Experiment Name: At_Drought_cDNA_P Parameter: Tissue Value: Aerial
  misc_feature: MA Experiment 108573 PARAMETER Experiment Name: At_Drought_cDNA_P Parameter: Treatment Value: Drought vs. No Drought
  misc_feature: MA Experiment ID: 108595 Result: Down-regulated in Transcription
  misc_feature: MA Experiment 108595 PARAMETER Experiment Name: At_Ler-pi_Ovule_cDNA_P Parameter: Plant Line Value: null
  misc_feature: MA Experiment ID: 20000224 Result: Up-regulated in Transcription
  misc_feature: MA Experiment ID: 20000437 Result: Down-regulated in Transcription
  misc_feature: MA Experiment 20000437 PARAMETER Experiment Name: At_Drought_P Parameter: Age (day) Value: 8
  misc_feature: MA Experiment 20000437 PARAMETER Experiment Name: At_Drought_P Parameter: Organism Value: A. thaliana
  misc_feature: MA Experiment 20000437 PARAMETER Experiment Name: At_Drought_P Parameter: Plant Line Value: WS
  misc_feature: MA Experiment 20000437 PARAMETER Experiment Name: At_Drought_P Parameter: Timepoint (hr) Value: 24
  misc_feature: MA Experiment 20000437 PARAMETER Experiment Name: At_Drought_P Parameter: Tissue Value: Whole Plant
  misc_feature: MA Experiment 20000437 PARAMETER Experiment Name: At_Drought_P Parameter: Treatment Value: Drought vs. No Drought

SEQ ID NO: 33812 - protein, 171 aa, Arabidopsis thaliana; identical to SEQ ID NO: 30222
  peptide (1)..(171): Ceres Seq. ID no. 12393637
  misc_feature (1)..(84): Homolog of NCBI NO: 34909606 NR Description: P0435B05.23 [Oryza sativa (japonica
  misc_feature (2)..(129): Homolog of NCBI NO: 23482917 NR Description: Arabidopsis thaliana At1g28510/F3M18_5
  misc_feature (4)..(164): Homolog of NCBI NO: 13376717 NR Description: OPA3 protein; Optic atrophy 3 (Iraqi-Jewish
  misc_feature (4)..(148): Homolog of NCBI NO: 27676608 NR Description: similar to OPA3 protein
  misc_feature (4)..(148): Homolog of NCBI NO: 26342969 NR Description: unnamed protein product [Mus musculus]
  misc_feature (1)..(159): Homolog of NCBI NO: 24649440 NR Description: CG13601-PA [Drosophila melanogaster]
  misc_feature (6)..(141): Homolog of NCBI NO: 19112998 NR Description: hypothetical coiled-coil protein
  misc_feature (1)..(145): Homolog of NCBI NO: 15230967 NR Description: putative protein; protein id: At3g58150.1
  misc_feature (1)..(164): Homolog of NCBI NO: 34904528 NR Description: B1066G12.9 [Oryza sativa (japonica
  misc_feature (1)..(171): Homolog of NCBI NO: 18396819 NR Description: expressed protein

SEQ ID NO: 33813 - protein, 166 aa, Arabidopsis thaliana; identical to SEQ ID NO: 30223
  peptide (1)..(166): Ceres Seq. ID no. 12393638
  misc_feature (1)..(79): Homolog of NCBI NO: 34909606 NR Description: P0435B05.23 [Oryza sativa (japonica
  misc_feature (1)..(124): Homolog of NCBI NO: 23482917 NR Description: Arabidopsis thaliana At1g28510/F3M18_5
  misc_feature (1)..(159): Homolog of NCBI NO: 13376717 NR Description: OPA3 protein; Optic atrophy 3 (Iraqi-Jewish
  misc_feature (1)..(143): Homolog of NCBI NO: 27676608 NR Description: similar to OPA3 protein
  misc_feature (1)..(143): Homolog of NCBI NO: 26342969 NR Description: unnamed protein product [Mus musculus]
  misc_feature (1)..(154): Homolog of NCBI NO: 24649440 NR Description: CG13601-PA [Drosophila melanogaster]
  misc_feature (1)..(136): Homolog of NCBI NO: 19112998 NR Description: hypothetical coiled-coil protein
  misc_feature (1)..(140): Homolog of NCBI NO: 15230967 NR Description: putative protein; protein id: At3g58150.1
  misc_feature (1)..(159): Homolog of NCBI NO: 34904528 NR Description: B1066G12.9 [Oryza sativa (japonica
  misc_feature (1)..(166): Homolog of NCBI NO: 18396819 NR Description: expressed protein

SEQ ID NO: 33814 - protein, 120 aa, Arabidopsis thaliana; identical to SEQ ID NO: 30224
  peptide (1)..(120): Ceres Seq. ID no. 12393639
  misc_feature (1)..(33): Homolog of NCBI NO: 34909606 NR Description: P0435B05.23 [Oryza sativa (japonica
  misc_feature (1)..(78): Homolog of NCBI NO: 23482917 NR Description: Arabidopsis thaliana At1g28510/F3M18_5
  misc_feature (1)..(113): Homolog of NCBI NO: 13376717 NR Description: OPA3 protein; Optic atrophy 3 (Iraqi-Jewish
  misc_feature (1)..(97): Homolog of NCBI NO: 27676608 NR Description: similar to OPA3 protein
  misc_feature (1)..(97): Homolog of NCBI NO: 26342969 NR Description: unnamed protein product [Mus musculus]
  misc_feature (1)..(108): Homolog of NCBI NO: 24649440 NR Description: CG13601-PA [Drosophila melanogaster]
  misc_feature (1)..(90): Homolog of NCBI NO: 19112998 NR Description: hypothetical coiled-coil protein
  misc_feature (1)..(94): Homolog of NCBI NO: 15230967 NR Description: putative protein; protein id: At3g58150.1
  misc_feature (1)..(113): Homolog of NCBI NO: 34904528 NR Description: B1066G12.9 [Oryza sativa (japonica
  misc_feature (1)..(120): Homolog of NCBI NO: 18396819 NR Description: expressed protein

SEQ ID NO: 33815 - DNA, 1072 bp, Arabidopsis thaliana; identical to SEQ ID NO: 30225
  misc_feature (1)..(1072): Ceres Seq. ID no. 12394892
  misc_feature: MA Experiment ID: 108461 Result: Up-regulated in Transcription
  misc_feature: MA Experiment 108461 PARAMETER Experiment Name: At_Germinating_Seeds_cDNA_P Parameter: Age (day) Value: 1 vs. 0
  misc_feature: MA Experiment 108461 PARAMETER Experiment Name: At_Germinating_Seeds_cDNA_P Parameter: Tissue Value: Germinating Seeds
  misc_feature: MA Experiment ID: 108462 Result: Up-regulated in Transcription
  misc_feature: MA Experiment 108462 PARAMETER Experiment Name: At_Germinating_Seeds_cDNA_P Parameter: Age (day) Value: 2 vs. 0
  misc_feature: MA Experiment 108462 PARAMETER Experiment Name: At_Germinating_Seeds_cDNA_P Parameter: Tissue Value: Germinating Seeds
  misc_feature: MA Experiment ID: 108464 Result: Up-regulated in Transcription
  misc_feature: MA Experiment 108464 PARAMETER Experiment Name: At_Germinating_Seeds_cDNA_P Parameter: Age (day) Value: 4 vs. 0
  misc_feature: MA Experiment 108464 PARAMETER Experiment Name: At_Germinating_Seeds_cDNA_P Parameter: Tissue Value: Germinating Seeds
  misc_feature: MA Experiment ID: 20000112 Result: Up-regulated in Transcription
  misc_feature: MA Experiment 20000112 PARAMETER Experiment Name: At_42deg_Heat_cDNA_P Parameter: Temperature (deg C) Value: 42 vs. 22
  misc_feature: MA Experiment 20000112 PARAMETER Experiment Name: At_42deg_Heat_cDNA_P Parameter: Timepoint (hr) Value: 2
  misc_feature: MA Experiment 20000112 PARAMETER Experiment Name: At_42deg_Heat_cDNA_P Parameter: Tissue Value: Aerial
  misc_feature: MA Experiment ID: 20000144 Result: Up-regulated in Transcription
  misc_feature: MA Experiment 20000144 PARAMETER Experiment Name: At_42deg_Heat_cDNA_P Parameter: Temperature (deg C) Value: 42 vs. 22
  misc_feature: MA Experiment 20000144 PARAMETER Experiment Name: At_42deg_Heat_cDNA_P Parameter: Timepoint (hr) Value: 1
  misc_feature: MA Experiment 20000144 PARAMETER Experiment Name: At_42deg_Heat_cDNA_P Parameter: Tissue Value: Aerial

SEQ ID NO: 33816 - protein, 288 aa, Arabidopsis thaliana; identical to SEQ ID NO: 30226
  peptide (1)..(288): Ceres Seq. ID no. 12394893
  misc_feature (22)..(260): Pfam Name: Tetraspanin family Pfam Description: Tetraspanin family
  misc_feature (22)..(260): Pfam Name: Tetraspanin family Pfam Description: Tetraspanin family
  misc_feature (23)..(278): Homolog of NCBI NO: 15234743 NR Description: senescence-associated protein homolog
  misc_feature (24)..(275): Homolog of NCBI NO: 15238641 NR Description: senescence-associated protein - like; protein id:
  misc_feature (20)..(278): Homolog of NCBI NO: 15231187 NR Description: putative protein
  misc_feature (22)..(284): Homolog of NCBI NO: 3551954 NR Description: senescence-associated protein 5 [Hemerocallis
  misc_feature (22)..(287): Homolog of NCBI NO: 29367553 NR Description: senescence-associated protein-like protein
  misc_feature (23)..(278): Homolog of NCBI NO: 15234743 NR Description: senescence-associated protein homolog
  misc_feature (20)..(278): Homolog of NCBI NO: 15231187 NR Description: putative protein
  misc_feature (22)..(287): Homolog of NCBI NO: 29367553 NR Description: senescence-associated protein-like protein
  misc_feature (20)..(288): Homolog of NCBI NO: 15237490 NR Description: senescence-associated protein 5-like protein
  misc_feature (20)..(288): Homolog of NCBI NO: 17979386 NR Description: putative senescence-associated protein 5
  misc_feature (20)..(287): Homolog of NCBI NO: 15224802 NR Description: putative senescence-associated protein 5; protein
  misc_feature (23)..(287): Homolog of NCBI NO: 20197174 NR Description: hypothetical protein [Arabidopsis thaliana]
  misc_feature (23)..(273): Homolog of NCBI NO: 15234374 NR Description: senescence-associated protein -like
  misc_feature (22)..(284): Homolog of NCBI NO: 3551954 NR Description: senescence-associated protein 5 [Hemerocallis
  misc_feature (24)..(275): Homolog of NCBI NO: 15238641 NR Description: senescence-associated protein - like; protein id:
  misc_feature (23)..(273): Homolog of NCBI NO: 15234374 NR Description: senescence-associated protein -like
  misc_feature (23)..(287): Homolog of NCBI NO: 20197174 NR Description: hypothetical protein [Arabidopsis thaliana]
  misc_feature (20)..(287): Homolog of NCBI NO: 15224802 NR Description: putative senescence-associated protein 5; protein
  misc_feature (20)..(288): Homolog of NCBI NO: 17979386 NR Description: putative senescence-associated protein 5
  misc_feature (20)..(288): Homolog of NCBI NO: 15237490 NR Description: senescence-associated protein 5-like protein

SEQ ID NO: 33817 - protein, 269 aa, Arabidopsis thaliana; identical to SEQ ID NO: 30227
  peptide (1)..(269): Ceres Seq. ID no. 12394894
  misc_feature (3)..(241): Pfam Name: Tetraspanin family Pfam Description: Tetraspanin family
  misc_feature (3)..(241): Pfam Name: Tetraspanin family Pfam Description: Tetraspanin family
  misc_feature (4)..(259): Homolog of NCBI NO: 15234743 NR Description: senescence-associated protein homolog
  misc_feature (5)..(256): Homolog of NCBI NO: 15238641 NR Description: senescence-associated protein - like; protein id:
  misc_feature (1)..(259): Homolog of NCBI NO: 15231187 NR Description: putative protein
  misc_feature (3)..(265): Homolog of NCBI NO: 3551954 NR Description: senescence-associated protein 5 [Hemerocallis
  misc_feature (3)..(268): Homolog of NCBI NO: 29367553 NR Description: senescence-associated protein-like protein
  misc_feature (4)..(259): Homolog of NCBI NO: 15234743 NR Description: senescence-associated protein homolog
  misc_feature (1)..(259): Homolog of NCBI NO: 15231187 NR Description: putative protein
  misc_feature (3)..(268): Homolog of NCBI NO: 29367553 NR Description: senescence-associated protein-like protein
  misc_feature (1)..(269): Homolog of NCBI NO: 15237490 NR Description: senescence-associated protein 5-like protein
  misc_feature (1)..(269): Homolog of NCBI NO: 17979386 NR Description: putative senescence-associated protein 5
  misc_feature (1)..(268): Homolog of NCBI NO: 15224802 NR Description: putative senescence-associated protein 5; protein
  misc_feature (4)..(268): Homolog of NCBI NO: 20197174 NR Description: hypothetical protein [Arabidopsis thaliana]
  misc_feature (4)..(254): Homolog of NCBI NO: 15234374 NR Description: senescence-associated protein -like
  misc_feature (3)..(265): Homolog of NCBI NO: 3551954 NR Description: senescence-associated protein 5 [Hemerocallis
  misc_feature (5)..(256): Homolog of NCBI NO: 15238641 NR Description: senescence-associated protein - like; protein id:
  misc_feature (4)..(254): Homolog of NCBI NO: 15234374 NR Description: senescence-associated protein -like
  misc_feature (4)..(268): Homolog of NCBI NO: 20197174 NR Description: hypothetical protein [Arabidopsis thaliana]
  misc_feature (1)..(268): Homolog of NCBI NO: 15224802 NR Description: putative senescence-associated protein 5; protein
  misc_feature (1)..(269): Homolog of NCBI NO: 17979386 NR Description: putative senescence-associated protein 5
  misc_feature (1)..(269): Homolog of NCBI NO: 15237490 NR Description: senescence-associated protein 5-like protein

SEQ ID NO: 33818 - protein, 192 aa, Arabidopsis thaliana; identical to SEQ ID NO: 30228
  peptide (1)..(192): Ceres Seq. ID no. 12394895
  misc_feature (1)..(164): Pfam Name: Tetraspanin family Pfam Description: Tetraspanin family
  misc_feature (1)..(164): Pfam Name: Tetraspanin family Pfam Description: Tetraspanin family
  misc_feature (1)..(182): Homolog of NCBI NO: 15234743 NR Description: senescence-associated protein homolog
  misc_feature (1)..(179): Homolog of NCBI NO: 15238641 NR Description: senescence-associated protein - like; protein id:
  misc_feature (1)..(182): Homolog of NCBI NO: 15231187 NR Description: putative protein
  misc_feature (1)..(188): Homolog of NCBI NO: 3551954 NR Description: senescence-associated protein 5 [Hemerocallis
  misc_feature (1)..(191): Homolog of NCBI NO: 29367553 NR Description: senescence-associated protein-like protein
  misc_feature (1)..(182): Homolog of NCBI NO: 15234743 NR Description: senescence-associated protein homolog
  misc_feature (1)..(182): Homolog of NCBI NO: 15231187 NR Description: putative protein
  misc_feature (1)..(191): Homolog of NCBI NO: 29367553 NR Description: senescence-associated protein-like protein
  misc_feature (1)..(192): Homolog of NCBI NO: 15237490 NR Description: senescence-associated protein 5-like protein
  misc_feature (1)..(192): Homolog of NCBI NO: 17979386 NR Description: putative senescence-associated protein 5
  misc_feature (1)..(191): Homolog of NCBI NO: 15224802 NR Description: putative senescence-associated protein 5; protein
  misc_feature (1)..(191): Homolog of NCBI NO: 20197174 NR Description: hypothetical protein [Arabidopsis thaliana]
  misc_feature (1)..(177): Homolog of NCBI NO: 15234374 NR Description: senescence-associated protein -like
  misc_feature (1)..(188): Homolog of NCBI NO: 3551954 NR Description: senescence-associated protein 5 [Hemerocallis
  misc_feature (1)..(179): Homolog of NCBI NO: 15238641 NR Description: senescence-associated protein - like; protein id:
  misc_feature (1)..(177): Homolog of NCBI NO: 15234374 NR Description: senescence-associated protein -like
  misc_feature (1)..(191): Homolog of NCBI NO: 20197174 NR Description: hypothetical protein [Arabidopsis thaliana]
  misc_feature (1)..(191): Homolog of NCBI NO: 15224802 NR Description: putative senescence-associated protein 5; protein
  misc_feature (1)..(192): Homolog of NCBI NO: 17979386 NR Description: putative senescence-associated protein 5
  misc_feature (1)..(192): Homolog of NCBI NO: 15237490 NR Description: senescence-associated protein 5-like protein

SEQ ID NO: 33819 - DNA, 1209 bp, Arabidopsis thaliana; identical to SEQ ID NO: 30229
  misc_feature (1)..(1209): Ceres Seq. ID no. 12334293
  misc_feature: MA Experiment ID: 20000179 Result: Up-regulated in Transcription
  misc_feature: MA Experiment 20000179 PARAMETER Experiment Name: At_Germinating_Seeds_P Parameter: Age (hr) Value: 6 vs. 0
  misc_feature: MA Experiment 20000179 PARAMETER Experiment Name: At_Germinating_Seeds_P Parameter: Tissue Value: Germinating Seeds
  misc_feature: MA Experiment ID: 20000185 Result: Up-regulated in Transcription
  misc_feature: MA Experiment 20000185 PARAMETER Experiment Name: At_Roots__P Parameter: Age (day) Value: 7 vs. 21
  misc_feature: MA Experiment 20000185 PARAMETER Experiment Name: At_Roots__P Parameter: Organism Value: A. thaliana
  misc_feature: MA Experiment 20000185 PARAMETER Experiment Name: At_Roots__P Parameter: Tissue Value: Roots vs. Whole Plant
  misc_feature: MA Experiment ID: 20000439 Result: Up-regulated in Transcription
  misc_feature: MA Experiment 20000439 PARAMETER Experiment Name: At_Roots__P Parameter: Age (day) Value: 14 vs. 21
  misc_feature: MA Experiment 20000439 PARAMETER Experiment Name: At_Roots__P Parameter: Organism Value: A. thaliana
  misc_feature: MA Experiment 20000439 PARAMETER Experiment Name: At_Roots__P Parameter: Tissue Value: Roots vs. Whole Plant
  misc_feature: MA Experiment ID: 20001554 Result: Up-regulated in Transcription
  misc_feature: MA Experiment 20001554 PARAMETER Experiment Name: At_Drought_Soil_Dry_P Parameter: Age (day) Value: 21
  misc_feature: MA Experiment 20001554 PARAMETER Experiment Name: At_Drought_Soil_Dry_P Parameter: Organism Value: A. thaliana
  misc_feature: MA Experiment 20001554 PARAMETER Experiment Name: At_Drought_Soil_Dry_P Parameter: Plant Line Value: WS
  misc_feature: MA Experiment 20001554 PARAMETER Experiment Name: At_Drought_Soil_Dry_P Parameter: Post Timepoint (hr) Value: None
  misc_feature: MA Experiment 20001554 PARAMETER Experiment Name: At_Drought_Soil_Dry_P Parameter: Post-Treatment Value: None
  misc_feature: MA Experiment 20001554 PARAMETER Experiment Name: At_Drought_Soil_Dry_P Parameter: Timepoint (day) Value: 7
  misc_feature: MA Experiment 20001554 PARAMETER Experiment Name: At_Drought_Soil_Dry_P Parameter: Treatment Value: Drought vs. No Drought
  misc_feature: MA Experiment ID: 20001555 Result: Up-regulated in Transcription
  misc_feature: MA Experiment 20001555 PARAMETER Experiment Name: At_Drought_Soil_Dry_P Parameter: Age (day) Value: 24
  misc_feature: MA Experiment 20001555 PARAMETER Experiment Name: At_Drought_Soil_Dry_P Parameter: Organism Value: A. thaliana
  misc_feature: MA Experiment 20001555 PARAMETER Experiment Name: At_Drought_Soil_Dry_P Parameter: Plant Line Value: WS
  misc_feature: MA Experiment 20001555 PARAMETER Experiment Name: At_Drought_Soil_Dry_P Parameter: Post Timepoint (hr) Value: None
  misc_feature: MA Experiment 20001555 PARAMETER Experiment Name: At_Drought_Soil_Dry_P Parameter: Post-Treatment Value: None
  misc_feature: MA Experiment 20001555 PARAMETER Experiment Name: At_Drought_Soil_Dry_P Parameter: Timepoint (day) Value: 10
  misc_feature: MA Experiment 20001555 PARAMETER Experiment Name: At_Drought_Soil_Dry_P Parameter: Treatment Value: Drought vs. No Drought
  misc_feature: MA Experiment ID: 20001556 Result: Up-regulated in Transcription
  misc_feature: MA Experiment 20001556 PARAMETER Experiment Name: At_Drought_Soil_Dry_P Parameter: Age (day) Value: 26
  misc_feature: MA Experiment 20001556 PARAMETER Experiment Name: At_Drought_Soil_Dry_P Parameter: Organism Value: A. thaliana
  misc_feature: MA Experiment 20001556 PARAMETER Experiment Name: At_Drought_Soil_Dry_P Parameter: Plant Line Value: WS
  misc_feature: MA Experiment 20001556 PARAMETER Experiment Name: At_Drought_Soil_Dry_P Parameter: Post Timepoint (hr) Value: None
  misc_feature: MA Experiment 20001556 PARAMETER Experiment Name: At_Drought_Soil_Dry_P Parameter: Post-Treatment Value: None
  misc_feature: MA Experiment 20001556 PARAMETER Experiment Name: At_Drought_Soil_Dry_P Parameter: Timepoint (day) Value: 12
  misc_feature: MA Experiment 20001556 PARAMETER Experiment Name: At_Drought_Soil_Dry_P Parameter: Treatment Value: Drought vs. No Drought

SEQ ID NO: 33820 - protein, 308 aa, Arabidopsis thaliana; identical to SEQ ID NO: 30230
  peptide (1)..(308): Ceres Seq. ID no. 12334294
  misc_feature (182)..(205): Pfam Name: Leucine Rich Repeat Pfam Description: Leucine Rich Repeat
  misc_feature (41)..(299): Homolog of NCBI NO: 17064966 NR Description: receptor-like protein kinase [Arabidopsis
  misc_feature (41)..(299): Homolog of NCBI NO: 8777368 NR Description: receptor-like protein kinase [Arabidopsis
  misc_feature (42)..(299): Homolog of NCBI NO: 15222519 NR Description: leucine-rich repeat transmembrane protein kinase,
  misc_feature (42)..(280): Homolog of NCBI NO: 38344230 NR Description: OJ991113_30.7 [Oryza sativa (japonica
  misc_feature (42)..(291): Homolog of NCBI NO: 15223445 NR Description: leucine-rich repeat transmembrane protein kinase,
  misc_feature (41)..(293): Homolog of NCBI NO: 15233004 NR Description: leucine-rich repeat transmembrane protein kinase,
  misc_feature (37)..(308): Homolog of NCBI NO: 15229606 NR Description: leucine rich repeat protein family; protein id:
  misc_feature (52)..(308): Homolog of NCBI NO: 7486525 NR Description: hypothetical protein F6H11.60 - Arabidopsis
  misc_feature (30)..(308): Homolog of NCBI NO: 15239162 NR Description: leucine rich repeat protein family
  misc_feature (30)..(308): Homolog of NCBI NO: 21553823 NR Description: unknown [Arabidopsis thaliana]

SEQ ID NO: 33821 - protein, 279 aa, Arabidopsis thaliana; identical to SEQ ID NO: 30231
  peptide (1)..(279): Ceres Seq. ID no. 12334295
  misc_feature (153)..(176): Pfam Name: Leucine Rich Repeat Pfam Description: Leucine Rich Repeat
  misc_feature (12)..(270): Homolog of NCBI NO: 17064966 NR Description: receptor-like protein kinase [Arabidopsis
  misc_feature (12)..(270): Homolog of NCBI NO: 8777368 NR Description: receptor-like protein kinase [Arabidopsis
  misc_feature (13)..(270): Homolog of NCBI NO: 15222519 NR Description: leucine-rich repeat transmembrane protein kinase,
  misc_feature (13)..(251): Homolog of NCBI NO: 38344230 NR Description: OJ991113_30.7 [Oryza sativa (japonica
  misc_feature (13)..(262): Homolog of NCBI NO: 15223445 NR Description: leucine-rich repeat transmembrane protein kinase,
  misc_feature (12)..(264): Homolog of NCBI NO: 15233004 NR Description: leucine-rich repeat transmembrane protein kinase,
  misc_feature (8)..(279): Homolog of NCBI NO: 15229606 NR Description: leucine rich repeat protein family; protein id:
  misc_feature (23)..(279): Homolog of NCBI NO: 7486525 NR Description: hypothetical protein F6H11.60 - Arabidopsis
  misc_feature (1)..(279): Homolog of NCBI NO: 15239162 NR Description: leucine rich repeat protein family
  misc_feature (1)..(279): Homolog of NCBI NO: 21553823 NR Description: unknown [Arabidopsis thaliana]

SEQ ID NO: 33822 - DNA, 1609 bp, Arabidopsis thaliana; identical to SEQ ID NO: 30232
  misc_feature (1)..(1609): Ceres Seq. ID no. 13491644
  misc_feature: MA Experiment ID: 108579 Result: Down-regulated in Transcription
  misc_feature: MA Experiment 108579 PARAMETER Experiment Name: At_4deg_Cold_cDNA_P Parameter: Temperature (deg C) Value: 4 vs. 22
  misc_feature: MA Experiment 108579 PARAMETER Experiment Name: At_4deg_Cold_cDNA_P Parameter: Timepoint (hr) Value: 6
  misc_feature: MA Experiment 108579 PARAMETER Experiment Name: At_4deg_Cold_cDNA_P Parameter: Tissue Value: Aerial
  misc_feature: MA Experiment ID: 20000264 Result: Up-regulated in Transcription
  misc_feature: MA Experiment 20000264 PARAMETER Experiment Name: At_Open_Flower_P Parameter: Age (day) Value: 21
  misc_feature: MA Experiment 20000264 PARAMETER Experiment Name: At_Open_Flower_P Parameter: Plant Line Value: WS
  misc_feature: MA Experiment 20000264 PARAMETER Experiment Name: At_Open_Flower_P Parameter: Tissue Value: Open Flower vs. Whole Plant
  misc_feature: MA Experiment ID: 20000265 Result: Up-regulated in Transcription
  misc_feature: MA Experiment 20000265 PARAMETER Experiment Name: At_Open_Flower_P Parameter: Age (day) Value: 21
  misc_feature: MA Experiment 20000265 PARAMETER Experiment Name: At_Open_Flower_P Parameter: Plant Line Value: WS
  misc_feature: MA Experiment 20000265 PARAMETER Experiment Name: At_Open_Flower_P Parameter: Tissue Value: Closed Flower vs. Whole Plant
  misc_feature: MA Experiment ID: 20000286 Result: Up-regulated in Transcription
  misc_feature: MA Experiment 20000286 PARAMETER Experiment Name: At_Open_Flower_P Parameter: Age (day) Value: 21
  misc_feature: MA Experiment 20000286 PARAMETER Experiment Name: At_Open_Flower_P Parameter: Plant Line Value: WS
  misc_feature: MA Experiment 20000286 PARAMETER Experiment Name: At_Open_Flower_P Parameter: Tissue Value: Half Open vs. Whole Plant
  misc_feature: MA Experiment ID: 20000794 Result: Up-regulated in Transcription
  misc_feature: MA Experiment 20000794 PARAMETER Experiment Name: At_Petals_P Parameter: Age (day) Value: 23-25 days
  misc_feature: MA Experiment 20000794 PARAMETER Experiment Name: At_Petals_P Parameter: Plant Line Value: WS
  misc_feature: MA Experiment 20000794 PARAMETER Experiment Name: At_Petals_P Parameter: Tissue Value: Petals vs. Whole plant
  misc_feature: MA Experiment ID: 20001757 Result: Down-regulated in Transcription
  misc_feature: MA Experiment 20001757 PARAMETER Experiment Name: At_50mM_NH4NO3_L-to-H_P Parameter: Timepoint (hr) Value: 6
  misc_feature: MA Experiment 20001757 PARAMETER Experiment Name: At_50mM_NH4NO3_L-to-H_P Parameter: Tissue Value: Leaf
  misc_feature: MA Experiment 20001757 PARAMETER Experiment Name: At_50mM_NH4NO3_L-to-H_P Parameter: Treatment Value: 50mM NH4NO3 vs 100mM Mannitol

SEQ ID NO: 33823 - protein, 443 aa, Arabidopsis thaliana; identical to SEQ ID NO: 30233
  peptide (1)..(443): Ceres Seq. ID no. 13491645
  misc_feature (40)..(410): Homolog of NCBI NO: 34908640 NR Description: P0677H08.20 [Oryza sativa (japonica
  misc_feature (12)..(441): Homolog of NCBI NO: 11282358 NR Description: hypothetical protein F17J16.20 - Arabidopsis
  misc_feature (94)..(443): Homolog of NCBI NO: 25360882 NR Description: MRS2-5 [Arabidopsis thaliana]
  misc_feature (94)..(443): Homolog of NCBI NO: 15227679 NR Description: MRS2-5 protein [Arabidopsis thaliana]
  misc_feature (19)..(441): Homolog of NCBI NO: 18411070 NR Description: expressed protein [Arabidopsis thaliana]
  misc_feature (5)..(140): Homolog of NCBI NO: 38345033 NR Description: OSJNBa0029H02.17 [Oryza sativa (japonica
  misc_feature (174)..(443): Homolog of NCBI NO: 38345033 NR Description: OSJNBa0029H02.17 [Oryza sativa (japonica
  misc_feature (1)..(443): Homolog of NCBI NO: 18394312 NR Description: expressed protein [Arabidopsis thaliana]
  misc_feature (1)..(443): Homolog of NCBI NO: 18412911 NR Description: expressed protein [Arabidopsis thaliana]
  misc_feature (1)..(443): Homolog of NCBI NO: 21553824 NR Description: unknown [Arabidopsis thaliana]

SEQ ID NO: 33824 - protein, 372 aa, Arabidopsis thaliana; identical to SEQ ID NO: 30234
  peptide (1)..(372): Ceres Seq. ID no. 13491646
  misc_feature (1)..(339): Homolog of NCBI NO: 34908640 NR Description: P0677H08.20 [Oryza sativa (japonica
  misc_feature (1)..(370): Homolog of NCBI NO: 11282358 NR Description: hypothetical protein F17J16.20 - Arabidopsis
  misc_feature (23)..(372): Homolog of NCBI NO: 25360882 NR Description: MRS2-5 [Arabidopsis thaliana]
  misc_feature (23)..(372): Homolog of NCBI NO: 15227679 NR Description: MRS2-5 protein [Arabidopsis thaliana]
  misc_feature (1)..(370): Homolog of NCBI NO: 18411070 NR Description: expressed protein [Arabidopsis thaliana]
  misc_feature (1)..(69): Homolog of NCBI NO: 38345033 NR Description: OSJNBa0029H02.17 [Oryza sativa (japonica
  misc_feature (103)..(372): Homolog of NCBI NO: 38345033 NR Description: OSJNBa0029H02.17 [Oryza sativa (japonica
  misc_feature (1)..(372): Homolog of NCBI NO: 18394312 NR Description: expressed protein [Arabidopsis thaliana]
  misc_feature (1)..(372): Homolog of NCBI NO: 18412911 NR Description: expressed protein [Arabidopsis thaliana]
  misc_feature (1)..(372): Homolog of NCBI NO: 21553824 NR Description: unknown [Arabidopsis thaliana]

SEQ ID NO: 33825 - protein, 371 aa, Arabidopsis thaliana; identical to SEQ ID NO: 30235
  peptide (1)..(371): Ceres Seq. ID no. 13491647
  misc_feature (1)..(338): Homolog of NCBI NO: 34908640 NR Description: P0677H08.20 [Oryza sativa (japonica
  misc_feature (1)..(369): Homolog of NCBI NO: 11282358 NR Description: hypothetical protein F17J16.20 - Arabidopsis
  misc_feature (22)..(371): Homolog of NCBI NO: 25360882 NR Description: MRS2-5 [Arabidopsis thaliana]
  misc_feature (22)..(371): Homolog of NCBI NO: 15227679 NR Description: MRS2-5 protein [Arabidopsis thaliana]
  misc_feature (1)..(369): Homolog of NCBI NO: 18411070 NR Description: expressed protein [Arabidopsis thaliana]
  misc_feature (1)..(68): Homolog of NCBI NO: 38345033 NR Description: OSJNBa0029H02.17 [Oryza sativa (japonica
  misc_feature (102)..(371): Homolog of NCBI NO: 38345033 NR Description: OSJNBa0029H02.17 [Oryza sativa (japonica
  misc_feature (1)..(371): Homolog of NCBI NO: 18394312 NR Description: expressed protein [Arabidopsis thaliana]
  misc_feature (1)..(371): Homolog of NCBI NO: 18412911 NR Description: expressed protein [Arabidopsis thaliana]
  misc_feature (1)..(371): Homolog of NCBI NO: 21553824 NR Description: unknown [Arabidopsis thaliana]

SEQ ID NO: 33826 - DNA, 677 bp, Arabidopsis thaliana; identical to SEQ ID NO: 23436
  misc_feature (1)..(677): Ceres Seq. ID no. 12561632
  misc_feature: MA Experiment ID: 20000166 Result: Down-regulated in Transcription
  misc_feature: MA Experiment 20000166 PARAMETER Experiment Name: At_100uM_ABA_P Parameter: Age (day) Value: 14
  misc_feature: MA Experiment 20000166 PARAMETER Experiment Name: At_100uM_ABA_P Parameter: Organism Value: A. thaliana
  misc_feature: MA Experiment 20000166 PARAMETER Experiment Name: At_100uM_ABA_P Parameter: Plant Line Value: WS
  misc_feature: MA Experiment 20000166 PARAMETER Experiment Name: At_100uM_ABA_P Parameter: Timepoint (hr) Value: 1
  misc_feature: MA Experiment 20000166 PARAMETER Experiment Name: At_100uM_ABA_P Parameter: Tissue Value: Aerial
  misc_feature: MA Experiment 20000166 PARAMETER Experiment Name: At_100uM_ABA_P Parameter: Treatment Value: 100uM ABA vs. No Treatment
  misc_feature: MA Experiment ID: 20000179 Result: Up-regulated in Transcription
  misc_feature: MA Experiment 20000179 PARAMETER Experiment Name: At_Germinating_Seeds_P Parameter: Age (hr) Value: 6 vs. 0
  misc_feature: MA Experiment 20000179 PARAMETER Experiment Name: At_Germinating_Seeds_P Parameter: Tissue Value: Germinating Seeds
  misc_feature: MA Experiment ID: 20000180 Result: Up-regulated in Transcription
  misc_feature: MA Experiment 20000180 PARAMETER Experiment Name: At_Germinating_Seeds_P Parameter: Age (hr) Value: 24 vs. 0
  misc_feature: MA Experiment 20000180 PARAMETER Experiment Name: At_Germinating_Seeds_P Parameter: Tissue Value: Germinating Seeds
  misc_feature: MA Experiment ID: 20000182 Result: Down-regulated in Transcription
  misc_feature: MA Experiment 20000182 PARAMETER Experiment Name: At_2mM_SA_P Parameter: Age (day) Value: 14
  misc_feature: MA Experiment 20000182 PARAMETER Experiment Name: At_2mM_SA_P Parameter: Organism Value: A. thaliana
  misc_feature: MA Experiment 20000182 PARAMETER Experiment Name: At_2mM_SA_P Parameter: Plant Line Value: WS
  misc_feature: MA Experiment 20000182 PARAMETER Experiment Name: At_2mM_SA_P Parameter: Timepoint (hr) Value: 6
  misc_feature: MA Experiment 20000182 PARAMETER Experiment Name: At_2mM_SA_P Parameter: Tissue Value: Aerial
  misc_feature: MA Experiment 20000182 PARAMETER Experiment Name: At_2mM_SA_P Parameter: Treatment Value: 2mM SA vs. No Treatment
  misc_feature: MA Experiment ID: 20000185 Result: Down-regulated in Transcription
  misc_feature: MA Experiment 20000185 PARAMETER Experiment Name: At_Roots__P Parameter: Age (day) Value: 7 vs. 21
  misc_feature: MA Experiment 20000185 PARAMETER Experiment Name: At_Roots__P Parameter: Organism Value: A. thaliana
  misc_feature: MA Experiment 20000185 PARAMETER Experiment Name: At_Roots__P Parameter: Tissue Value: Roots vs. Whole Plant
  misc_feature: MA Experiment ID: 20000227 Result: Up-regulated in Transcription
  misc_feature: MA Experiment 20000227 PARAMETER Experiment Name: At_Root-Tips-vs-Tops_P Parameter: Tissue Value: Root Tips vs. Root Tops
  misc_feature: MA Experiment ID: 20000234 Result: Down-regulated in Transcription
  misc_feature: MA Experiment 20000234 PARAMETER Experiment Name: At_Siliques_P Parameter: Age (day) Value: 21
  misc_feature: MA Experiment 20000234 PARAMETER Experiment Name: At_Siliques_P Parameter: Organism Value: A. thaliana
  misc_feature: MA Experiment 20000234 PARAMETER Experiment Name: At_Siliques_P Parameter: Plant Line Value: WS
  misc_feature: MA Experiment 20000234 PARAMETER Experiment Name: At_Siliques_P Parameter: Tissue Value: Less Than 5mm Siliques vs. Whole Plant
  misc_feature: MA Experiment ID: 20000264 Result: Down-regulated in Transcription
  misc_feature: MA Experiment 20000264 PARAMETER Experiment Name: At_Open_Flower_P Parameter: Age (day) Value: 21
  misc_feature: MA Experiment 20000264 PARAMETER Experiment Name: At_Open_Flower_P Parameter: Plant Line Value: WS
  misc_feature: MA Experiment 20000264 PARAMETER Experiment Name: At_Open_Flower_P Parameter: Tissue Value: Open Flower vs. Whole Plant
  misc_feature: MA Experiment ID: 20000265 Result: Down-regulated in Transcription
  misc_feature: MA Experiment 20000265 PARAMETER Experiment Name: At_Open_Flower_P Parameter: Age (day) Value: 21
  misc_feature: MA Experiment 20000265 PARAMETER Experiment Name: At_Open_Flower_P Parameter: Plant Line Value: WS
  misc_feature: MA Experiment 20000265 PARAMETER Experiment Name: At_Open_Flower_P Parameter: Tissue Value: Closed Flower vs. Whole Plant
  misc_feature: MA Experiment ID: 20000267 Result: Down-regulated in Transcription
  misc_feature: MA Experiment 20000267 PARAMETER Experiment Name: At_Drought_P Parameter: Age (day) Value: 7
  misc_feature: MA Experiment 20000267 PARAMETER Experiment Name: At_Drought_P Parameter: Organism Value: A. thaliana
  misc_feature: MA Experiment 20000267 PARAMETER Experiment Name: At_Drought_P Parameter: Plant Line Value: WS
  misc_feature: MA Experiment 20000267 PARAMETER Experiment Name: At_Drought_P Parameter: Timepoint (hr) Value: 6
  misc_feature: MA Experiment 20000267 PARAMETER Experiment Name: At_Drought_P Parameter: Tissue Value: Whole Plant
  misc_feature: MA Experiment 20000267 PARAMETER Experiment Name: At_Drought_P Parameter: Treatment Value: Drought vs. No Drought
  misc_feature: MA Experiment ID: 20000268 Result: Down-regulated in Transcription
  misc_feature: MA Experiment 20000268 PARAMETER Experiment Name: At_100mM_NaCl__P Parameter: Age (day) Value: 14
  misc_feature: MA Experiment 20000268 PARAMETER Experiment Name: At_100mM_NaCl__P Parameter: Organism Value: A. thaliana
  misc_feature: MA Experiment 20000268 PARAMETER Experiment Name: At_100mM_NaCl__P Parameter: Plant Line Value: WS
  misc_feature: MA Experiment 20000268 PARAMETER Experiment Name: At_100mM_NaCl__P Parameter: Timepoint (hr) Value: 6
  misc_feature: MA Experiment 20000268 PARAMETER Experiment Name: At_100mM_NaCl__P Parameter: Tissue Value: Whole Plant
  misc_feature: MA Experiment 20000268 PARAMETER Experiment Name: At_100mM_NaCl__P Parameter: Treatment Value: 100mM NaCl vs. No Treatment
  misc_feature: MA Experiment ID: 20000286 Result: Down-regulated in Transcription
  misc_feature: MA Experiment 20000286 PARAMETER Experiment Name: At_Open_Flower_P Parameter: Age (day) Value: 21
  misc_feature: MA Experiment 20000286 PARAMETER Experiment Name: At_Open_Flower_P Parameter: Plant Line Value: WS
  misc_feature: MA Experiment 20000286 PARAMETER Experiment Name: At_Open_Flower_P Parameter: Tissue Value: Half Open vs. Whole Plant
  misc_feature: MA Experiment ID: 20000308 Result: Down-regulated in Transcription
  misc_feature: MA Experiment 20000308 PARAMETER Experiment Name: At_100mM_NaCl__P Parameter: Age (day) Value: 17
  misc_feature: MA Experiment 20000308 PARAMETER Experiment Name: At_100mM_NaCl__P Parameter: Organism Value: A. thaliana
  misc_feature: MA Experiment 20000308 PARAMETER Experiment Name: At_100mM_NaCl__P Parameter: Plant Line Value: WS
  misc_feature: MA Experiment 20000308 PARAMETER Experiment Name: At_100mM_NaCl__P Parameter: Timepoint (hr) Value: 72
  misc_feature: MA Experiment 20000308 PARAMETER Experiment Name: At_100mM_NaCl__P Parameter: Tissue Value: Whole Plant
  misc_feature: MA Experiment 20000308 PARAMETER Experiment Name: At_100mM_NaCl__P Parameter: Treatment Value: 100mM NaCl vs. No Treatment
  misc_feature: MA Experiment ID: 20000436 Result: Down-regulated in Transcription
  misc_feature: MA Experiment 20000436 PARAMETER Experiment Name: At_Drought_P Parameter: Age (day) Value: 7
  misc_feature: MA Experiment 20000436 PARAMETER Experiment Name: At_Drought_P Parameter: Organism Value: A. thaliana
  misc_feature: MA Experiment 20000436 PARAMETER Experiment Name: At_Drought_P Parameter: Plant Line Value: WS
  misc_feature: MA Experiment 20000436 PARAMETER Experiment Name: At_Drought_P Parameter: Timepoint (hr) Value: 12
  misc_feature: MA Experiment 20000436 PARAMETER Experiment Name: At_Drought_P Parameter: Tissue Value: Whole Plant
  misc_feature: MA Experiment 20000436 PARAMETER Experiment Name: At_Drought_P Parameter: Treatment Value: Drought vs. No Drought
  misc_feature: MA Experiment ID: 20000437 Result: Down-regulated in Transcription
  misc_feature: MA Experiment 20000437 PARAMETER Experiment Name: At_Drought_P Parameter: Age (day) Value: 8
  misc_feature: MA Experiment 20000437 PARAMETER Experiment Name: At_Drought_P Parameter: Organism Value: A. thaliana
  misc_feature: MA Experiment 20000437 PARAMETER Experiment Name: At_Drought_P Parameter: Plant Line Value: WS
  misc_feature: MA Experiment 20000437 PARAMETER Experiment Name: At_Drought_P Parameter: Timepoint (hr) Value: 24
  misc_feature: MA Experiment 20000437 PARAMETER Experiment Name: At_Drought_P Parameter: Tissue Value: Whole Plant
  misc_feature: MA Experiment 20000437 PARAMETER Experiment Name: At_Drought_P Parameter: Treatment Value: Drought vs. No Drought
  misc_feature: MA Experiment ID: 20000439 Result: Down-regulated in Transcription
  misc_feature: MA Experiment 20000439 PARAMETER Experiment Name: At_Roots__P Parameter: Age (day) Value: 14 vs. 21
  misc_feature: MA Experiment 20000439 PARAMETER Experiment Name: At_Roots__P Parameter: Organism Value: A. thaliana
  misc_feature: MA Experiment 20000439 PARAMETER Experiment Name: At_Roots__P Parameter: Tissue Value: Roots vs. Whole Plant
  misc_feature: MA Experiment ID: 20000441 Result: Up-regulated in Transcription
  misc_feature: MA Experiment 20000441 PARAMETER Experiment Name: At_1uM_BR-BRZ__P Parameter: Tissue Value: Shoot Apices
  misc_feature: MA Experiment 20000441 PARAMETER Experiment Name: At_1uM_BR-BRZ__P Parameter: Treatment Value: 1uM BR vs. No Treatment
  misc_feature: MA Experiment ID: 20000443 Result: Up-regulated in Transcription
  misc_feature: MA Experiment 20000443 PARAMETER Experiment Name: At_1uM_BR-BRZ__P Parameter: Tissue Value: Shoot Apices
  misc_feature: MA Experiment 20000443 PARAMETER Experiment Name: At_1uM_BR-BRZ__P Parameter: Treatment Value: 1uM BRZ vs. No Treatment
  misc_feature: MA Experiment ID: 20000460 Result: Down-regulated in Transcription
  misc_feature: MA Experiment 20000460 PARAMETER Experiment Name: At_10percent_PEG_P Parameter: Age (day) Value: 12
  misc_feature: MA Experiment 20000460 PARAMETER Experiment Name: At_10percent_PEG_P Parameter: Organism Value: A. thaliana
  misc_feature: MA Experiment 20000460 PARAMETER Experiment Name: At_10percent_PEG_P Parameter: Plant Line Value: WS
  misc_feature: MA Experiment 20000460 PARAMETER Experiment Name: At_10percent_PEG_P Parameter: Timepoint (day) Value: 12
  misc_feature: MA Experiment 20000460 PARAMETER Experiment Name: At_10percent_PEG_P Parameter: Tissue Value: Whole Plant
  misc_feature: MA Experiment 20000460 PARAMETER Experiment Name: At_10percent_PEG_P Parameter: Treatment Value: 10percent PEG vs. No Treatment
  misc_feature: MA Experiment ID: 20000794 Result: Down-regulated in Transcription
  misc_feature: MA Experiment 20000794 PARAMETER Experiment Name: At_Petals_P Parameter: Age (day) Value: 23-25 days
  misc_feature: MA Experiment 20000794 PARAMETER Experiment Name: At_Petals_P Parameter: Plant Line Value: WS
  misc_feature: MA Experiment 20000794 PARAMETER Experiment Name: At_Petals_P Parameter: Tissue Value: Petals vs. Whole plant
  misc_feature: MA Experiment ID: 20001248 Result: Up-regulated in Transcription
  misc_feature: MA Experiment 20001248 PARAMETER Experiment Name: At_Far-red-induction_P Parameter: Age (day) Value: 7
  misc_feature: MA Experiment 20001248 PARAMETER Experiment Name: At_Far-red-induction_P Parameter: Light Value: Far-red vs. White
  misc_feature: MA Experiment 20001248 PARAMETER Experiment Name: At_Far-red-induction_P Parameter: Organism Value: A. thaliana
  misc_feature: MA Experiment 20001248 PARAMETER Experiment Name: At_Far-red-induction_P Parameter: Plant Line Value: Columbia
  misc_feature: MA Experiment 20001248 PARAMETER Experiment Name: At_Far-red-induction_P Parameter: Timepoint (hr) Value: 4
  misc_feature: MA Experiment 20001248 PARAMETER Experiment Name: At_Far-red-induction_P Parameter: Tissue Value: Whole Plant
  misc_feature: MA Experiment ID: 20001450 Result: Up-regulated in Transcription
  misc_feature: MA Experiment 20001450 PARAMETER Experiment Name: At_Far-red-induction_P Parameter: Age (day) Value: 7
  misc_feature: MA Experiment 20001450 PARAMETER Experiment Name: At_Far-red-induction_P Parameter: Light Value: Far-red vs. White
  misc_feature: MA Experiment 20001450 PARAMETER Experiment Name: At_Far-red-induction_P Parameter: Organism Value: A. thaliana
  misc_feature: MA Experiment 20001450 PARAMETER Experiment Name: At_Far-red-induction_P Parameter: Plant Line Value: Columbia
  misc_feature: MA Experiment 20001450 PARAMETER Experiment Name: At_Far-red-induction_P Parameter: Timepoint (hr) Value: 8
  misc_feature: MA Experiment 20001450 PARAMETER Experiment Name: At_Far-red-induction_P Parameter: Tissue Value: Whole Plant
  misc_feature: MA Experiment ID: 20001554 Result: Down-regulated in Transcription
  misc_feature: MA Experiment 20001554 PARAMETER Experiment Name: At_Drought_Soil_Dry_P Parameter: Age (day) Value: 21
  misc_feature: MA Experiment 20001554 PARAMETER Experiment Name: At_Drought_Soil_Dry_P Parameter: Organism Value: A. thaliana
  misc_feature: MA Experiment 20001554 PARAMETER Experiment Name: At_Drought_Soil_Dry_P Parameter: Plant Line Value: WS
  misc_feature: MA Experiment 20001554 PARAMETER Experiment Name: At_Drought_Soil_Dry_P Parameter: Post Timepoint (hr) Value: None
  misc_feature: MA Experiment 20001554 PARAMETER Experiment Name: At_Drought_Soil_Dry_P Parameter: Post-Treatment Value: None
  misc_feature: MA Experiment 20001554 PARAMETER Experiment Name: At_Drought_Soil_Dry_P Parameter: Timepoint (day) Value: 7
  misc_feature: MA Experiment 20001554 PARAMETER Experiment Name: At_Drought_Soil_Dry_P Parameter: Treatment Value: Drought vs. No Drought
  misc_feature: MA Experiment ID: 20001555 Result: Down-regulated in Transcription
  misc_feature: MA Experiment 20001555 PARAMETER Experiment Name: At_Drought_Soil_Dry_P Parameter: Age (day) Value: 24
  misc_feature: MA Experiment 20001555 PARAMETER Experiment Name: At_Drought_Soil_Dry_P Parameter: Organism Value: A. thaliana
  misc_feature: MA Experiment 20001555 PARAMETER Experiment Name: At_Drought_Soil_Dry_P Parameter: Plant Line Value: WS
  misc_feature: MA Experiment 20001555 PARAMETER Experiment Name: At_Drought_Soil_Dry_P Parameter: Post Timepoint (hr) Value: None
  misc_feature: MA Experiment 20001555 PARAMETER Experiment Name: At_Drought_Soil_Dry_P Parameter: Post-Treatment Value: None
  misc_feature: MA Experiment 20001555 PARAMETER Experiment Name: At_Drought_Soil_Dry_P Parameter: Timepoint (day) Value: 10
  misc_feature: MA Experiment 20001555 PARAMETER Experiment Name: At_Drought_Soil_Dry_P Parameter: Treatment Value: Drought vs. No Drought
  misc_feature: MA Experiment ID: 20001556 Result: Down-regulated in Transcription
  misc_feature: MA Experiment 20001556 PARAMETER Experiment Name: At_Drought_Soil_Dry_P Parameter: Age (day) Value: 26
  misc_feature: MA Experiment 20001556 PARAMETER Experiment Name: At_Drought_Soil_Dry_P Parameter: Organism Value: A. thaliana
  misc_feature: MA Experiment 20001556 PARAMETER Experiment Name: At_Drought_Soil_Dry_P Parameter: Plant Line Value: WS
  misc_feature: MA Experiment 20001556 PARAMETER Experiment Name: At_Drought_Soil_Dry_P Parameter: Post Timepoint (hr) Value: None
  misc_feature: MA Experiment 20001556 PARAMETER Experiment Name: At_Drought_Soil_Dry_P Parameter: Post-Treatment Value: None
  misc_feature: MA Experiment 20001556 PARAMETER Experiment Name: At_Drought_Soil_Dry_P Parameter: Timepoint (day) Value: 12
  misc_feature: MA Experiment 20001556 PARAMETER Experiment Name: At_Drought_Soil_Dry_P Parameter: Treatment Value: Drought vs. No Drought
  misc_feature: MA Experiment ID: 20001559 Result: Down-regulated in Transcription
  misc_feature: MA Experiment 20001559 PARAMETER Experiment Name: At_Drought_Soil_Dry_P Parameter: Age (day) Value: 28
  misc_feature: MA Experiment 20001559 PARAMETER Experiment Name: At_Drought_Soil_Dry_P Parameter: Organism Value: A. thaliana
  misc_feature: MA Experiment 20001559 PARAMETER Experiment Name: At_Drought_Soil_Dry_P Parameter: Plant Line Value: WS
  misc_feature: MA Experiment 20001559 PARAMETER Experiment Name: At_Drought_Soil_Dry_P Parameter: Post Timepoint (hr) Value: 29
  misc_feature: MA Experiment 20001559 PARAMETER Experiment Name: At_Drought_Soil_Dry_P Parameter: Post-Treatment Value: Re-Water vs. No Drought
  misc_feature: MA Experiment 20001559 PARAMETER Experiment Name: At_Drought_Soil_Dry_P Parameter: Timepoint (day) Value: 14
  misc_feature: MA Experiment 20001559 PARAMETER Experiment Name: At_Drought_Soil_Dry_P Parameter: Treatment Value: Drought vs. No Drought
  misc_feature: MA Experiment ID: 20001756 Result: Up-regulated in Transcription
  misc_feature: MA Experiment 20001756 PARAMETER Experiment Name: At_50mM_NH4NO3_L-to-H_P Parameter: Timepoint (hr) Value: 4
  misc_feature: MA Experiment 20001756 PARAMETER Experiment Name: At_50mM_NH4NO3_L-to-H_P Parameter: Tissue Value: Leaf
  misc_feature: MA Experiment 20001756 PARAMETER Experiment Name: At_50mM_NH4NO3_L-to-H_P Parameter: Treatment Value: 50mM NH4NO3 vs 100mM Mannitol
  misc_feature: MA Experiment ID: 20001757 Result: Up-regulated in Transcription
  misc_feature: MA Experiment 20001757 PARAMETER Experiment Name: At_50mM_NH4NO3_L-to-H_P Parameter: Timepoint (hr) Value: 6
  misc_feature: MA Experiment 20001757 PARAMETER Experiment Name: At_50mM_NH4NO3_L-to-H_P Parameter: Tissue Value: Leaf
  misc_feature: MA Experiment 20001757 PARAMETER Experiment Name: At_50mM_NH4NO3_L-to-H_P Parameter: Treatment Value: 50mM NH4NO3 vs 100mM Mannitol
  misc_feature: MA Experiment ID: 20001768 Result: Down-regulated in Transcription
  misc_feature: MA Experiment 20001768 PARAMETER Experiment Name: At_Far-red-enriched-adult_P Parameter: Age (day) Value: 28
  misc_feature: MA Experiment 20001768 PARAMETER Experiment Name: At_Far-red-enriched-adult_P Parameter: Light Value: Far-red enriched vs. White
  misc_feature: MA Experiment 20001768 PARAMETER Experiment Name: At_Far-red-enriched-adult_P Parameter: Organism Value: A. thaliana
  misc_feature: MA Experiment 20001768 PARAMETER Experiment Name: At_Far-red-enriched-adult_P Parameter: Plant Line Value: Columbia
  misc_feature: MA Experiment 20001768 PARAMETER Experiment Name: At_Far-red-enriched-adult_P Parameter: Timepoint (hr) Value: 1
  misc_feature: MA Experiment 20001768 PARAMETER Experiment Name: At_Far-red-enriched-adult_P Parameter: Tissue Value: Aerial
  misc_feature: MA Experiment ID: 20001904 Result: Down-regulated in Transcription
  misc_feature: MA Experiment 20001904 PARAMETER Experiment Name: At_Drought_Reproduction_P Parameter: Age (day) Value: 37
  misc_feature: MA Experiment 20001904 PARAMETER Experiment Name: At_Drought_Reproduction_P Parameter: Organism Value: A. thaliana
  misc_feature: MA Experiment 20001904 PARAMETER Experiment Name: At_Drought_Reproduction_P Parameter: Plant Line Value: WS
  misc_feature: MA Experiment 20001904 PARAMETER Experiment Name: At_Drought_Reproduction_P Parameter: Timepoint (day) Value: 7
  misc_feature: MA Experiment 20001904 PARAMETER Experiment Name: At_Drought_Reproduction_P Parameter: Tissue Value: Rosettes
  misc_feature: MA Experiment 20001904 PARAMETER Experiment Name: At_Drought_Reproduction_P Parameter: Treatment Value: Drought vs. No Drought
  misc_feature: MA Experiment ID: 20001906 Result: Down-regulated in Transcription
  misc_feature: MA Experiment 20001906 PARAMETER Experiment Name: At_Drought_Reproduction_P Parameter: Age (day) Value: 35
  misc_feature: MA Experiment 20001906 PARAMETER Experiment Name: At_Drought_Reproduction_P Parameter: Organism Value: A. thaliana
  misc_feature: MA Experiment 20001906 PARAMETER Experiment Name: At_Drought_Reproduction_P Parameter: Plant Line Value: WS
  misc_feature: MA Experiment 20001906 PARAMETER Experiment Name: At_Drought_Reproduction_P Parameter: Timepoint (day) Value: 5
  misc_feature: MA Experiment 20001906 PARAMETER Experiment Name: At_Drought_Reproduction_P Parameter: Tissue Value: Siliques
  misc_feature: MA Experiment 20001906 PARAMETER Experiment Name: At_Drought_Reproduction_P Parameter: Treatment Value: Drought vs. No Drought
  misc_feature: MA Experiment ID: 20001910 Result: Down-regulated in Transcription
  misc_feature: MA Experiment 20001910 PARAMETER Experiment Name: At_Drought_Reproduction_P Parameter: Age (day) Value: 37
  misc_feature: MA Experiment 20001910 PARAMETER Experiment Name: At_Drought_Reproduction_P Parameter: Organism Value: A. thaliana
  misc_feature: MA Experiment 20001910 PARAMETER Experiment Name: At_Drought_Reproduction_P Parameter: Plant Line Value: WS
  misc_feature: MA Experiment 20001910 PARAMETER Experiment Name: At_Drought_Reproduction_P Parameter: Timepoint (day) Value: 7
  misc_feature: MA Experiment 20001910 PARAMETER Experiment Name: At_Drought_Reproduction_P Parameter: Tissue Value: Flowers
  misc_feature: MA Experiment 20001910 PARAMETER Experiment Name: At_Drought_Reproduction_P Parameter: Treatment Value: Drought vs. No Drought
  misc_feature: MA Experiment ID: 20001911 Result: Down-regulated in Transcription
  misc_feature: MA Experiment 20001911 PARAMETER Experiment Name: At_Drought_Reproduction_P Parameter: Age (day) Value: 40
  misc_feature: MA Experiment 20001911 PARAMETER Experiment Name: At_Drought_Reproduction_P Parameter: Organism Value: A. thaliana
  misc_feature: MA Experiment 20001911 PARAMETER Experiment Name: At_Drought_Reproduction_P Parameter: Plant Line Value: WS
  misc_feature: MA Experiment 20001911 PARAMETER Experiment Name: At_Drought_Reproduction_P Parameter: Timepoint (day) Value: 10
  misc_feature: MA Experiment 20001911 PARAMETER Experiment Name: At_Drought_Reproduction_P Parameter: Tissue Value: Flowers
  misc_feature: MA Experiment 20001911 PARAMETER Experiment Name: At_Drought_Reproduction_P Parameter: Treatment Value: Drought vs. No Drought

SEQ ID NO: 33827 - protein, 153 aa, Arabidopsis thaliana; identical to SEQ ID NO: 23437
  peptide (1)..(153): Ceres Seq. ID no. 12561633
  misc_feature (71)..(152): Pfam Name: Protease inhibitor/seed storage/LTP family Pfam Description: Protease inhibitor/seed storage/LTP family
  misc_feature (71)..(152): Pfam Name: Protease inhibitor/seed storage/LTP family Pfam Description: Protease inhibitor/seed storage/LTP family
  misc_feature (71)..(152): Pfam Name: Protease inhibitor/seed storage/LTP family Pfam Description: Protease inhibitor/seed storage/LTP family
  misc_feature (20)..(152): Homolog of NCBI NO: 15221484 NR Description: similar to 14KD proline-rich protein DC2.15
  misc_feature (48)..(153): Homolog of NCBI NO: 7488729 NR Description: CIC protein, cold-inducible - alfalfa
  misc_feature (20)..(153): Homolog of NCBI NO: 10798752 NR Description: P-rich protein EIG-I30 [Nicotiana tabacum]
  misc_feature (35)..(152): Homolog of NCBI NO: 2129871 NR Description: proline-rich protein, 14K - kidney bean
  misc_feature (20)..(152): Homolog of NCBI NO: 10798758 NR Description: P-rich protein Nt-SubC29 [Nicotiana tabacum]
  misc_feature (20)..(152): Homolog of NCBI NO: 15221484 NR Description: similar to 14KD proline-rich protein DC2.15
  misc_feature (20)..(153): Homolog of NCBI NO: 10798752 NR Description: P-rich protein EIG-I30 [Nicotiana tabacum]
  misc_feature (20)..(152): Homolog of NCBI NO: 10798758 NR Description: P-rich protein Nt-SubC29 [Nicotiana tabacum]
  misc_feature (35)..(152): Homolog of NCBI NO: 2129871 NR Description: proline-rich protein, 14K - kidney bean
  misc_feature (20)..(153): Homolog of NCBI NO: 10798752 NR Description: P-rich protein EIG-I30 [Nicotiana tabacum]
  misc_feature (48)..(153): Homolog of NCBI NO: 7488729 NR Description: CIC protein, cold-inducible - alfalfa
  misc_feature (20)..(152): Homolog of NCBI NO: 15221484 NR Description: similar to 14KD proline-rich protein DC2.15
  misc_feature (20)..(153): Homolog of NCBI NO: 18406723 NR Description: expressed protein
  misc_feature (20)..(153): Homolog of NCBI NO: 481236 NR Description: hypothetical protein - Madagascar periwinkle
  misc_feature (20)..(153): Homolog of NCBI NO: 4454097 NR Description: hybrid proline-rich protein [Catharanthus roseus]
  misc_feature (20)..(153): Homolog of NCBI NO: 7484770 NR Description: extensin like protein - black poplar
  misc_feature (20)..(153): Homolog of NCBI NO: 112697 NR Description: 14 KD PROLINE-RICH PROTEIN DC2.15 PRECURSOR
  misc_feature (20)..(153): Homolog of NCBI NO: 18406723 NR Description: expressed protein
  misc_feature (20)..(153): Homolog of NCBI NO: 481236 NR Description: hypothetical protein - Madagascar periwinkle
  misc_feature (20)..(153): Homolog of NCBI NO: 4454097 NR Description: hybrid proline-rich protein [Catharanthus roseus]
  misc_feature (20)..(153): Homolog of NCBI NO: 7484770 NR Description: extensin like protein - black poplar
  misc_feature (20)..(153): Homolog of NCBI NO: 112697 NR Description: 14 KD PROLINE-RICH PROTEIN DC2.15 PRECURSOR
  misc_feature (20)..(152): Homolog of NCBI NO: 10798758 NR Description: P-rich protein Nt-SubC29 [Nicotiana tabacum]
  misc_feature (35)..(152): Homolog of NCBI NO: 2129871 NR Description: proline-rich protein, 14K - kidney bean
  misc_feature (48)..(153): Homolog of NCBI NO: 7488729 NR Description: CIC protein, cold-inducible - alfalfa
  misc_feature (20)..(153): Homolog of NCBI NO: 112697 NR Description: 14 KD PROLINE-RICH PROTEIN DC2.15 PRECURSOR
  misc_feature (20)..(153): Homolog of NCBI NO: 7484770 NR Description: extensin like protein - black poplar
  misc_feature (20)..(153): Homolog of NCBI NO: 4454097 NR Description: hybrid proline-rich protein [Catharanthus roseus]
  misc_feature (20)..(153): Homolog of NCBI NO: 481236 NR Description: hypothetical protein - Madagascar periwinkle
  misc_feature (20)..(153): Homolog of NCBI NO: 18406723 NR Description: expressed protein

SEQ ID NO: 33828 - protein, 134 aa, Arabidopsis thaliana; identical to SEQ ID NO: 23438
  peptide (1)..(134): Ceres Seq. ID no. 12561634
  misc_feature (52)..(133): Pfam Name: Protease inhibitor/seed storage/LTP family Pfam Description: Protease inhibitor/seed storage/LTP family
  misc_feature (52)..(133): Pfam Name: Protease inhibitor/seed storage/LTP family Pfam Description: Protease inhibitor/seed storage/LTP family
  misc_feature (52)..(133): Pfam Name: Protease inhibitor/seed storage/LTP family Pfam Description: Protease inhibitor/seed storage/LTP family
  misc_feature (1)..(133): Homolog of NCBI NO: 15221484 NR Description: similar to 14KD proline-rich protein DC2.15
  misc_feature (29)..(134): Homolog of NCBI NO: 7488729 NR Description: CIC protein, cold-inducible - alfalfa
  misc_feature (1)..(134): Homolog of NCBI NO: 10798752 NR Description: P-rich protein EIG-I30 [Nicotiana tabacum]
  misc_feature (16)..(133): Homolog of NCBI NO: 2129871 NR Description: proline-rich protein, 14K - kidney bean
  misc_feature (1)..(133): Homolog of NCBI NO: 10798758 NR Description: P-rich protein Nt-SubC29 [Nicotiana tabacum]
  misc_feature (1)..(133): Homolog of NCBI NO: 15221484 NR Description: similar to 14KD proline-rich protein DC2.15
  misc_feature (1)..(134): Homolog of NCBI NO: 10798752 NR Description: P-rich protein EIG-I30 [Nicotiana tabacum]
  misc_feature (1)..(133): Homolog of NCBI NO: 10798758 NR Description: P-rich protein Nt-SubC29 [Nicotiana tabacum]
  misc_feature (16)..(133): Homolog of NCBI NO: 2129871 NR Description: proline-rich protein, 14K - kidney bean
  misc_feature (1)..(134): Homolog of NCBI NO: 10798752 NR Description: P-rich protein EIG-I30 [Nicotiana tabacum]
  misc_feature (29)..(134): Homolog of NCBI NO: 7488729 NR Description: CIC protein, cold-inducible - alfalfa
  misc_feature (1)..(133): Homolog of NCBI NO: 15221484 NR Description: similar to 14KD proline-rich protein DC2.15
  misc_feature (1)..(134): Homolog of NCBI NO: 18406723 NR Description: expressed protein
  misc_feature (1)..(134): Homolog of NCBI NO: 481236 NR Description: hypothetical protein - Madagascar periwinkle
  misc_feature (1)..(134): Homolog of NCBI NO: 4454097 NR Description: hybrid proline-rich protein [Catharanthus roseus]
  misc_feature (1)..(134): Homolog of NCBI NO: 7484770 NR Description: extensin like protein - black poplar
  misc_feature (1)..(134): Homolog of NCBI NO: 112697 NR Description: 14 KD PROLINE-RICH PROTEIN DC2.15 PRECURSOR
  misc_feature (1)..(134): Homolog of NCBI NO: 18406723 NR Description: expressed protein
  misc_feature (1)..(134): Homolog of NCBI NO: 481236 NR Description: hypothetical protein - Madagascar periwinkle
  misc_feature (1)..(134): Homolog of NCBI NO: 4454097 NR Description: hybrid proline-rich protein [Catharanthus roseus]
  misc_feature (1)..(134): Homolog of NCBI NO: 7484770 NR Description: extensin like protein - black poplar
  misc_feature (1)..(134): Homolog of NCBI NO: 112697 NR Description: 14 KD PROLINE-RICH PROTEIN DC2.15 PRECURSOR
  misc_feature (1)..(133): Homolog of NCBI NO: 10798758 NR Description: P-rich protein Nt-SubC29 [Nicotiana tabacum]
  misc_feature (16)..(133): Homolog of NCBI NO: 2129871 NR Description: proline-rich protein, 14K - kidney bean
  misc_feature (29)..(134): Homolog of NCBI NO: 7488729 NR Description: CIC protein, cold-inducible - alfalfa
  misc_feature (1)..(134): Homolog of NCBI NO: 112697 NR Description: 14 KD PROLINE-RICH PROTEIN DC2.15 PRECURSOR
  misc_feature (1)..(134): Homolog of NCBI NO: 7484770 NR Description: extensin like protein - black poplar
  misc_feature (1)..(134): Homolog of NCBI NO: 4454097 NR Description: hybrid proline-rich protein [Catharanthus roseus]
  misc_feature (1)..(134): Homolog of NCBI NO: 481236 NR Description: hypothetical protein - Madagascar periwinkle
  misc_feature (1)..(134): Homolog of NCBI NO: 18406723 NR Description: expressed protein

SEQ ID NO: 33829 - DNA, 2764 bp, Arabidopsis thaliana; identical to SEQ ID NO: 27071
  misc_feature (1)..(2764): Ceres Seq. ID no. 13491797
  misc_feature: MA Experiment ID: 108435 Result: Down-regulated in Transcription
  misc_feature: MA Experiment 108435 PARAMETER Experiment Name: At_stm_Mutants_cDNA_P Parameter: Plant Line Value: wt Landsburg vs stm
  misc_feature: MA Experiment 108435 PARAMETER Experiment Name: At_stm_Mutants_cDNA_P Parameter: Tissue Value: Shoot Apical Meristem Region
  misc_feature: MA Experiment ID: 20000069 Result: Up-regulated in Transcription
  misc_feature: MA Experiment 20000069 PARAMETER Experiment Name: At_100uM_ABA_Mutants_cDNA_P Parameter: Plant Line Value: CS23
  misc_feature: MA Experiment 20000069 PARAMETER Experiment Name: At_100uM_ABA_Mutants_cDNA_P Parameter: Timepoint (hr) Value: 6
  misc_feature: MA Experiment 20000069 PARAMETER Experiment Name: At_100uM_ABA_Mutants_cDNA_P Parameter: Tissue Value: Aerial
  misc_feature: MA Experiment 20000069 PARAMETER Experiment Name: At_100uM_ABA_Mutants_cDNA_P Parameter: Treatment Value: 100uM ABA vs. No Treatment
  misc_feature: MA Experiment ID: 20000070 Result: Up-regulated in Transcription
  misc_feature: MA Experiment 20000070 PARAMETER Experiment Name: At_100uM_ABA_Mutants_cDNA_P Parameter: Plant Line Value: CS24
  misc_feature: MA Experiment 20000070 PARAMETER Experiment Name: At_100uM_ABA_Mutants_cDNA_P Parameter: Timepoint (hr) Value: 6
  misc_feature: MA Experiment 20000070 PARAMETER Experiment Name: At_100uM_ABA_Mutants_cDNA_P Parameter: Tissue Value: Aerial
  misc_feature: MA Experiment 20000070 PARAMETER Experiment Name: At_100uM_ABA_Mutants_cDNA_P Parameter: Treatment Value: 100uM ABA vs. No Treatment
  misc_feature: MA Experiment ID: 20000071 Result: Up-regulated in Transcription
  misc_feature: MA Experiment 20000071 PARAMETER Experiment Name: At_100uM_ABA_Mutants_cDNA_P Parameter: Plant Line Value: CS8104
  misc_feature: MA Experiment 20000071 PARAMETER Experiment Name: At_100uM_ABA_Mutants_cDNA_P Parameter: Timepoint (hr) Value: 6
  misc_feature: MA Experiment 20000071 PARAMETER Experiment Name: At_100uM_ABA_Mutants_cDNA_P Parameter: Tissue Value: Aerial
  misc_feature: MA Experiment 20000071 PARAMETER Experiment Name: At_100uM_ABA_Mutants_cDNA_P Parameter: Treatment Value: 100uM ABA vs. No Treatment
  misc_feature: MA Experiment ID: 20000072 Result: Up-regulated in Transcription
  misc_feature: MA Experiment 20000072 PARAMETER Experiment Name: At_100uM_ABA_Mutants_cDNA_P Parameter: Plant Line Value: CS8105
  misc_feature: MA Experiment 20000072 PARAMETER Experiment Name: At_100uM_ABA_Mutants_cDNA_P Parameter: Timepoint (hr) Value: 6
  misc_feature: MA Experiment 20000072 PARAMETER Experiment Name: At_100uM_ABA_Mutants_cDNA_P Parameter: Tissue Value: Aerial
  misc_feature: MA Experiment 20000072 PARAMETER Experiment Name: At_100uM_ABA_Mutants_cDNA_P Parameter: Treatment Value: 100uM ABA vs. No Treatment
  misc_feature: MA Experiment ID: 20000086 Result: Up-regulated in Transcription
  misc_feature: MA Experiment 20000086 PARAMETER Experiment Name: At_100uM_ABA_Mutants_cDNA_P Parameter: Plant Line Value: CS22
  misc_feature: MA Experiment 20000086 PARAMETER Experiment Name: At_100uM_ABA_Mutants_cDNA_P Parameter: Timepoint (hr) Value: 6
  misc_feature: MA Experiment 20000086 PARAMETER Experiment Name: At_100uM_ABA_Mutants_cDNA_P Parameter: Tissue Value: Aerial
  misc_feature: MA Experiment 20000086 PARAMETER Experiment Name: At_100uM_ABA_Mutants_cDNA_P Parameter: Treatment Value: 100uM ABA vs. No Treatment
  misc_feature: MA Experiment ID: 20000087 Result: Up-regulated in Transcription
  misc_feature: MA Experiment 20000087 PARAMETER Experiment Name: At_100uM_ABA_Mutants_cDNA_P Parameter: Plant Line Value: WS
  misc_feature: MA Experiment 20000087 PARAMETER Experiment Name: At_100uM_ABA_Mutants_cDNA_P Parameter: Timepoint (hr) Value: 6
  misc_feature: MA Experiment 20000087 PARAMETER Experiment Name: At_100uM_ABA_Mutants_cDNA_P Parameter: Tissue Value: Aerial
  misc_feature: MA Experiment 20000087 PARAMETER Experiment Name: At_100uM_ABA_Mutants_cDNA_P Parameter: Treatment Value: 100uM ABA vs. No Treatment
  misc_feature: MA Experiment ID: 20000088 Result: Up-regulated in Transcription
  misc_feature: MA Experiment 20000088 PARAMETER Experiment Name: At_100uM_ABA_Mutants_cDNA_P Parameter: Plant Line Value: Landsberg
  misc_feature: MA Experiment 20000088 PARAMETER Experiment Name: At_100uM_ABA_Mutants_cDNA_P Parameter: Timepoint (hr) Value: 6
  misc_feature: MA Experiment 20000088 PARAMETER Experiment Name: At_100uM_ABA_Mutants_cDNA_P Parameter: Tissue Value: Aerial
  misc_feature: MA Experiment 20000088 PARAMETER Experiment Name: At_100uM_ABA_Mutants_cDNA_P Parameter: Treatment Value: 100uM ABA vs. No Treatment
  misc_feature: MA Experiment ID: 20000089 Result: Up-regulated in Transcription
  misc_feature: MA Experiment ID: 20000090 Result: Up-regulated in Transcription
  misc_feature: MA Experiment ID: 20000112 Result: Down-regulated in Transcription
  misc_feature: MA Experiment 20000112 PARAMETER Experiment Name: At_42deg_Heat_cDNA_P Parameter: Temperature (deg C) Value: 42 vs. 22
  misc_feature: MA Experiment 20000112 PARAMETER Experiment Name: At_42deg_Heat_cDNA_P Parameter: Timepoint (hr) Value: 2
  misc_feature: MA Experiment 20000112 PARAMETER Experiment Name: At_42deg_Heat_cDNA_P Parameter: Tissue Value: Aerial
  misc_feature: MA Experiment ID: 20000113 Result: Down-regulated in Transcription
  misc_feature: MA Experiment 20000113 PARAMETER Experiment Name: At_42deg_Heat_cDNA_P Parameter: Temperature (deg C) Value: 42 vs. 22
  misc_feature: MA Experiment 20000113 PARAMETER Experiment Name: At_42deg_Heat_cDNA_P Parameter: Timepoint (hr) Value: 8
  misc_feature: MA Experiment 20000113 PARAMETER Experiment Name: At_42deg_Heat_cDNA_P Parameter: Tissue Value: Aerial
  misc_feature: MA Experiment ID: 20000117 Result: Up-regulated in Transcription
  misc_feature: MA Experiment 20000117 PARAMETER Experiment Name: At_100uM_ABA_Mutants_cDNA_P Parameter: Plant Line Value: Columbia
  misc_feature: MA Experiment 20000117 PARAMETER Experiment Name: At_100uM_ABA_Mutants_cDNA_P Parameter: Timepoint (hr) Value: 6
  misc_feature: MA Experiment 20000117 PARAMETER Experiment Name: At_100uM_ABA_Mutants_cDNA_P Parameter: Tissue Value: Aerial
  misc_feature: MA Experiment 20000117 PARAMETER Experiment Name: At_100uM_ABA_Mutants_cDNA_P Parameter: Treatment Value: 100uM ABA vs. No Treatment
  misc_feature: MA Experiment ID: 20000173 Result: Down-regulated in Transcription
  misc_feature: MA Experiment 20000173 PARAMETER Experiment Name: At_42deg_Heat_P Parameter: Age (day) Value: 14
  misc_feature: MA Experiment 20000173 PARAMETER Experiment Name: At_42deg_Heat_P Parameter: Organism Value: A. thaliana
  misc_feature: MA Experiment 20000173 PARAMETER Experiment Name: At_42deg_Heat_P Parameter: Plant Line Value: WS
  misc_feature: MA Experiment 20000173 PARAMETER Experiment Name: At_42deg_Heat_P Parameter: Temperature (deg C) Value: 42 vs. 22
  misc_feature: MA Experiment 20000173 PARAMETER Experiment Name: At_42deg_Heat_P Parameter: Timepoint (hr) Value: 6
  misc_feature: MA Experiment 20000173 PARAMETER Experiment Name: At_42deg_Heat_P Parameter: Tissue Value: Aerial
  misc_feature: MA Experiment ID: 20000182 Result: Down-regulated in Transcription
  misc_feature: MA Experiment 20000182 PARAMETER Experiment Name: At_2mM_SA_P Parameter: Age (day) Value: 14
  misc_feature: MA Experiment 20000182 PARAMETER Experiment Name: At_2mM_SA_P Parameter: Organism Value: A. thaliana
  misc_feature: MA Experiment 20000182 PARAMETER Experiment Name: At_2mM_SA_P Parameter: Plant Line Value: WS
  misc_feature: MA Experiment 20000182 PARAMETER Experiment Name: At_2mM_SA_P Parameter: Timepoint (hr) Value: 6
  misc_feature: MA Experiment 20000182 PARAMETER Experiment Name: At_2mM_SA_P Parameter: Tissue Value: Aerial
  misc_feature: MA Experiment 20000182 PARAMETER Experiment Name: At_2mM_SA_P Parameter: Treatment Value: 2mM SA vs. No Treatment
  misc_feature: MA Experiment ID: 20000184 Result: Down-regulated in Transcription
  misc_feature: MA Experiment 20000184 PARAMETER Experiment Name: At_Shoots__P Parameter: Age (day) Value: 7
  misc_feature: MA Experiment 20000184 PARAMETER Experiment Name: At_Shoots__P Parameter: Tissue Value: Shoots vs. Whole Plant
  misc_feature: MA Experiment ID: 20000437 Result: Up-regulated in Transcription
  misc_feature: MA Experiment 20000437 PARAMETER Experiment Name: At_Drought_P Parameter: Age (day) Value: 8
  misc_feature: MA Experiment 20000437 PARAMETER Experiment Name: At_Drought_P Parameter: Organism Value: A. thaliana
  misc_feature: MA Experiment 20000437 PARAMETER Experiment Name: At_Drought_P Parameter: Plant Line Value: WS
  misc_feature: MA Experiment 20000437 PARAMETER Experiment Name: At_Drought_P Parameter: Timepoint (hr) Value: 24
  misc_feature: MA Experiment 20000437 PARAMETER Experiment Name: At_Drought_P Parameter: Tissue Value: Whole Plant
  misc_feature: MA Experiment 20000437 PARAMETER Experiment Name: At_Drought_P Parameter: Treatment Value: Drought vs. No Drought
  misc_feature: MA Experiment ID: 20000438 Result: Down-regulated in Transcription
  misc_feature: MA Experiment 20000438 PARAMETER Experiment Name: At_Shoots__P Parameter: Age (day) Value: 14
  misc_feature: MA Experiment 20000438 PARAMETER Experiment Name: At_Shoots__P Parameter: Tissue Value: Shoots vs. Whole Plant
  misc_feature: MA Experiment ID: 20001451 Result: Down-regulated in Transcription
  misc_feature: MA Experiment 20001451 PARAMETER Experiment Name: At_Far-red-induction_P Parameter: Age (day) Value: 7
  misc_feature: MA Experiment 20001451 PARAMETER Experiment Name: At_Far-red-induction_P Parameter: Light Value: Far-red vs. White
  misc_feature: MA Experiment 20001451 PARAMETER Experiment Name: At_Far-red-induction_P Parameter: Organism Value: A. thaliana
  misc_feature: MA Experiment 20001451 PARAMETER Experiment Name: At_Far-red-induction_P Parameter: Plant Line Value: Columbia
  misc_feature: MA Experiment 20001451 PARAMETER Experiment Name: At_Far-red-induction_P Parameter: Timepoint (hr) Value: 24
  misc_feature: MA Experiment 20001451 PARAMETER Experiment Name: At_Far-red-induction_P Parameter: Tissue Value: Whole Plant
  misc_feature: MA Experiment ID: 20001555 Result: Up-regulated in Transcription
  misc_feature: MA Experiment 20001555 PARAMETER Experiment Name: At_Drought_Soil_Dry_P Parameter: Age (day) Value: 24
  misc_feature: MA Experiment 20001555 PARAMETER Experiment Name: At_Drought_Soil_Dry_P Parameter: Organism Value: A. thaliana
  misc_feature: MA Experiment 20001555 PARAMETER Experiment Name: At_Drought_Soil_Dry_P Parameter: Plant Line Value: WS
  misc_feature: MA Experiment 20001555 PARAMETER Experiment Name: At_Drought_Soil_Dry_P Parameter: Post Timepoint (hr) Value: None
  misc_feature: MA Experiment 20001555 PARAMETER Experiment Name: At_Drought_Soil_Dry_P Parameter: Post-Treatment Value: None
  misc_feature: MA Experiment 20001555 PARAMETER Experiment Name: At_Drought_Soil_Dry_P Parameter: Timepoint (day) Value: 10
  misc_feature: MA Experiment 20001555 PARAMETER Experiment Name: At_Drought_Soil_Dry_P Parameter: Treatment Value: Drought vs. No Drought
  misc_feature: MA Experiment ID: 20001558 Result: Down-regulated in Transcription
  misc_feature: MA Experiment 20001558 PARAMETER Experiment Name: At_Drought_Soil_Dry_P Parameter: Age (day) Value: 27
  misc_feature: MA Experiment 20001558 PARAMETER Experiment Name: At_Drought_Soil_Dry_P Parameter: Organism Value: A. thaliana
  misc_feature: MA Experiment 20001558 PARAMETER Experiment Name: At_Drought_Soil_Dry_P Parameter: Plant Line Value: WS
  misc_feature: MA Experiment 20001558 PARAMETER Experiment Name: At_Drought_Soil_Dry_P Parameter: Post Timepoint (hr) Value: 6
  misc_feature: MA Experiment 20001558 PARAMETER Experiment Name: At_Drought_Soil_Dry_P Parameter: Post-Treatment Value: Re-Water vs. No Drought
  misc_feature: MA Experiment 20001558 PARAMETER Experiment Name: At_Drought_Soil_Dry_P Parameter: Timepoint (day) Value: 13
  misc_feature: MA Experiment 20001558 PARAMETER Experiment Name: At_Drought_Soil_Dry_P Parameter: Treatment Value: Drought vs. No Drought

SEQ ID NO: 33830 - protein, 873 aa, Arabidopsis thaliana; identical to SEQ ID NO: 27072
  peptide (1)..(873): Ceres Seq. ID no. 13491798
  misc_feature (175)..(860): Homolog of NCBI NO: 283000 NR Description: 1,4-alpha-glucan branching enzyme (EC 2.4.1.18) I
  misc_feature (175)..(854): Homolog of NCBI NO: 11037532 NR Description: starch branching enyzyme 1 [Triticum aestivum]
  misc_feature (175)..(854): Homolog of NCBI NO: 4586238 NR Description: starch branching enzyme I [Triticum aestivum]
  misc_feature (175)..(854): Homolog of NCBI NO: 4586237 NR Description: starch branching enzyme I [Triticum aestivum]
  misc_feature (175)..(854): Homolog of NCBI NO: 4586236 NR Description: starch branching enzyme I [Triticum aestivum]
  misc_feature (175)..(826): Homolog of NCBI NO: 1169912 NR Description: 1,4-alpha-glucan branching enzyme (Starch
  misc_feature (175)..(864): Homolog of NCBI NO: 5441248 NR Description: branching enzyme 3 [Phaseolus vulgaris]
  misc_feature (175)..(854): Homolog of NCBI NO: 7433851 NR Description: 1,4-alpha-glucan branching enzyme (EC 2.4.1.18) I
  misc_feature (175)..(873): Homolog of NCBI NO: 1771261 NR Description: 1,4-alpha-glucan branching enzyme [Manihot
  misc_feature (109)..(853): Homolog of NCBI NO: 3822022 NR Description: starch branching enzyme IIb [Hordeum vulgare]
  misc_feature (175)..(860): Homolog of NCBI NO: 283000 NR Description: 1,4-alpha-glucan branching enzyme (EC 2.4.1.18) I
  misc_feature (175)..(854): Homolog of NCBI NO: 11037532 NR Description: starch branching enyzyme 1 [Triticum aestivum]
  misc_feature (175)..(854): Homolog of NCBI NO: 4586238 NR Description: starch branching enzyme I [Triticum aestivum]
  misc_feature (175)..(854): Homolog of NCBI NO: 4586237 NR Description: starch branching enzyme I [Triticum aestivum]
  misc_feature (175)..(854): Homolog of NCBI NO: 4586236 NR Description: starch branching enzyme I [Triticum aestivum]
  misc_feature (175)..(826): Homolog of NCBI NO: 1169912 NR Description: 1,4-alpha-glucan branching enzyme (Starch
  misc_feature (175)..(864): Homolog of NCBI NO: 5441248 NR Description: branching enzyme 3 [Phaseolus vulgaris]
  misc_feature (175)..(854): Homolog of NCBI NO: 7433851 NR Description: 1,4-alpha-glucan branching enzyme (EC 2.4.1.18) I
  misc_feature (175)..(873): Homolog of NCBI NO: 1771261 NR Description: 1,4-alpha-glucan branching enzyme [Manihot
  misc_feature (109)..(853): Homolog of NCBI NO: 3822022 NR Description: starch branching enzyme IIb [Hordeum vulgare]

SEQ ID NO: 33831 - protein, 858 aa, Arabidopsis thaliana; identical to SEQ ID NO: 27073
  peptide (1)..(858): Ceres Seq. ID no. 13491799
  misc_feature (160)..(845): Homolog of NCBI NO: 283000 NR Description: 1,4-alpha-glucan branching enzyme (EC 2.4.1.18) I
  misc_feature (160)..(839): Homolog of NCBI NO: 4586238 NR Description: starch branching enzyme I [Triticum aestivum]
  misc_feature (160)..(839): Homolog of NCBI NO: 11037532 NR Description: starch branching enyzyme 1 [Triticum aestivum]
  misc_feature (160)..(839): Homolog of NCBI NO: 4586237 NR Description: starch branching enzyme I [Triticum aestivum]
  misc_feature (160)..(839): Homolog of NCBI NO: 4586236 NR Description: starch branching enzyme I [Triticum aestivum]
  misc_feature (160)..(811): Homolog of NCBI NO: 1169912 NR Description: 1,4-alpha-glucan branching enzyme (Starch
  misc_feature (160)..(849): Homolog of NCBI NO: 5441248 NR Description: branching enzyme 3 [Phaseolus vulgaris]
  misc_feature (160)..(839): Homolog of NCBI NO: 7433851 NR Description: 1,4-alpha-glucan branching enzyme (EC 2.4.1.18) I
  misc_feature (160)..(858): Homolog of NCBI NO: 1771261 NR Description: 1,4-alpha-glucan branching enzyme [Manihot
  misc_feature (94)..(838): Homolog of NCBI NO: 3822022 NR Description: starch branching enzyme IIb [Hordeum vulgare]
  misc_feature (160)..(845): Homolog of NCBI NO: 283000 NR Description: 1,4-alpha-glucan branching enzyme (EC 2.4.1.18) I
  misc_feature (160)..(839): Homolog of NCBI NO: 4586238 NR Description: starch branching enzyme I [Triticum aestivum]
  misc_feature (160)..(839): Homolog of NCBI NO: 11037532 NR Description: starch branching enyzyme 1 [Triticum aestivum]
  misc_feature (160)..(839): Homolog of NCBI NO: 4586237 NR Description: starch branching enzyme I [Triticum aestivum]
  misc_feature (160)..(839): Homolog of NCBI NO: 4586236 NR Description: starch branching enzyme I [Triticum aestivum]
  misc_feature (160)..(811): Homolog of NCBI NO: 1169912 NR Description: 1,4-alpha-glucan branching enzyme (Starch
  misc_feature (160)..(849): Homolog of NCBI NO: 5441248 NR Description: branching enzyme 3 [Phaseolus vulgaris]
  misc_feature (160)..(839): Homolog of NCBI NO: 7433851 NR Description: 1,4-alpha-glucan branching enzyme (EC 2.4.1.18) I
  misc_feature (160)..(858): Homolog of NCBI NO: 1771261 NR Description: 1,4-alpha-glucan branching enzyme [Manihot
  misc_feature (94)..(838): Homolog of NCBI NO: 3822022 NR Description: starch branching enzyme IIb [Hordeum vulgare]

SEQ ID NO: 33832 - protein, 721 aa, Arabidopsis thaliana; identical to SEQ ID NO: 27074
  peptide (1)..(721): Ceres Seq. ID no. 13491800
  misc_feature (23)..(708): Homolog of NCBI NO: 283000 NR Description: 1,4-alpha-glucan branching enzyme (EC 2.4.1.18) I
  misc_feature (23)..(702): Homolog of NCBI NO: 4586237 NR Description: starch branching enzyme I [Triticum aestivum]
  misc_feature (23)..(702): Homolog of NCBI NO: 11037532 NR Description: starch branching enyzyme 1 [Triticum aestivum]
  misc_feature (23)..(702): Homolog of NCBI NO: 4586238 NR Description: starch branching enzyme I [Triticum aestivum]
  misc_feature (23)..(702): Homolog of NCBI NO: 4586236 NR Description: starch branching enzyme I [Triticum aestivum]
  misc_feature (23)..(674): Homolog of NCBI NO: 1169912 NR Description: 1,4-alpha-glucan branching enzyme (Starch
  misc_feature (23)..(712): Homolog of NCBI NO: 5441248 NR Description: branching enzyme 3 [Phaseolus vulgaris]
  misc_feature (23)..(702): Homolog of NCBI NO: 7433851 NR Description: 1,4-alpha-glucan branching enzyme (EC 2.4.1.18) I
  misc_feature (23)..(721): Homolog of NCBI NO: 1771261 NR Description: 1,4-alpha-glucan branching enzyme [Manihot
  misc_feature (1)..(701): Homolog of NCBI NO: 3822022 NR Description: starch branching enzyme IIb [Hordeum vulgare]
  misc_feature (23)..(708): Homolog of NCBI NO: 283000 NR Description: 1,4-alpha-glucan branching enzyme (EC 2.4.1.18) I
  misc_feature (23)..(702): Homolog of NCBI NO: 4586237 NR Description: starch branching enzyme I [Triticum aestivum]
  misc_feature (23)..(702): Homolog of NCBI NO: 11037532 NR Description: starch branching enyzyme 1 [Triticum aestivum]
  misc_feature (23)..(702): Homolog of NCBI NO: 4586238 NR Description: starch branching enzyme I [Triticum aestivum]
  misc_feature (23)..(702): Homolog of NCBI NO: 4586236 NR Description: starch branching enzyme I [Triticum aestivum]
  misc_feature (23)..(674): Homolog of NCBI NO: 1169912 NR Description: 1,4-alpha-glucan branching enzyme (Starch
  misc_feature (23)..(712): Homolog of NCBI NO: 5441248 NR Description: branching enzyme 3 [Phaseolus vulgaris]
  misc_feature (23)..(702): Homolog of NCBI NO: 7433851 NR Description: 1,4-alpha-glucan branching enzyme (EC 2.4.1.18) I
  misc_feature (23)..(721): Homolog of NCBI NO: 1771261 NR Description: 1,4-alpha-glucan branching enzyme [Manihot
  misc_feature (1)..(701): Homolog of NCBI NO: 3822022 NR Description: starch branching enzyme IIb [Hordeum vulgare]

SEQ ID NO: 33833 - DNA, 1515 bp, Arabidopsis thaliana; identical to SEQ ID NO: 30243
  misc_feature (1)..(1515): Ceres Seq. ID no. 12334769
  misc_feature: MA Experiment ID: 108434 Result: Down-regulated in Transcription
  misc_feature: MA Experiment 108434 PARAMETER Experiment Name: At_Root_Tips_cDNA_P Parameter: Tissue Value: Root Tips
  misc_feature: MA Experiment ID: 108668 Result: Up-regulated in Transcription
  misc_feature: MA Experiment 108668 PARAMETER Experiment Name: At_2mM_SA_cDNA_P Parameter: Plant Line Value: WS
  misc_feature: MA Experiment 108668 PARAMETER Experiment Name: At_2mM_SA_cDNA_P Parameter: Timepoint (hr) Value: 6
  misc_feature: MA Experiment 108668 PARAMETER Experiment Name: At_2mM_SA_cDNA_P Parameter: Treatment Value: 2mM SA vs. No Treatment
  misc_feature: MA Experiment ID: 20000111 Result: Down-regulated in Transcription
  misc_feature: MA Experiment 20000111 PARAMETER Experiment Name: At_42deg_Heat_cDNA_P Parameter: Temperature (deg C) Value: 42 vs. 22
  misc_feature: MA Experiment 20000111 PARAMETER Experiment Name: At_42deg_Heat_cDNA_P Parameter: Timepoint (hr) Value: 6
  misc_feature: MA Experiment 20000111 PARAMETER Experiment Name: At_42deg_Heat_cDNA_P Parameter: Tissue Value: Aerial
  misc_feature: MA Experiment ID: 20000113 Result: Down-regulated in Transcription
  misc_feature: MA Experiment 20000113 PARAMETER Experiment Name: At_42deg_Heat_cDNA_P Parameter: Temperature (deg C) Value: 42 vs. 22
  misc_feature: MA Experiment 20000113 PARAMETER Experiment Name: At_42deg_Heat_cDNA_P Parameter: Timepoint (hr) Value: 8
  misc_feature: MA Experiment 20000113 PARAMETER Experiment Name: At_42deg_Heat_cDNA_P Parameter: Tissue Value: Aerial
  misc_feature: MA Experiment ID: 20000182 Result: Up-regulated in Transcription
  misc_feature: MA Experiment 20000182 PARAMETER Experiment Name: At_2mM_SA_P Parameter: Age (day) Value: 14
  misc_feature: MA Experiment 20000182 PARAMETER Experiment Name: At_2mM_SA_P Parameter: Organism Value: A. thaliana
  misc_feature: MA Experiment 20000182 PARAMETER Experiment Name: At_2mM_SA_P Parameter: Plant Line Value: WS
  misc_feature: MA Experiment 20000182 PARAMETER Experiment Name: At_2mM_SA_P Parameter: Timepoint (hr) Value: 6
  misc_feature: MA Experiment 20000182 PARAMETER Experiment Name: At_2mM_SA_P Parameter: Tissue Value: Aerial
  misc_feature: MA Experiment 20000182 PARAMETER Experiment Name: At_2mM_SA_P Parameter: Treatment Value: 2mM SA vs. No Treatment
  misc_feature: MA Experiment ID: 20000496 Result: Up-regulated in Transcription
  misc_feature: MA Experiment 20000496 PARAMETER Experiment Name: At_Guard_Cells_P Parameter: Harvest Date Value: 7/19/2002
  misc_feature: MA Experiment 20000496 PARAMETER Experiment Name: At_Guard_Cells_P Parameter: Organism Value: Canola
  misc_feature: MA Experiment 20000496 PARAMETER Experiment Name: At_Guard_Cells_P Parameter: Tissue Value: Guard Cells vs. Leaves

SEQ ID NO: 33834 - protein, 184 aa, Arabidopsis thaliana; identical to SEQ ID NO: 30244
  peptide (1)..(184): Ceres Seq. ID no. 12334770
  misc_feature (28)..(174): Homolog of NCBI NO: 24215147 NR Description: putative outermembrane protein
  misc_feature (15)..(173): Homolog of NCBI NO: 24215150 NR Description: putative outermembrane protein
  misc_feature (25)..(175): Homolog of NCBI NO: 24215152 NR Description: Leucine-rich repeat containing protein
  misc_feature (28)..(175): Homolog of NCBI NO: 24216021 NR Description: Leucine-rich repeat containing protein
  misc_feature (25)..(175): Homolog of NCBI NO: 24216021 NR Description: Leucine-rich repeat containing protein
  misc_feature (15)..(169): Homolog of NCBI NO: 7445541 NR Description: hypothetical protein At2g30100 [imported] -
  misc_feature (15)..(169): Homolog of NCBI NO: 30684470 NR Description: unknown protein, leucine-rich repeat -related
  misc_feature (1)..(181): Homolog of NCBI NO: 37534990 NR Description: putative leucine-rich repeat protein
  misc_feature (1)..(168): Homolog of NCBI NO: 11357392 NR Description: hypothetical protein F13G24.110 - Arabidopsis
  misc_feature (1)..(168): Homolog of NCBI NO: 22326653 NR Description: putative protein

SEQ ID NO: 33835 - protein, 142 aa, Arabidopsis thaliana; identical to SEQ ID NO: 30245
  peptide (1)..(142): Ceres Seq. ID no. 12334771
  misc_feature (1)..(132): Homolog of NCBI NO: 24215147 NR Description: putative outermembrane protein
  misc_feature (1)..(131): Homolog of NCBI NO: 24215150 NR Description: putative outermembrane protein
  misc_feature (1)..(133): Homolog of NCBI NO: 24215152 NR Description: Leucine-rich repeat containing protein
  misc_feature (1)..(133): Homolog of NCBI NO: 24216021 NR Description: Leucine-rich repeat containing protein
  misc_feature (1)..(133): Homolog of NCBI NO: 24216021 NR Description: Leucine-rich repeat containing protein
  misc_feature (1)..(127): Homolog of NCBI NO: 7445541 NR Description: hypothetical protein At2g30100 [imported] -
  misc_feature (1)..(127): Homolog of NCBI NO: 30684470 NR Description: unknown protein, leucine-rich repeat -related
  misc_feature (1)..(139): Homolog of NCBI NO: 37534990 NR Description: putative leucine-rich repeat protein
  misc_feature (1)..(126): Homolog of NCBI NO: 11357392 NR Description: hypothetical protein F13G24.110 - Arabidopsis
  misc_feature (1)..(126): Homolog of NCBI NO: 22326653 NR Description: putative protein

SEQ ID NO: 33836 - protein, 115 aa, Arabidopsis thaliana; identical to SEQ ID NO: 30246
  peptide (1)..(115): Ceres Seq. ID no. 12334772
  misc_feature (1)..(105): Homolog of NCBI NO: 24215147 NR Description: putative outermembrane protein
  misc_feature (1)..(104): Homolog of NCBI NO: 24215150 NR Description: putative outermembrane protein
  misc_feature (1)..(106): Homolog of NCBI NO: 24215152 NR Description: Leucine-rich repeat containing protein
  misc_feature (1)..(106): Homolog of NCBI NO: 24216021 NR Description: Leucine-rich repeat containing protein
  misc_feature (1)..(106): Homolog of NCBI NO: 24216021 NR Description: Leucine-rich repeat containing protein
  misc_feature (1)..(100): Homolog of NCBI NO: 7445541 NR Description: hypothetical protein At2g30100 [imported] -
  misc_feature (1)..(100): Homolog of NCBI NO: 30684470 NR Description: unknown protein, leucine-rich repeat -related
  misc_feature (1)..(112): Homolog of NCBI NO: 37534990 NR Description: putative leucine-rich repeat protein
  misc_feature (1)..(99): Homolog of NCBI NO: 11357392 NR Description: hypothetical protein F13G24.110 - Arabidopsis
  misc_feature (1)..(99): Homolog of NCBI NO: 22326653 NR Description: putative protein

SEQ ID NO: 33837 - DNA, 1758 bp, Arabidopsis thaliana; identical to SEQ ID NO: 30247
  misc_feature (1)..(1758): Ceres Seq. ID no. 12324212
  misc_feature: MA Experiment ID: 108433 Result: Down-regulated in Transcription
  misc_feature: MA Experiment 108433 PARAMETER Experiment Name: At_rhl_Mutant2_cDNA_P Parameter: Age (day) Value: 7
  misc_feature: MA Experiment 108433 PARAMETER Experiment Name: At_rhl_Mutant2_cDNA_P Parameter: Organism Value: A. thaliana
  misc_feature: MA Experiment 108433 PARAMETER Experiment Name: At_rhl_Mutant2_cDNA_P Parameter: Plant Line Value: rhl Mutant vs. wt landsburg
  misc_feature: MA Experiment 108433 PARAMETER Experiment Name: At_rhl_Mutant2_cDNA_P Parameter: Tissue Value: Roots
  misc_feature: MA Experiment ID: 108462 Result: Up-regulated in Transcription
  misc_feature: MA Experiment 108462 PARAMETER Experiment Name: At_Germinating_Seeds_cDNA_P Parameter: Age (day) Value: 2 vs. 0
  misc_feature: MA Experiment 108462 PARAMETER Experiment Name: At_Germinating_Seeds_cDNA_P Parameter: Tissue Value: Germinating Seeds
  misc_feature: MA Experiment ID: 108463 Result: Up-regulated in Transcription
  misc_feature: MA Experiment 108463 PARAMETER Experiment Name: At_Germinating_Seeds_cDNA_P Parameter: Age (day) Value: 3 vs. 0
  misc_feature: MA Experiment 108463 PARAMETER Experiment Name: At_Germinating_Seeds_cDNA_P Parameter: Tissue Value: Germinating Seeds
  misc_feature: MA Experiment ID: 108464 Result: Up-regulated in Transcription
  misc_feature: MA Experiment 108464 PARAMETER Experiment Name: At_Germinating_Seeds_cDNA_P Parameter: Age (day) Value: 4 vs. 0
  misc_feature: MA Experiment 108464 PARAMETER Experiment Name: At_Germinating_Seeds_cDNA_P Parameter: Tissue Value: Germinating Seeds
  misc_feature: MA Experiment ID: 108577 Result: Down-regulated in Transcription
  misc_feature: MA Experiment 108577 PARAMETER Experiment Name: At_42deg_Heat_cDNA_P Parameter: Temperature (deg C) Value: 42 vs. 22
  misc_feature: MA Experiment 108577 PARAMETER Experiment Name: At_42deg_Heat_cDNA_P Parameter: Timepoint (hr) Value: 6
  misc_feature: MA Experiment 108577 PARAMETER Experiment Name: At_42deg_Heat_cDNA_P Parameter: Tissue Value: Aerial
  misc_feature: MA Experiment ID: 108579 Result: Down-regulated in Transcription
  misc_feature: MA Experiment 108579 PARAMETER Experiment Name: At_4deg_Cold_cDNA_P Parameter: Temperature (deg C) Value: 4 vs. 22
  misc_feature: MA Experiment 108579 PARAMETER Experiment Name: At_4deg_Cold_cDNA_P Parameter: Timepoint (hr) Value: 6
  misc_feature: MA Experiment 108579 PARAMETER Experiment Name: At_4deg_Cold_cDNA_P Parameter: Tissue Value: Aerial
  misc_feature: MA Experiment ID: 20000090 Result: Down-regulated in Transcription
  misc_feature: MA Experiment ID: 20000173 Result: Down-regulated in Transcription
  misc_feature: MA Experiment 20000173 PARAMETER Experiment Name: At_42deg_Heat_P Parameter: Age (day) Value: 14
  misc_feature: MA Experiment 20000173 PARAMETER Experiment Name: At_42deg_Heat_P Parameter: Organism Value: A. thaliana
  misc_feature: MA Experiment 20000173 PARAMETER Experiment Name: At_42deg_Heat_P Parameter: Plant Line Value: WS
  misc_feature: MA Experiment 20000173 PARAMETER Experiment Name: At_42deg_Heat_P Parameter: Temperature (deg C) Value: 42 vs. 22
  misc_feature: MA Experiment 20000173 PARAMETER Experiment Name: At_42deg_Heat_P Parameter: Timepoint (hr) Value: 6
  misc_feature: MA Experiment 20000173 PARAMETER Experiment Name: At_42deg_Heat_P Parameter: Tissue Value: Aerial
  misc_feature: MA Experiment ID: 20000214 Result: Down-regulated in Transcription
  misc_feature: MA Experiment 20000214 PARAMETER Experiment Name: At_4deg_Cold_P Parameter: Timepoint (hr) Value: 6
  misc_feature: MA Experiment ID: 20001450 Result: Up-regulated in Transcription
  misc_feature: MA Experiment 20001450 PARAMETER Experiment Name: At_Far-red-induction_P Parameter: Age (day) Value: 7
  misc_feature: MA Experiment 20001450 PARAMETER Experiment Name: At_Far-red-induction_P Parameter: Light Value: Far-red vs. White
  misc_feature: MA Experiment 20001450 PARAMETER Experiment Name: At_Far-red-induction_P Parameter: Organism Value: A. thaliana
  misc_feature: MA Experiment 20001450 PARAMETER Experiment Name: At_Far-red-induction_P Parameter: Plant Line Value: Columbia
  misc_feature: MA Experiment 20001450 PARAMETER Experiment Name: At_Far-red-induction_P Parameter: Timepoint (hr) Value: 8
  misc_feature: MA Experiment 20001450 PARAMETER Experiment Name: At_Far-red-induction_P Parameter: Tissue Value: Whole Plant
  misc_feature: MA Experiment ID: 20001451 Result: Up-regulated in Transcription
  misc_feature: MA Experiment 20001451 PARAMETER Experiment Name: At_Far-red-induction_P Parameter: Age (day) Value: 7
  misc_feature: MA Experiment 20001451 PARAMETER Experiment Name: At_Far-red-induction_P Parameter: Light Value: Far-red vs. White
  misc_feature: MA Experiment 20001451 PARAMETER Experiment Name: At_Far-red-induction_P Parameter: Organism Value: A. thaliana
  misc_feature: MA Experiment 20001451 PARAMETER Experiment Name: At_Far-red-induction_P Parameter: Plant Line Value: Columbia
  misc_feature: MA Experiment 20001451 PARAMETER Experiment Name: At_Far-red-induction_P Parameter: Timepoint (hr) Value: 24
  misc_feature: MA Experiment 20001451 PARAMETER Experiment Name: At_Far-red-induction_P Parameter: Tissue Value: Whole Plant
  misc_feature: MA Experiment ID: 20001555 Result: Down-regulated in Transcription
  misc_feature: MA Experiment 20001555 PARAMETER Experiment Name: At_Drought_Soil_Dry_P Parameter: Age (day) Value: 24
  misc_feature: MA Experiment 20001555 PARAMETER Experiment Name: At_Drought_Soil_Dry_P Parameter: Organism Value: A. thaliana
  misc_feature: MA Experiment 20001555 PARAMETER Experiment Name: At_Drought_Soil_Dry_P Parameter: Plant Line Value: WS
  misc_feature: MA Experiment 20001555 PARAMETER Experiment Name: At_Drought_Soil_Dry_P Parameter: Post Timepoint (hr) Value: None
  misc_feature: MA Experiment 20001555 PARAMETER Experiment Name: At_Drought_Soil_Dry_P Parameter: Post-Treatment Value: None
  misc_feature: MA Experiment 20001555 PARAMETER Experiment Name: At_Drought_Soil_Dry_P Parameter: Timepoint (day) Value: 10
  misc_feature: MA Experiment 20001555 PARAMETER Experiment Name: At_Drought_Soil_Dry_P Parameter: Treatment Value: Drought vs. No Drought
  misc_feature: MA Experiment ID: 20001556 Result: Down-regulated in Transcription
  misc_feature: MA Experiment 20001556 PARAMETER Experiment Name: At_Drought_Soil_Dry_P Parameter: Age (day) Value: 26
  misc_feature: MA Experiment 20001556 PARAMETER Experiment Name: At_Drought_Soil_Dry_P Parameter: Organism Value: A. thaliana
  misc_feature: MA Experiment 20001556 PARAMETER Experiment Name: At_Drought_Soil_Dry_P Parameter: Plant Line Value: WS
  misc_feature: MA Experiment 20001556 PARAMETER Experiment Name: At_Drought_Soil_Dry_P Parameter: Post Timepoint (hr) Value: None
  misc_feature: MA Experiment 20001556 PARAMETER Experiment Name: At_Drought_Soil_Dry_P Parameter: Post-Treatment Value: None
  misc_feature: MA Experiment 20001556 PARAMETER Experiment Name: At_Drought_Soil_Dry_P Parameter: Timepoint (day) Value: 12
  misc_feature: MA Experiment 20001556 PARAMETER Experiment Name: At_Drought_Soil_Dry_P Parameter: Treatment Value: Drought vs. No Drought
  misc_feature: MA Experiment ID: 20001557 Result: Down-regulated in Transcription
  misc_feature: MA Experiment 20001557 PARAMETER Experiment Name: At_Drought_Soil_Dry_P Parameter: Age (day) Value: 27
  misc_feature: MA Experiment 20001557 PARAMETER Experiment Name: At_Drought_Soil_Dry_P Parameter: Organism Value: A. thaliana
  misc_feature: MA Experiment 20001557 PARAMETER Experiment Name: At_Drought_Soil_Dry_P Parameter: Plant Line Value: WS
  misc_feature: MA Experiment 20001557 PARAMETER Experiment Name: At_Drought_Soil_Dry_P Parameter: Post Timepoint (hr) Value: 3
  misc_feature: MA Experiment 20001557 PARAMETER Experiment Name: At_Drought_Soil_Dry_P Parameter: Post-Treatment Value: Re-Water vs. No Drought
  misc_feature: MA Experiment 20001557 PARAMETER Experiment Name: At_Drought_Soil_Dry_P Parameter: Timepoint (day) Value: 13
  misc_feature: MA Experiment 20001557 PARAMETER Experiment Name: At_Drought_Soil_Dry_P Parameter: Treatment Value: Drought vs. No Drought
  misc_feature: MA Experiment ID: 20001559 Result: Down-regulated in Transcription
  misc_feature: MA Experiment 20001559 PARAMETER Experiment Name: At_Drought_Soil_Dry_P Parameter: Age (day) Value: 28
  misc_feature: MA Experiment 20001559 PARAMETER Experiment Name: At_Drought_Soil_Dry_P Parameter: Organism Value: A. thaliana
  misc_feature: MA Experiment 20001559 PARAMETER Experiment Name: At_Drought_Soil_Dry_P Parameter: Plant Line Value: WS
  misc_feature: MA Experiment 20001559 PARAMETER Experiment Name: At_Drought_Soil_Dry_P Parameter: Post Timepoint (hr) Value: 29
  misc_feature: MA Experiment 20001559 PARAMETER Experiment Name: At_Drought_Soil_Dry_P Parameter: Post-Treatment Value: Re-Water vs. No Drought
  misc_feature: MA Experiment 20001559 PARAMETER Experiment Name: At_Drought_Soil_Dry_P Parameter: Timepoint (day) Value: 14
  misc_feature: MA Experiment 20001559 PARAMETER Experiment Name: At_Drought_Soil_Dry_P Parameter: Treatment Value: Drought vs. No Drought

SEQ ID NO: 33838 - protein, 455 aa, Arabidopsis thaliana; identical to SEQ ID NO: 30248
  peptide (1)..(455): Ceres Seq. ID no. 12324213
  misc_feature (72)..(426): Pfam Name: Glycosyl hydrolases family 28 Pfam Description: Glycosyl hydrolases family 28
  misc_feature (22)..(437): Homolog of NCBI NO: 11263971 NR Description: hypothetical protein T17J13.70 - Arabidopsis
  misc_feature (22)..(437): Homolog of NCBI NO: 18412253 NR Description: polygalacturonase, putative
  misc_feature (1)..(441): Homolog of NCBI NO: 40714685 NR Description: putative polygalacturonase
  misc_feature (68)..(429): Homolog of NCBI NO: 21593399 NR Description: polygalacturonase-like protein [Arabidopsis
  misc_feature (68)..(429): Homolog of NCBI NO: 18397713 NR Description: polygalacturonase, putative
  misc_feature (1)..(434): Homolog of NCBI NO: 22327662 NR Description: Expressed protein
  misc_feature (3)..(429): Homolog of NCBI NO: 30679999 NR Description: polygalacturonase, putative [Arabidopsis
  misc_feature (3)..(455): Homolog of NCBI NO: 7939578 NR Description: polygalacturonase-like protein [Arabidopsis
  misc_feature (3)..(455): Homolog of NCBI NO: 21553827 NR Description: polygalacturonase, putative [Arabidopsis thaliana]
  misc_feature (1)..(455): Homolog of NCBI NO: 15228881 NR Description: polygalacturonase, putative

SEQ ID NO: 33839 - protein, 453 aa, Arabidopsis thaliana; identical to SEQ ID NO: 30249
  peptide (1)..(453): Ceres Seq. ID no. 12324214
  misc_feature (70)..(424): Pfam Name: Glycosyl hydrolases family 28 Pfam Description: Glycosyl hydrolases family 28
  misc_feature (20)..(435): Homolog of NCBI NO: 11263971 NR Description: hypothetical protein T17J13.70 - Arabidopsis
  misc_feature (20)..(435): Homolog of NCBI NO: 18412253 NR Description: polygalacturonase, putative
  misc_feature (1)..(439): Homolog of NCBI NO: 40714685 NR Description: putative polygalacturonase
  misc_feature (66)..(427): Homolog of NCBI NO: 21593399 NR Description: polygalacturonase-like protein [Arabidopsis
  misc_feature (66)..(427): Homolog of NCBI NO: 18397713 NR Description: polygalacturonase, putative
  misc_feature (1)..(432): Homolog of NCBI NO: 22327662 NR Description: Expressed protein
  misc_feature (1)..(427): Homolog of NCBI NO: 30679999 NR Description: polygalacturonase, putative [Arabidopsis
  misc_feature (1)..(453): Homolog of NCBI NO: 7939578 NR Description: polygalacturonase-like protein [Arabidopsis
  misc_feature (1)..(453): Homolog of NCBI NO: 21553827 NR Description: polygalacturonase, putative [Arabidopsis thaliana]
  misc_feature (1)..(453): Homolog of NCBI NO: 15228881 NR Description: polygalacturonase, putative

SEQ ID NO: 33840 - DNA, 1235 bp, Arabidopsis thaliana; identical to SEQ ID NO: 30250
  misc_feature (1)..(1235): Ceres Seq. ID no. 12371716
  misc_feature: MA Experiment ID: 108668 Result: Up-regulated in Transcription
  misc_feature: MA Experiment 108668 PARAMETER Experiment Name: At_2mM_SA_cDNA_P Parameter: Plant Line Value: WS
  misc_feature: MA Experiment 108668 PARAMETER Experiment Name: At_2mM_SA_cDNA_P Parameter: Timepoint (hr) Value: 6
  misc_feature: MA Experiment 108668 PARAMETER Experiment Name: At_2mM_SA_cDNA_P Parameter: Treatment Value: 2mM SA vs. No Treatment
  misc_feature: MA Experiment ID: 20000072 Result: Up-regulated in Transcription
  misc_feature: MA Experiment 20000072 PARAMETER Experiment Name: At_100uM_ABA_Mutants_cDNA_P Parameter: Plant Line Value: CS8105
  misc_feature: MA Experiment 20000072 PARAMETER Experiment Name: At_100uM_ABA_Mutants_cDNA_P Parameter: Timepoint (hr) Value: 6
  misc_feature: MA Experiment 20000072 PARAMETER Experiment Name: At_100uM_ABA_Mutants_cDNA_P Parameter: Tissue Value: Aerial
  misc_feature: MA Experiment 20000072 PARAMETER Experiment Name: At_100uM_ABA_Mutants_cDNA_P Parameter: Treatment Value: 100uM ABA vs. No Treatment
  misc_feature: MA Experiment ID: 20000171 Result: Down-regulated in Transcription
  misc_feature: MA Experiment 20000171 PARAMETER Experiment Name: At_42deg_Heat_P Parameter: Age (day) Value: 14
  misc_feature: MA Experiment 20000171 PARAMETER Experiment Name: At_42deg_Heat_P Parameter: Organism Value: A. thaliana
  misc_feature: MA Experiment 20000171 PARAMETER Experiment Name: At_42deg_Heat_P Parameter: Plant Line Value: WS
  misc_feature: MA Experiment 20000171 PARAMETER Experiment Name: At_42deg_Heat_P Parameter: Temperature (deg C) Value: 42 vs. 22
  misc_feature: MA Experiment 20000171 PARAMETER Experiment Name: At_42deg_Heat_P Parameter: Timepoint (hr) Value: 1
  misc_feature: MA Experiment 20000171 PARAMETER Experiment Name: At_42deg_Heat_P Parameter: Tissue Value: Aerial
  misc_feature: MA Experiment ID: 20000173 Result: Down-regulated in Transcription
  misc_feature: MA Experiment 20000173 PARAMETER Experiment Name: At_42deg_Heat_P Parameter: Age (day) Value: 14
  misc_feature: MA Experiment 20000173 PARAMETER Experiment Name: At_42deg_Heat_P Parameter: Organism Value: A. thaliana
  misc_feature: MA Experiment 20000173 PARAMETER Experiment Name: At_42deg_Heat_P Parameter: Plant Line Value: WS
  misc_feature: MA Experiment 20000173 PARAMETER Experiment Name: At_42deg_Heat_P Parameter: Temperature (deg C) Value: 42 vs. 22
  misc_feature: MA Experiment 20000173 PARAMETER Experiment Name: At_42deg_Heat_P Parameter: Timepoint (hr) Value: 6
  misc_feature: MA Experiment 20000173 PARAMETER Experiment Name: At_42deg_Heat_P Parameter: Tissue Value: Aerial
  misc_feature: MA Experiment ID: 20000180 Result: Up-regulated in Transcription
  misc_feature: MA Experiment 20000180 PARAMETER Experiment Name: At_Germinating_Seeds_P Parameter: Age (hr) Value: 24 vs. 0
  misc_feature: MA Experiment 20000180 PARAMETER Experiment Name: At_Germinating_Seeds_P Parameter: Tissue Value: Germinating Seeds
  misc_feature: MA Experiment ID: 20000182 Result: Up-regulated in Transcription
  misc_feature: MA Experiment 20000182 PARAMETER Experiment Name: At_2mM_SA_P Parameter: Age (day) Value: 14
  misc_feature: MA Experiment 20000182 PARAMETER Experiment Name: At_2mM_SA_P Parameter: Organism Value: A. thaliana
  misc_feature: MA Experiment 20000182 PARAMETER Experiment Name: At_2mM_SA_P Parameter: Plant Line Value: WS
  misc_feature: MA Experiment 20000182 PARAMETER Experiment Name: At_2mM_SA_P Parameter: Timepoint (hr) Value: 6
  misc_feature: MA Experiment 20000182 PARAMETER Experiment Name: At_2mM_SA_P Parameter: Tissue Value: Aerial
  misc_feature: MA Experiment 20000182 PARAMETER Experiment Name: At_2mM_SA_P Parameter: Treatment Value: 2mM SA vs. No Treatment
  misc_feature: MA Experiment ID: 20000185 Result: Down-regulated in Transcription
  misc_feature: MA Experiment 20000185 PARAMETER Experiment Name: At_Roots__P Parameter: Age (day) Value: 7 vs. 21
  misc_feature: MA Experiment 20000185 PARAMETER Experiment Name: At_Roots__P Parameter: Organism Value: A. thaliana
  misc_feature: MA Experiment 20000185 PARAMETER Experiment Name: At_Roots__P Parameter: Tissue Value: Roots vs. Whole Plant
  misc_feature: MA Experiment ID: 20000213 Result: Up-regulated in Transcription
  misc_feature: MA Experiment 20000213 PARAMETER Experiment Name: At_4deg_Cold_P Parameter: Timepoint (hr) Value: 2
  misc_feature: MA Experiment ID: 20000227 Result: Up-regulated in Transcription
  misc_feature: MA Experiment 20000227 PARAMETER Experiment Name: At_Root-Tips-vs-Tops_P Parameter: Tissue Value: Root Tips vs. Root Tops
  misc_feature: MA Experiment ID: 20000265 Result: Down-regulated in Transcription
  misc_feature: MA Experiment 20000265 PARAMETER Experiment Name: At_Open_Flower_P Parameter: Age (day) Value: 21
  misc_feature: MA Experiment 20000265 PARAMETER Experiment Name: At_Open_Flower_P Parameter: Plant Line Value: WS
  misc_feature: MA Experiment 20000265 PARAMETER Experiment Name: At_Open_Flower_P Parameter: Tissue Value: Closed Flower vs. Whole Plant
  misc_feature: MA Experiment ID: 20000438 Result: Down-regulated in Transcription
  misc_feature: MA Experiment 20000438 PARAMETER Experiment Name: At_Shoots__P Parameter: Age (day) Value: 14
  misc_feature: MA Experiment 20000438 PARAMETER Experiment Name: At_Shoots__P Parameter: Tissue Value: Shoots vs. Whole Plant
  misc_feature: MA Experiment ID: 20000439 Result: Down-regulated in Transcription
  misc_feature: MA Experiment 20000439 PARAMETER Experiment Name: At_Roots__P Parameter: Age (day) Value: 14 vs. 21
  misc_feature: MA Experiment 20000439 PARAMETER Experiment Name: At_Roots__P Parameter: Organism Value: A. thaliana
  misc_feature: MA Experiment 20000439 PARAMETER Experiment Name: At_Roots__P Parameter: Tissue Value: Roots vs. Whole Plant
  misc_feature: MA Experiment ID: 20000455 Result: Down-regulated in Transcription
  misc_feature: MA Experiment 20000455 PARAMETER Experiment Name: At_100uM_ABA_P Parameter: Age (day) Value: 16
  misc_feature: MA Experiment 20000455 PARAMETER Experiment Name: At_100uM_ABA_P Parameter: Organism Value: A. thaliana
  misc_feature: MA Experiment 20000455 PARAMETER Experiment Name: At_100uM_ABA_P Parameter: Plant Line Value: WS
  misc_feature: MA Experiment 20000455 PARAMETER Experiment Name: At_100uM_ABA_P Parameter: Timepoint (hr) Value: 48
  misc_feature: MA Experiment 20000455 PARAMETER Experiment Name: At_100uM_ABA_P Parameter: Tissue Value: Aerial
  misc_feature: MA Experiment 20000455 PARAMETER Experiment Name: At_100uM_ABA_P Parameter: Treatment Value: 100uM ABA vs. No Treatment
  misc_feature: MA Experiment ID: 20000460 Result: Up-regulated in Transcription
  misc_feature: MA Experiment 20000460 PARAMETER Experiment Name: At_10percent_PEG_P Parameter: Age (day) Value: 12
  misc_feature: MA Experiment 20000460 PARAMETER Experiment Name: At_10percent_PEG_P Parameter: Organism Value: A. thaliana
  misc_feature: MA Experiment 20000460 PARAMETER Experiment Name: At_10percent_PEG_P Parameter: Plant Line Value: WS
  misc_feature: MA Experiment 20000460 PARAMETER Experiment Name: At_10percent_PEG_P Parameter: Timepoint (day) Value: 12
  misc_feature: MA Experiment 20000460 PARAMETER Experiment Name: At_10percent_PEG_P Parameter: Tissue Value: Whole Plant
  misc_feature: MA Experiment 20000460 PARAMETER Experiment Name: At_10percent_PEG_P Parameter: Treatment Value: 10percent PEG vs. No Treatment
  misc_feature: MA Experiment ID: 20000495 Result: Down-regulated in Transcription
  misc_feature: MA Experiment 20000495 PARAMETER Experiment Name: At_Guard_Cells_P Parameter: Harvest Date Value: 8/2/2002
  misc_feature: MA Experiment 20000495 PARAMETER Experiment Name: At_Guard_Cells_P Parameter: Organism Value: A. thaliana
  misc_feature: MA Experiment 20000495 PARAMETER Experiment Name: At_Guard_Cells_P Parameter: Tissue Value: Guard Cells vs. Leaves
  misc_feature: MA Experiment ID: 20000527 Result: Up-regulated in Transcription
  misc_feature: MA Experiment 20000527 PARAMETER Experiment Name: At_10percent_PEG_P Parameter: Age (day) Value: 20
  misc_feature: MA Experiment 20000527 PARAMETER Experiment Name: At_10percent_PEG_P Parameter: Organism Value: A. thaliana
  misc_feature: MA Experiment 20000527 PARAMETER Experiment Name: At_10percent_PEG_P Parameter: Plant Line Value: WS
  misc_feature: MA Experiment 20000527 PARAMETER Experiment Name: At_10percent_PEG_P Parameter: Timepoint (day) Value: 20
  misc_feature: MA Experiment 20000527 PARAMETER Experiment Name: At_10percent_PEG_P Parameter: Tissue Value: Whole Plant
  misc_feature: MA Experiment 20000527 PARAMETER Experiment Name: At_10percent_PEG_P Parameter: Treatment Value: 10percent PEG vs. No Treatment
  misc_feature: MA Experiment ID: 20000709 Result: Up-regulated in Transcription
  misc_feature: MA Experiment 20000709 PARAMETER Experiment Name: At_15mM_NH4NO3_L-to-H_P Parameter: Age (hr) Value: 14
  misc_feature: MA Experiment 20000709 PARAMETER Experiment Name: At_15mM_NH4NO3_L-to-H_P Parameter: Organism Value: A. thaliana
  misc_feature: MA Experiment 20000709 PARAMETER Experiment Name: At_15mM_NH4NO3_L-to-H_P Parameter: Plant Line Value: WS
  misc_feature: MA Experiment 20000709 PARAMETER Experiment Name: At_15mM_NH4NO3_L-to-H_P Parameter: Timepoint (hr) Value: 4
  misc_feature: MA Experiment 20000709 PARAMETER Experiment Name: At_15mM_NH4NO3_L-to-H_P Parameter: Tissue Value: Aerial
  misc_feature: MA Experiment 20000709 PARAMETER Experiment Name: At_15mM_NH4NO3_L-to-H_P Parameter: Treatment Value: 15mM NH4NO3 vs. 30mM Mannitol
  misc_feature: MA Experiment ID: 20001247 Result: Up-regulated in Transcription
  misc_feature: MA Experiment 20001247 PARAMETER Experiment Name: At_Far-red-induction_P Parameter: Age (day) Value: 7
  misc_feature: MA Experiment 20001247 PARAMETER Experiment Name: At_Far-red-induction_P Parameter: Light Value: Far-red vs. White
  misc_feature: MA Experiment 20001247 PARAMETER Experiment Name: At_Far-red-induction_P Parameter: Organism Value: A. thaliana
  misc_feature: MA Experiment 20001247 PARAMETER Experiment Name: At_Far-red-induction_P Parameter: Plant Line Value: Columbia
  misc_feature: MA Experiment 20001247 PARAMETER Experiment Name: At_Far-red-induction_P Parameter: Timepoint (hr) Value: 1
  misc_feature: MA Experiment 20001247 PARAMETER Experiment Name: At_Far-red-induction_P Parameter: Tissue Value: Whole Plant
  misc_feature: MA Experiment ID: 20001554 Result: Down-regulated in Transcription
  misc_feature: MA Experiment 20001554 PARAMETER Experiment Name: At_Drought_Soil_Dry_P Parameter: Age (day) Value: 21
  misc_feature: MA Experiment 20001554 PARAMETER Experiment Name: At_Drought_Soil_Dry_P Parameter: Organism Value: A. thaliana
  misc_feature: MA Experiment 20001554 PARAMETER Experiment Name: At_Drought_Soil_Dry_P Parameter: Plant Line Value: WS
  misc_feature: MA Experiment 20001554 PARAMETER Experiment Name: At_Drought_Soil_Dry_P Parameter: Post Timepoint (hr) Value: None
  misc_feature: MA Experiment 20001554 PARAMETER Experiment Name: At_Drought_Soil_Dry_P Parameter: Post-Treatment Value: None
  misc_feature: MA Experiment 20001554 PARAMETER Experiment Name: At_Drought_Soil_Dry_P Parameter: Timepoint (day) Value: 7
  misc_feature: MA Experiment 20001554 PARAMETER Experiment Name: At_Drought_Soil_Dry_P Parameter: Treatment Value: Drought vs. No Drought
  misc_feature: MA Experiment ID: 20001555 Result: Down-regulated in Transcription
  misc_feature: MA Experiment 20001555 PARAMETER Experiment Name: At_Drought_Soil_Dry_P Parameter: Age (day) Value: 24
  misc_feature: MA Experiment 20001555 PARAMETER Experiment Name: At_Drought_Soil_Dry_P Parameter: Organism Value: A. thaliana
  misc_feature: MA Experiment 20001555 PARAMETER Experiment Name: At_Drought_Soil_Dry_P Parameter: Plant Line Value: WS
  misc_feature: MA Experiment 20001555 PARAMETER Experiment Name: At_Drought_Soil_Dry_P Parameter: Post Timepoint (hr) Value: None
  misc_feature: MA Experiment 20001555 PARAMETER Experiment Name: At_Drought_Soil_Dry_P Parameter: Post-Treatment Value: None
  misc_feature: MA Experiment 20001555 PARAMETER Experiment Name: At_Drought_Soil_Dry_P Parameter: Timepoint (day) Value: 10
  misc_feature: MA Experiment 20001555 PARAMETER Experiment Name: At_Drought_Soil_Dry_P Parameter: Treatment Value: Drought vs. No Drought
  misc_feature: MA Experiment ID: 20001556 Result: Down-regulated in Transcription
  misc_feature: MA Experiment 20001556 PARAMETER Experiment Name: At_Drought_Soil_Dry_P Parameter: Age (day) Value: 26
  misc_feature: MA Experiment 20001556 PARAMETER Experiment Name: At_Drought_Soil_Dry_P Parameter: Organism Value: A. thaliana
  misc_feature: MA Experiment 20001556 PARAMETER Experiment Name: At_Drought_Soil_Dry_P Parameter: Plant Line Value: WS
  misc_feature: MA Experiment 20001556 PARAMETER Experiment Name: At_Drought_Soil_Dry_P Parameter: Post Timepoint (hr) Value: None
  misc_feature: MA Experiment 20001556 PARAMETER Experiment Name: At_Drought_Soil_Dry_P Parameter: Post-Treatment Value: None
  misc_feature: MA Experiment 20001556 PARAMETER Experiment Name: At_Drought_Soil_Dry_P Parameter: Timepoint (day) Value: 12
  misc_feature: MA Experiment 20001556 PARAMETER Experiment Name: At_Drought_Soil_Dry_P Parameter: Treatment Value: Drought vs. No Drought
  misc_feature: MA Experiment ID: 20001557 Result: Up-regulated in Transcription
  misc_feature: MA Experiment 20001557 PARAMETER Experiment Name: At_Drought_Soil_Dry_P Parameter: Age (day) Value: 27
  misc_feature: MA Experiment 20001557 PARAMETER Experiment Name: At_Drought_Soil_Dry_P Parameter: Organism Value: A. thaliana
  misc_feature: MA Experiment 20001557 PARAMETER Experiment Name: At_Drought_Soil_Dry_P Parameter: Plant Line Value: WS
  misc_feature: MA Experiment 20001557 PARAMETER Experiment Name: At_Drought_Soil_Dry_P Parameter: Post Timepoint (hr) Value: 3
  misc_feature: MA Experiment 20001557 PARAMETER Experiment Name: At_Drought_Soil_Dry_P Parameter: Post-Treatment Value: Re-Water vs. No Drought
  misc_feature: MA Experiment 20001557 PARAMETER Experiment Name: At_Drought_Soil_Dry_P Parameter: Timepoint (day) Value: 13
  misc_feature: MA Experiment 20001557 PARAMETER Experiment Name: At_Drought_Soil_Dry_P Parameter: Treatment Value: Drought vs. No Drought
  misc_feature: MA Experiment ID: 20001774 Result: Down-regulated in Transcription
  misc_feature: MA Experiment 20001774 PARAMETER Experiment Name: At_Far-red-enriched-adult_P Parameter: Age (day) Value: 31
  misc_feature: MA Experiment 20001774 PARAMETER Experiment Name: At_Far-red-enriched-adult_P Parameter: Light Value: Far-red enriched vs. White
  misc_feature: MA Experiment 20001774 PARAMETER Experiment Name: At_Far-red-enriched-adult_P Parameter: Organism Value: A. thaliana
  misc_feature: MA Experiment 20001774 PARAMETER Experiment Name: At_Far-red-enriched-adult_P Parameter: Plant Line Value: Columbia
  misc_feature: MA Experiment 20001774 PARAMETER Experiment Name: At_Far-red-enriched-adult_P Parameter: Timepoint (hr) Value: 72
  misc_feature: MA Experiment 20001774 PARAMETER Experiment Name: At_Far-red-enriched-adult_P Parameter: Tissue Value: Aerial
  misc_feature: MA Experiment ID: 20001905 Result: Up-regulated in Transcription
  misc_feature: MA Experiment 20001905 PARAMETER Experiment Name: At_Drought_Reproduction_P Parameter: Age (day) Value: 40
  misc_feature: MA Experiment 20001905 PARAMETER Experiment Name: At_Drought_Reproduction_P Parameter: Organism Value: A. thaliana
  misc_feature: MA Experiment 20001905 PARAMETER Experiment Name: At_Drought_Reproduction_P Parameter: Plant Line Value: WS
  misc_feature: MA Experiment 20001905 PARAMETER Experiment Name: At_Drought_Reproduction_P Parameter: Timepoint (day) Value: 10
  misc_feature: MA Experiment 20001905 PARAMETER Experiment Name: At_Drought_Reproduction_P Parameter: Tissue Value: Rosettes
  misc_feature: MA Experiment 20001905 PARAMETER Experiment Name: At_Drought_Reproduction_P Parameter: Treatment Value: Drought vs. No Drought
  misc_feature: MA Experiment ID: 20001911 Result: Down-regulated in Transcription
  misc_feature: MA Experiment 20001911 PARAMETER Experiment Name: At_Drought_Reproduction_P Parameter: Age (day) Value: 40
  misc_feature: MA Experiment 20001911 PARAMETER Experiment Name: At_Drought_Reproduction_P Parameter: Organism Value: A. thaliana
  misc_feature: MA Experiment 20001911 PARAMETER Experiment Name: At_Drought_Reproduction_P Parameter: Plant Line Value: WS
  misc_feature: MA Experiment 20001911 PARAMETER Experiment Name: At_Drought_Reproduction_P Parameter: Timepoint (day) Value: 10
  misc_feature: MA Experiment 20001911 PARAMETER Experiment Name: At_Drought_Reproduction_P Parameter: Tissue Value: Flowers
  misc_feature: MA Experiment 20001911 PARAMETER Experiment Name: At_Drought_Reproduction_P Parameter: Treatment Value: Drought vs. No Drought

SEQ ID NO: 33841 - protein, 365 aa, Arabidopsis thaliana; identical to SEQ ID NO: 30251
  peptide (1)..(365): Ceres Seq. ID no. 12371717
  misc_feature (41)..(348): Homolog of NCBI NO: 38346630 NR Description: OSJNBa0074L08.24 [Oryza sativa (japonica
  misc_feature (32)..(350): Homolog of NCBI NO: 15217851 NR Description: hypothetical protein; protein id: At1g02720.1
  misc_feature (9)..(350): Homolog of NCBI NO: 21554300 NR Description: putative glycosyl transferase [Arabidopsis
  misc_feature (9)..(350): Homolog of NCBI NO: 15235247 NR Description: predicted glycosyl transferase
  misc_feature (1)..(349): Homolog of NCBI NO: 11281926 NR Description: hypothetical protein F26K9.90 - Arabidopsis
  misc_feature (1)..(349): Homolog of NCBI NO: 22331906 NR Description: putative protein
  misc_feature (42)..(350): Homolog of NCBI NO: 15221684 NR Description: putative glycosyl transferase; protein id:
  misc_feature (33)..(353): Homolog of NCBI NO: 18409445 NR Description: expressed protein
  misc_feature (11)..(350): Homolog of NCBI NO: 12003394 NR Description: Avr9/Cf-9 rapidly elicited protein 231 [Nicotiana
  misc_feature (1)..(365): Homolog of NCBI NO: 30689156 NR Description: galactinol synthase, putative [Arabidopsis

SEQ ID NO: 33842 - protein, 364 aa, Arabidopsis thaliana; identical to SEQ ID NO: 30252
  peptide (1)..(364): Ceres Seq. ID no. 12371718
  misc_feature (40)..(347): Homolog of NCBI NO: 38346630 NR Description: OSJNBa0074L08.24 [Oryza sativa (japonica
  misc_feature (31)..(349): Homolog of NCBI NO: 15217851 NR Description: hypothetical protein; protein id: At1g02720.1
  misc_feature (8)..(349): Homolog of NCBI NO: 21554300 NR Description: putative glycosyl transferase [Arabidopsis
  misc_feature (8)..(349): Homolog of NCBI NO: 15235247 NR Description: predicted glycosyl transferase
  misc_feature (1)..(348): Homolog of NCBI NO: 11281926 NR Description: hypothetical protein F26K9.90 - Arabidopsis
  misc_feature (1)..(348): Homolog of NCBI NO: 22331906 NR Description: putative protein
  misc_feature (41)..(349): Homolog of NCBI NO: 15221684 NR Description: putative glycosyl transferase; protein id:
  misc_feature (32)..(352): Homolog of NCBI NO: 18409445 NR Description: expressed protein
  misc_feature (10)..(349): Homolog of NCBI NO: 12003394 NR Description: Avr9/Cf-9 rapidly elicited protein 231 [Nicotiana
  misc_feature (1)..(364): Homolog of NCBI NO: 30689156 NR Description: galactinol synthase, putative [Arabidopsis

SEQ ID NO: 33843 - protein, 323 aa, Arabidopsis thaliana; identical to SEQ ID NO: 30253
  peptide (1)..(323): Ceres Seq. ID no. 12371719
  misc_feature (1)..(306): Homolog of NCBI NO: 38346630 NR Description: OSJNBa0074L08.24 [Oryza sativa (japonica
  misc_feature (1)..(308): Homolog of NCBI NO: 15217851 NR Description: hypothetical protein; protein id: At1g02720.1
  misc_feature (1)..(308): Homolog of NCBI NO: 21554300 NR Description: putative glycosyl transferase [Arabidopsis
  misc_feature (1)..(308): Homolog of NCBI NO: 15235247 NR Description: predicted glycosyl transferase
  misc_feature (1)..(307): Homolog of NCBI NO: 11281926 NR Description: hypothetical protein F26K9.90 - Arabidopsis
  misc_feature (1)..(307): Homolog of NCBI NO: 22331906 NR Description: putative protein
  misc_feature (1)..(308): Homolog of NCBI NO: 15221684 NR Description: putative glycosyl transferase; protein id:
  misc_feature (1)..(311): Homolog of NCBI NO: 18409445 NR Description: expressed protein
  misc_feature (1)..(308): Homolog of NCBI NO: 12003394 NR Description: Avr9/Cf-9 rapidly elicited protein 231 [Nicotiana
  misc_feature (1)..(323): Homolog of NCBI NO: 30689156 NR Description: galactinol synthase, putative [Arabidopsis

SEQ ID NO: 33844 - DNA, 1325 bp, Arabidopsis thaliana; identical to SEQ ID NO: 30254
  misc_feature (1)..(1325): Ceres Seq. ID no. 13500101
  misc_feature: MA Experiment ID: 108434 Result: Down-regulated in Transcription
  misc_feature: MA Experiment 108434 PARAMETER Experiment Name: At_Root_Tips_cDNA_P Parameter: Tissue Value: Root Tips
  misc_feature: MA Experiment ID: 108462 Result: Up-regulated in Transcription
  misc_feature: MA Experiment 108462 PARAMETER Experiment Name: At_Germinating_Seeds_cDNA_P Parameter: Age (day) Value: 2 vs. 0
  misc_feature: MA Experiment 108462 PARAMETER Experiment Name: At_Germinating_Seeds_cDNA_P Parameter: Tissue Value: Germinating Seeds
  misc_feature: MA Experiment ID: 108464 Result: Up-regulated in Transcription
  misc_feature: MA Experiment 108464 PARAMETER Experiment Name: At_Germinating_Seeds_cDNA_P Parameter: Age (day) Value: 4 vs. 0
  misc_feature: MA Experiment 108464 PARAMETER Experiment Name: At_Germinating_Seeds_cDNA_P Parameter: Tissue Value: Germinating Seeds
  misc_feature: MA Experiment ID: 108488 Result: Down-regulated in Transcription
  misc_feature: MA Experiment ID: 108573 Result: Up-regulated in Transcription
  misc_feature: MA Experiment 108573 PARAMETER Experiment Name: At_Drought_cDNA_P Parameter: Timepoint (hr) Value: 6
  misc_feature: MA Experiment 108573 PARAMETER Experiment Name: At_Drought_cDNA_P Parameter: Tissue Value: Aerial
  misc_feature: MA Experiment 108573 PARAMETER Experiment Name: At_Drought_cDNA_P Parameter: Treatment Value: Drought vs. No Drought
  misc_feature: MA Experiment ID: 108595 Result: Up-regulated in Transcription
  misc_feature: MA Experiment 108595 PARAMETER Experiment Name: At_Ler-pi_Ovule_cDNA_P Parameter: Plant Line Value: null
  misc_feature: MA Experiment ID: 20000072 Result: Up-regulated in Transcription
  misc_feature: MA Experiment 20000072 PARAMETER Experiment Name: At_100uM_ABA_Mutants_cDNA_P Parameter: Plant Line Value: CS8105
  misc_feature: MA Experiment 20000072 PARAMETER Experiment Name: At_100uM_ABA_Mutants_cDNA_P Parameter: Timepoint (hr) Value: 6
  misc_feature: MA Experiment 20000072 PARAMETER Experiment Name: At_100uM_ABA_Mutants_cDNA_P Parameter: Tissue Value: Aerial
  misc_feature: MA Experiment 20000072 PARAMETER Experiment Name: At_100uM_ABA_Mutants_cDNA_P Parameter: Treatment Value: 100uM ABA vs. No Treatment
  misc_feature: MA Experiment ID: 20000117 Result: Up-regulated in Transcription
  misc_feature: MA Experiment 20000117 PARAMETER Experiment Name: At_100uM_ABA_Mutants_cDNA_P Parameter: Plant Line Value: Columbia
  misc_feature: MA Experiment 20000117 PARAMETER Experiment Name: At_100uM_ABA_Mutants_cDNA_P Parameter: Timepoint (hr) Value: 6
  misc_feature: MA Experiment 20000117 PARAMETER Experiment Name: At_100uM_ABA_Mutants_cDNA_P Parameter: Tissue Value: Aerial
  misc_feature: MA Experiment 20000117 PARAMETER Experiment Name: At_100uM_ABA_Mutants_cDNA_P Parameter: Treatment Value: 100uM ABA vs. No Treatment
  misc_feature: MA Experiment ID: 20000308 Result: Up-regulated in Transcription
  misc_feature: MA Experiment 20000308 PARAMETER Experiment Name: At_100mM_NaCl__P Parameter: Age (day) Value: 17
  misc_feature: MA Experiment 20000308 PARAMETER Experiment Name: At_100mM_NaCl__P Parameter: Organism Value: A. thaliana
  misc_feature: MA Experiment 20000308 PARAMETER Experiment Name: At_100mM_NaCl__P Parameter: Plant Line Value: WS
  misc_feature: MA Experiment 20000308 PARAMETER Experiment Name: At_100mM_NaCl__P Parameter: Timepoint (hr) Value: 72
  misc_feature: MA Experiment 20000308 PARAMETER Experiment Name: At_100mM_NaCl__P Parameter: Tissue Value: Whole Plant
  misc_feature: MA Experiment 20000308 PARAMETER Experiment Name: At_100mM_NaCl__P Parameter: Treatment Value: 100mM NaCl vs. No Treatment
  misc_feature: MA Experiment ID: 20000438 Result: Down-regulated in Transcription
  misc_feature: MA Experiment 20000438 PARAMETER Experiment Name: At_Shoots__P Parameter: Age (day) Value: 14
  misc_feature: MA Experiment 20000438 PARAMETER Experiment Name: At_Shoots__P Parameter: Tissue Value: Shoots vs. Whole Plant
  misc_feature: MA Experiment ID: 20000453 Result: Up-regulated in Transcription
  misc_feature: MA Experiment 20000453 PARAMETER Experiment Name: At_100uM_ABA_P Parameter: Age (day) Value: 15
  misc_feature: MA Experiment 20000453 PARAMETER Experiment Name: At_100uM_ABA_P Parameter: Organism Value: A. thaliana
  misc_feature: MA Experiment 20000453 PARAMETER Experiment Name: At_100uM_ABA_P Parameter: Plant Line Value: WS
  misc_feature: MA Experiment 20000453 PARAMETER Experiment Name: At_100uM_ABA_P Parameter: Timepoint (hr) Value: 24
  misc_feature: MA Experiment 20000453 PARAMETER Experiment Name: At_100uM_ABA_P Parameter: Tissue Value: Aerial
  misc_feature: MA Experiment 20000453 PARAMETER Experiment Name: At_100uM_ABA_P Parameter: Treatment Value: 100uM ABA vs. No Treatment
  misc_feature: MA Experiment ID: 20000527 Result: Down-regulated in Transcription
  misc_feature: MA Experiment 20000527 PARAMETER Experiment Name: At_10percent_PEG_P Parameter: Age (day) Value: 20
  misc_feature: MA Experiment 20000527 PARAMETER Experiment Name: At_10percent_PEG_P Parameter: Organism Value: A. thaliana
  misc_feature: MA Experiment 20000527 PARAMETER Experiment Name: At_10percent_PEG_P Parameter: Plant Line Value: WS
  misc_feature: MA Experiment 20000527 PARAMETER Experiment Name: At_10percent_PEG_P Parameter: Timepoint (day) Value: 20
  misc_feature: MA Experiment 20000527 PARAMETER Experiment Name: At_10percent_PEG_P Parameter: Tissue Value: Whole Plant
  misc_feature: MA Experiment 20000527 PARAMETER Experiment Name: At_10percent_PEG_P Parameter: Treatment Value: 10percent PEG vs. No Treatment
  misc_feature: MA Experiment ID: 20001904 Result: Up-regulated in Transcription
  misc_feature: MA Experiment 20001904 PARAMETER Experiment Name: At_Drought_Reproduction_P Parameter: Age (day) Value: 37
  misc_feature: MA Experiment 20001904 PARAMETER Experiment Name: At_Drought_Reproduction_P Parameter: Organism Value: A. thaliana
  misc_feature: MA Experiment 20001904 PARAMETER Experiment Name: At_Drought_Reproduction_P Parameter: Plant Line Value: WS
  misc_feature: MA Experiment 20001904 PARAMETER Experiment Name: At_Drought_Reproduction_P Parameter: Timepoint (day) Value: 7
  misc_feature: MA Experiment 20001904 PARAMETER Experiment Name: At_Drought_Reproduction_P Parameter: Tissue Value: Rosettes
  misc_feature: MA Experiment 20001904 PARAMETER Experiment Name: At_Drought_Reproduction_P Parameter: Treatment Value: Drought vs. No Drought
  misc_feature: MA Experiment ID: 20001905 Result: Up-regulated in Transcription
  misc_feature: MA Experiment 20001905 PARAMETER Experiment Name: At_Drought_Reproduction_P Parameter: Age (day) Value: 40
  misc_feature: MA Experiment 20001905 PARAMETER Experiment Name: At_Drought_Reproduction_P Parameter: Organism Value: A. thaliana
  misc_feature: MA Experiment 20001905 PARAMETER Experiment Name: At_Drought_Reproduction_P Parameter: Plant Line Value: WS
  misc_feature: MA Experiment 20001905 PARAMETER Experiment Name: At_Drought_Reproduction_P Parameter: Timepoint (day) Value: 10
  misc_feature: MA Experiment 20001905 PARAMETER Experiment Name: At_Drought_Reproduction_P Parameter: Tissue Value: Rosettes
  misc_feature: MA Experiment 20001905 PARAMETER Experiment Name: At_Drought_Reproduction_P Parameter: Treatment Value: Drought vs. No Drought
  misc_feature: MA Experiment ID: 20001910 Result: Up-regulated in Transcription
  misc_feature: MA Experiment 20001910 PARAMETER Experiment Name: At_Drought_Reproduction_P Parameter: Age (day) Value: 37
  misc_feature: MA Experiment 20001910 PARAMETER Experiment Name: At_Drought_Reproduction_P Parameter: Organism Value: A. thaliana
  misc_feature: MA Experiment 20001910 PARAMETER Experiment Name: At_Drought_Reproduction_P Parameter: Plant Line Value: WS
  misc_feature: MA Experiment 20001910 PARAMETER Experiment Name: At_Drought_Reproduction_P Parameter: Timepoint (day) Value: 7
  misc_feature: MA Experiment 20001910 PARAMETER Experiment Name: At_Drought_Reproduction_P Parameter: Tissue Value: Flowers
  misc_feature: MA Experiment 20001910 PARAMETER Experiment Name: At_Drought_Reproduction_P Parameter: Treatment Value: Drought vs. No Drought
  misc_feature: MA Experiment ID: 20001911 Result: Up-regulated in Transcription
  misc_feature: MA Experiment 20001911 PARAMETER Experiment Name: At_Drought_Reproduction_P Parameter: Age (day) Value: 40
  misc_feature: MA Experiment 20001911 PARAMETER Experiment Name: At_Drought_Reproduction_P Parameter: Organism Value: A. thaliana
  misc_feature: MA Experiment 20001911 PARAMETER Experiment Name: At_Drought_Reproduction_P Parameter: Plant Line Value: WS
  misc_feature: MA Experiment 20001911 PARAMETER Experiment Name: At_Drought_Reproduction_P Parameter: Timepoint (day) Value: 10
  misc_feature: MA Experiment 20001911 PARAMETER Experiment Name: At_Drought_Reproduction_P Parameter: Tissue Value: Flowers
  misc_feature: MA Experiment 20001911 PARAMETER Experiment Name: At_Drought_Reproduction_P Parameter: Treatment Value: Drought vs. No Drought

SEQ ID NO: 33845 - protein, 325 aa, Arabidopsis thaliana; identical to SEQ ID NO: 30255
  peptide (1)..(325): Ceres Seq. ID no. 13500102
  misc_feature (276)..(325): Homolog of NCBI NO: 30694556 NR Description: strictosidine synthase-related [Arabidopsis
  misc_feature (276)..(325): Homolog of NCBI NO: 11280567 NR Description: hypothetical protein F24I3.110 - Arabidopsis
  misc_feature (36)..(262): Homolog of NCBI NO: 30694556 NR Description: strictosidine synthase-related [Arabidopsis
  misc_feature (36)..(262): Homolog of NCBI NO: 11280567 NR Description: hypothetical protein F24I3.110 - Arabidopsis
  misc_feature (1)..(311): Homolog of NCBI NO: 1754987 NR Description: strictosidine synthase
  misc_feature (1)..(325): Homolog of NCBI NO: 30698979 NR Description: strictosidine synthase family [Arabidopsis
  misc_feature (1)..(325): Homolog of NCBI NO: 21431845 NR Description: Strictosidine synthase 3 precursor (SS-3)
  misc_feature (1)..(325): Homolog of NCBI NO: 1754983 NR Description: strictosidine synthase
  misc_feature (1)..(325): Homolog of NCBI NO: 15221106 NR Description: strictosidine synthase family [Arabidopsis
  misc_feature (1)..(325): Homolog of NCBI NO: 15221105 NR Description: strictosidine synthase family [Arabidopsis

SEQ ID NO: 33846 - DNA, 1628 bp, Arabidopsis thaliana; identical to SEQ ID NO: 30256
  misc_feature (1)..(1628): Ceres Seq. ID no. 12395605
  misc_feature: MA Experiment ID: 108573 Result: Up-regulated in Transcription
  misc_feature: MA Experiment 108573 PARAMETER Experiment Name: At_Drought_cDNA_P Parameter: Timepoint (hr) Value: 6
  misc_feature: MA Experiment 108573 PARAMETER Experiment Name: At_Drought_cDNA_P Parameter: Tissue Value: Aerial
  misc_feature: MA Experiment 108573 PARAMETER Experiment Name: At_Drought_cDNA_P Parameter: Treatment Value: Drought vs. No Drought
  misc_feature: MA Experiment ID: 20000087 Result: Down-regulated in Transcription
  misc_feature: MA Experiment 20000087 PARAMETER Experiment Name: At_100uM_ABA_Mutants_cDNA_P Parameter: Plant Line Value: WS
  misc_feature: MA Experiment 20000087 PARAMETER Experiment Name: At_100uM_ABA_Mutants_cDNA_P Parameter: Timepoint (hr) Value: 6
  misc_feature: MA Experiment 20000087 PARAMETER Experiment Name: At_100uM_ABA_Mutants_cDNA_P Parameter: Tissue Value: Aerial
  misc_feature: MA Experiment 20000087 PARAMETER Experiment Name: At_100uM_ABA_Mutants_cDNA_P Parameter: Treatment Value: 100uM ABA vs. No Treatment
  misc_feature: MA Experiment ID: 20000089 Result: Down-regulated in Transcription
  misc_feature: MA Experiment ID: 20000090 Result: Down-regulated in Transcription
  misc_feature: MA Experiment ID: 20000173 Result: Up-regulated in Transcription
  misc_feature: MA Experiment 20000173 PARAMETER Experiment Name: At_42deg_Heat_P Parameter: Age (day) Value: 14
  misc_feature: MA Experiment 20000173 PARAMETER Experiment Name: At_42deg_Heat_P Parameter: Organism Value: A. thaliana
  misc_feature: MA Experiment 20000173 PARAMETER Experiment Name: At_42deg_Heat_P Parameter: Plant Line Value: WS
  misc_feature: MA Experiment 20000173 PARAMETER Experiment Name: At_42deg_Heat_P Parameter: Temperature (deg C) Value: 42 vs. 22
  misc_feature: MA Experiment 20000173 PARAMETER Experiment Name: At_42deg_Heat_P Parameter: Timepoint (hr) Value: 6
  misc_feature: MA Experiment 20000173 PARAMETER Experiment Name: At_42deg_Heat_P Parameter: Tissue Value: Aerial
  misc_feature: MA Experiment ID: 20000224 Result: Down-regulated in Transcription

SEQ ID NO: 33847 - protein, 458 aa, Arabidopsis thaliana; identical to SEQ ID NO: 30257
  peptide (1)..(458): Ceres Seq. ID no. 12395606
  misc_feature (180)..(251): Pfam Name: RNA recognition motif. (a.k.a. RRM, RBD, or RNP domain) Pfam Description: RNA recognition motif. (a.k.a. RRM, RBD, or RNP
  misc_feature (39)..(457): Homolog of NCBI NO: 6996560 NR Description: oligouridylate binding protein [Nicotiana
  misc_feature (39)..(458): Homolog of NCBI NO: 30695647 NR Description: oligouridylate binding protein (UBP1), putative
  misc_feature (39)..(458): Homolog of NCBI NO: 15221031 NR Description: oligouridylate binding protein (UBP1), putative
  misc_feature (35)..(458): Homolog of NCBI NO: 15231783 NR Description: oligouridylate binding protein (UBP1), putative
  misc_feature (35)..(458): Homolog of NCBI NO: 21593280 NR Description: oligouridylate binding protein, putative
  misc_feature (40)..(75): Homolog of NCBI NO: 25402821 NR Description: protein F1L3.2 [imported] - Arabidopsis thaliana
  misc_feature (367)..(458): Homolog of NCBI NO: 25402821 NR Description: protein F1L3.2 [imported] - Arabidopsis thaliana
  misc_feature (240)..(368): Homolog of NCBI NO: 25402821 NR Description: protein F1L3.2 [imported] - Arabidopsis thaliana
  misc_feature (74)..(242): Homolog of NCBI NO: 25402821 NR Description: protein F1L3.2 [imported] - Arabidopsis thaliana
  misc_feature (40)..(458): Homolog of NCBI NO: 18394471 NR Description: oligouridylate binding protein (UBP1), putative

SEQ ID NO: 33848 - protein, 419 aa, Arabidopsis thaliana; identical to SEQ ID NO: 30258
  peptide (1)..(419): Ceres Seq. ID no. 12395607
  misc_feature (141)..(212): Pfam Name: RNA recognition motif. (a.k.a. RRM, RBD, or RNP domain) Pfam Description: RNA recognition motif. (a.k.a. RRM, RBD, or RNP
  misc_feature (1)..(418): Homolog of NCBI NO: 6996560 NR Description: oligouridylate binding protein [Nicotiana
  misc_feature (1)..(419): Homolog of NCBI NO: 30695647 NR Description: oligouridylate binding protein (UBP1), putative
  misc_feature (1)..(419): Homolog of NCBI NO: 15221031 NR Description: oligouridylate binding protein (UBP1), putative
  misc_feature (1)..(419): Homolog of NCBI NO: 15231783 NR Description: oligouridylate binding protein (UBP1), putative
  misc_feature (1)..(419): Homolog of NCBI NO: 21593280 NR Description: oligouridylate binding protein, putative
  misc_feature (1)..(36): Homolog of NCBI NO: 25402821 NR Description: protein F1L3.2 [imported] - Arabidopsis thaliana
  misc_feature (328)..(419): Homolog of NCBI NO: 25402821 NR Description: protein F1L3.2 [imported] - Arabidopsis thaliana
  misc_feature (201)..(329): Homolog of NCBI NO: 25402821 NR Description: protein F1L3.2 [imported] - Arabidopsis thaliana
  misc_feature (35)..(203): Homolog of NCBI NO: 25402821 NR Description: protein F1L3.2 [imported] - Arabidopsis thaliana
  misc_feature (1)..(419): Homolog of NCBI NO: 18394471 NR Description: oligouridylate binding protein (UBP1), putative

SEQ ID NO: 33849 - protein, 406 aa, Arabidopsis thaliana; identical to SEQ ID NO: 30259
  peptide (1)..(406): Ceres Seq. ID no. 12395608
  misc_feature (128)..(199): Pfam Name: RNA recognition motif. (a.k.a. RRM, RBD, or RNP domain) Pfam Description: RNA recognition motif. (a.k.a. RRM, RBD, or RNP
  misc_feature (1)..(405): Homolog of NCBI NO: 6996560 NR Description: oligouridylate binding protein [Nicotiana
  misc_feature (1)..(406): Homolog of NCBI NO: 30695647 NR Description: oligouridylate binding protein (UBP1), putative
  misc_feature (1)..(406): Homolog of NCBI NO: 15221031 NR Description: oligouridylate binding protein (UBP1), putative
  misc_feature (1)..(406): Homolog of NCBI NO: 15231783 NR Description: oligouridylate binding protein (UBP1), putative
  misc_feature (1)..(406): Homolog of NCBI NO: 21593280 NR Description: oligouridylate binding protein, putative
  misc_feature (1)..(23): Homolog of NCBI NO: 25402821 NR Description: protein F1L3.2 [imported] - Arabidopsis thaliana
  misc_feature (315)..(406): Homolog of NCBI NO: 25402821 NR Description: protein F1L3.2 [imported] - Arabidopsis thaliana
  misc_feature (188)..(316): Homolog of NCBI NO: 25402821 NR Description: protein F1L3.2 [imported] - Arabidopsis thaliana
  misc_feature (22)..(190): Homolog of NCBI NO: 25402821 NR Description: protein F1L3.2 [imported] - Arabidopsis thaliana
  misc_feature (1)..(406): Homolog of NCBI NO: 18394471 NR Description: oligouridylate binding protein (UBP1), putative

SEQ ID NO: 33850 - DNA, 1823 bp, Arabidopsis thaliana; identical to SEQ ID NO: 30260
  misc_feature (1)..(1823): Ceres Seq. ID no. 12337378
  misc_feature: MA Experiment ID: 108461 Result: Down-regulated in Transcription
  misc_feature: MA Experiment 108461 PARAMETER Experiment Name: At_Germinating_Seeds_cDNA_P Parameter: Age (day) Value: 1 vs. 0
  misc_feature: MA Experiment 108461 PARAMETER Experiment Name: At_Germinating_Seeds_cDNA_P Parameter: Tissue Value: Germinating Seeds
  misc_feature: MA Experiment ID: 108464 Result: Down-regulated in Transcription
  misc_feature: MA Experiment 108464 PARAMETER Experiment Name: At_Germinating_Seeds_cDNA_P Parameter: Age (day) Value: 4 vs. 0
  misc_feature: MA Experiment 108464 PARAMETER Experiment Name: At_Germinating_Seeds_cDNA_P Parameter: Tissue Value: Germinating Seeds
  misc_feature: MA Experiment ID: 20000180 Result: Down-regulated in Transcription
  misc_feature: MA Experiment 20000180 PARAMETER Experiment Name: At_Germinating_Seeds_P Parameter: Age (hr) Value: 24 vs. 0
  misc_feature: MA Experiment 20000180 PARAMETER Experiment Name: At_Germinating_Seeds_P Parameter: Tissue Value: Germinating Seeds

SEQ ID NO: 33851 - protein, 423 aa, Arabidopsis thaliana; identical to SEQ ID NO: 30261
  peptide (1)..(423): Ceres Seq. ID no. 12337379
  misc_feature (210)..(272): Pfam Name: bZIP transcription factor Pfam Description: bZIP transcription factor
  misc_feature (143)..(381): Homolog of NCBI NO: 34394739 NR Description: putative transcription activator RF2a
  misc_feature (157)..(381): Homolog of NCBI NO: 39579226 NR Description: bZIP transcription factor RF2b
  misc_feature (155)..(379): Homolog of NCBI NO: 2921823 NR Description: shoot-forming PKSF1 [Paulownia kawakamii]
  misc_feature (162)..(388): Homolog of NCBI NO: 21740783 NR Description: OSJNBa0067K08.24 [Oryza sativa (japonica
  misc_feature (5)..(368): Homolog of NCBI NO: 21740783 NR Description: OSJNBa0067K08.24 [Oryza sativa (japonica
  misc_feature (90)..(397): Homolog of NCBI NO: 7489564 NR Description: probable transcription activator RF2a - rice
  misc_feature (1)..(260): Homolog of NCBI NO: 30684938 NR Description: bZIP transcription factor (POSF21) [Arabidopsis
  misc_feature (1)..(410): Homolog of NCBI NO: 15224665 NR Description: bZIP transcription factor (POSF21)
  misc_feature (1)..(423): Homolog of NCBI NO: 15221391 NR Description: bZIP protein; protein id: At1g06070.1, supported
  misc_feature (1)..(423): Homolog of NCBI NO: 21553831 NR Description: transcriptional activator RF2a, putative

SEQ ID NO: 33852 - protein, 390 aa, Arabidopsis thaliana; identical to SEQ ID NO: 30262
  peptide (1)..(390): Ceres Seq. ID no. 12337380
  misc_feature (177)..(239): Pfam Name: bZIP transcription factor Pfam Description: bZIP transcription factor
  misc_feature (110)..(348): Homolog of NCBI NO: 34394739 NR Description: putative transcription activator RF2a
  misc_feature (124)..(348): Homolog of NCBI NO: 39579226 NR Description: bZIP transcription factor RF2b
  misc_feature (122)..(346): Homolog of NCBI NO: 2921823 NR Description: shoot-forming PKSF1 [Paulownia kawakamii]
  misc_feature (129)..(355): Homolog of NCBI NO: 21740783 NR Description: OSJNBa0067K08.24 [Oryza sativa (japonica
  misc_feature (1)..(335): Homolog of NCBI NO: 21740783 NR Description: OSJNBa0067K08.24 [Oryza sativa (japonica
  misc_feature (57)..(364): Homolog of NCBI NO: 7489564 NR Description: probable transcription activator RF2a - rice
  misc_feature (1)..(227): Homolog of NCBI NO: 30684938 NR Description: bZIP transcription factor (POSF21) [Arabidopsis
  misc_feature (1)..(377): Homolog of NCBI NO: 15224665 NR Description: bZIP transcription factor (POSF21)
  misc_feature (1)..(390): Homolog of NCBI NO: 15221391 NR Description: bZIP protein; protein id: At1g06070.1, supported
  misc_feature (1)..(390): Homolog of NCBI NO: 21553831 NR Description: transcriptional activator RF2a, putative

SEQ ID NO: 33853 - protein, 361 aa, Arabidopsis thaliana; identical to SEQ ID NO: 30263
  peptide (1)..(361): Ceres Seq. ID no. 12337381
  misc_feature (148)..(210): Pfam Name: bZIP transcription factor Pfam Description: bZIP transcription factor
  misc_feature (81)..(319): Homolog of NCBI NO: 34394739 NR Description: putative transcription activator RF2a
  misc_feature (95)..(319): Homolog of NCBI NO: 39579226 NR Description: bZIP transcription factor RF2b
  misc_feature (93)..(317): Homolog of NCBI NO: 2921823 NR Description: shoot-forming PKSF1 [Paulownia kawakamii]
  misc_feature (100)..(326): Homolog of NCBI NO: 21740783 NR Description: OSJNBa0067K08.24 [Oryza sativa (japonica
  misc_feature (1)..(306): Homolog of NCBI NO: 21740783 NR Description: OSJNBa0067K08.24 [Oryza sativa (japonica
  misc_feature (28)..(335): Homolog of NCBI NO: 7489564 NR Description: probable transcription activator RF2a - rice
  misc_feature (1)..(198): Homolog of NCBI NO: 30684938 NR Description: bZIP transcription factor (POSF21) [Arabidopsis
  misc_feature (1)..(348): Homolog of NCBI NO: 15224665 NR Description: bZIP transcription factor (POSF21)
  misc_feature (1)..(361): Homolog of NCBI NO: 15221391 NR Description: bZIP protein; protein id: At1g06070.1, supported
  misc_feature (1)..(361): Homolog of NCBI NO: 21553831 NR Description: transcriptional activator RF2a, putative

SEQ ID NO: 33854 - DNA, 1663 bp, Arabidopsis thaliana; identical to SEQ ID NO: 30264
  misc_feature (1)..(1663): Ceres Seq. ID no. 13591657
  misc_feature: MA Experiment ID: 108579 Result: Down-regulated in Transcription
  misc_feature: MA Experiment 108579 PARAMETER Experiment Name: At_4deg_Cold_cDNA_P Parameter: Temperature (deg C) Value: 4 vs. 22
  misc_feature: MA Experiment 108579 PARAMETER Experiment Name: At_4deg_Cold_cDNA_P Parameter: Timepoint (hr) Value: 6
  misc_feature: MA Experiment 108579 PARAMETER Experiment Name: At_4deg_Cold_cDNA_P Parameter: Tissue Value: Aerial

SEQ ID NO: 33855 - protein, 476 aa, Arabidopsis thaliana; identical to SEQ ID NO: 30265
  peptide (1)..(476): Ceres Seq. ID no. 13591658
  misc_feature (69)..(476): Pfam Name: Aminotransferase class-III Pfam Description: Aminotransferase class-III
  misc_feature (69)..(476): Pfam Name: Aminotransferase class-III Pfam Description: Aminotransferase class-III
  misc_feature (69)..(476): Pfam Name: Aminotransferase class-III Pfam Description: Aminotransferase class-III
  misc_feature (132)..(466): Homolog of NCBI NO: 7434175 NR Description: hypothetical protein T19P19.50 - Arabidopsis
  misc_feature (1)..(229): Homolog of NCBI NO: 28574759 NR Description: CG11241-PA [Drosophila melanogaster]
  misc_feature (1)..(229): Homolog of NCBI NO: 16198011 NR Description: LD24726p [Drosophila melanogaster]
  misc_feature (232)..(474): Homolog of NCBI NO: 28574759 NR Description: CG11241-PA [Drosophila melanogaster]
  misc_feature (232)..(474): Homolog of NCBI NO: 16198011 NR Description: LD24726p [Drosophila melanogaster]
  misc_feature (132)..(466): Homolog of NCBI NO: 7434175 NR Description: hypothetical protein T19P19.50 - Arabidopsis
  misc_feature (1)..(229): Homolog of NCBI NO: 16198011 NR Description: LD24726p [Drosophila melanogaster]
  misc_feature (232)..(474): Homolog of NCBI NO: 16198011 NR Description: LD24726p [Drosophila melanogaster]
  misc_feature (232)..(474): Homolog of NCBI NO: 28574759 NR Description: CG11241-PA [Drosophila melanogaster]
  misc_feature (1)..(229): Homolog of NCBI NO: 16198011 NR Description: LD24726p [Drosophila melanogaster]
  misc_feature (1)..(229): Homolog of NCBI NO: 28574759 NR Description: CG11241-PA [Drosophila melanogaster]
  misc_feature (132)..(466): Homolog of NCBI NO: 7434175 NR Description: hypothetical protein T19P19.50 - Arabidopsis
  misc_feature (1)..(476): Homolog of NCBI NO: 5731259 NR Description: alanine:glyoxylate aminotransferase 2 homolog
  misc_feature (1)..(476): Homolog of NCBI NO: 18420498 NR Description: alanine--glyoxylate aminotransferase
  misc_feature (3)..(476): Homolog of NCBI NO: 15224499 NR Description: alanine--glyoxylate aminotransferase
  misc_feature (3)..(476): Homolog of NCBI NO: 15028237 NR Description: putative beta-alanine-pyruvate aminotransferase
  misc_feature (39)..(476): Homolog of NCBI NO: 15231974 NR Description: alanine--glyoxylate aminotransferase
  misc_feature (1)..(476): Homolog of NCBI NO: 5731259 NR Description: alanine:glyoxylate aminotransferase 2 homolog
  misc_feature (1)..(476): Homolog of NCBI NO: 18420498 NR Description: alanine--glyoxylate aminotransferase
  misc_feature (3)..(476): Homolog of NCBI NO: 15224499 NR Description: alanine--glyoxylate aminotransferase
  misc_feature (3)..(476): Homolog of NCBI NO: 15028237 NR Description: putative beta-alanine-pyruvate aminotransferase
  misc_feature (39)..(476): Homolog of NCBI NO: 15231974 NR Description: alanine--glyoxylate aminotransferase
  misc_feature (232)..(474): Homolog of NCBI NO: 16198011 NR Description: LD24726p [Drosophila melanogaster]
  misc_feature (232)..(474): Homolog of NCBI NO: 28574759 NR Description: CG11241-PA [Drosophila melanogaster]
  misc_feature (1)..(229): Homolog of NCBI NO: 28574759 NR Description: CG11241-PA [Drosophila melanogaster]
  misc_feature (39)..(476): Homolog of NCBI NO: 15231974 NR Description: alanine--glyoxylate aminotransferase
  misc_feature (3)..(476): Homolog of NCBI NO: 15028237 NR Description: putative beta-alanine-pyruvate aminotransferase
  misc_feature (3)..(476): Homolog of NCBI NO: 15224499 NR Description: alanine--glyoxylate aminotransferase
  misc_feature (1)..(476): Homolog of NCBI NO: 18420498 NR Description: alanine--glyoxylate aminotransferase
  misc_feature (1)..(476): Homolog of NCBI NO: 5731259 NR Description: alanine:glyoxylate aminotransferase 2 homolog

SEQ ID NO: 33856 - protein, 391 aa, Arabidopsis thaliana; identical to SEQ ID NO: 30266
  peptide (1)..(391): Ceres Seq. ID no. 13591659
  misc_feature (1)..(391): Pfam Name: Aminotransferase class-III Pfam Description: Aminotransferase class-III
  misc_feature (1)..(391): Pfam Name: Aminotransferase class-III Pfam Description: Aminotransferase class-III
  misc_feature (1)..(391): Pfam Name: Aminotransferase class-III Pfam Description: Aminotransferase class-III
  misc_feature (47)..(381): Homolog of NCBI NO: 7434175 NR Description: hypothetical protein T19P19.50 - Arabidopsis
  misc_feature (1)..(144): Homolog of NCBI NO: 28574759 NR Description: CG11241-PA [Drosophila melanogaster]
  misc_feature (1)..(144): Homolog of NCBI NO: 16198011 NR Description: LD24726p [Drosophila melanogaster]
  misc_feature (147)..(389): Homolog of NCBI NO: 28574759 NR Description: CG11241-PA [Drosophila melanogaster]
  misc_feature (147)..(389): Homolog of NCBI NO: 16198011 NR Description: LD24726p [Drosophila melanogaster]
  misc_feature (47)..(381): Homolog of NCBI NO: 7434175 NR Description: hypothetical protein T19P19.50 - Arabidopsis
  misc_feature (1)..(144): Homolog of NCBI NO: 16198011 NR Description: LD24726p [Drosophila melanogaster]
  misc_feature (147)..(389): Homolog of NCBI NO: 16198011 NR Description: LD24726p [Drosophila melanogaster]
  misc_feature (147)..(389): Homolog of NCBI NO: 28574759 NR Description: CG11241-PA [Drosophila melanogaster]
  misc_feature (1)..(144): Homolog of NCBI NO: 16198011 NR Description: LD24726p [Drosophila melanogaster]
  misc_feature (1)..(144): Homolog of NCBI NO: 28574759 NR Description: CG11241-PA [Drosophila melanogaster]
  misc_feature (47)..(381): Homolog of NCBI NO: 7434175 NR Description: hypothetical protein T19P19.50 - Arabidopsis
  misc_feature (1)..(391): Homolog of NCBI NO: 5731259 NR Description: alanine:glyoxylate aminotransferase 2 homolog
  misc_feature (1)..(391): Homolog of NCBI NO: 18420498 NR Description: alanine--glyoxylate aminotransferase
  misc_feature (1)..(391): Homolog of NCBI NO: 15224499 NR Description: alanine--glyoxylate aminotransferase
  misc_feature (1)..(391): Homolog of NCBI NO: 15028237 NR Description: putative beta-alanine-pyruvate aminotransferase
  misc_feature (1)..(391): Homolog of NCBI NO: 15231974 NR Description: alanine--glyoxylate aminotransferase
  misc_feature (1)..(391): Homolog of NCBI NO: 5731259 NR Description: alanine:glyoxylate aminotransferase 2 homolog
  misc_feature (1)..(391): Homolog of NCBI NO: 18420498 NR Description: alanine--glyoxylate aminotransferase
  misc_feature (1)..(391): Homolog of NCBI NO: 15224499 NR Description: alanine--glyoxylate aminotransferase
  misc_feature (1)..(391): Homolog of NCBI NO: 15028237 NR Description: putative beta-alanine-pyruvate aminotransferase
  misc_feature (1)..(391): Homolog of NCBI NO: 15231974 NR Description: alanine--glyoxylate aminotransferase
  misc_feature (147)..(389): Homolog of NCBI NO: 16198011 NR Description: LD24726p [Drosophila melanogaster]
  misc_feature (147)..(389): Homolog of NCBI NO: 28574759 NR Description: CG11241-PA [Drosophila melanogaster]
  misc_feature (1)..(144): Homolog of NCBI NO: 28574759 NR Description: CG11241-PA [Drosophila melanogaster]
  misc_feature (1)..(391): Homolog of NCBI NO: 15231974 NR Description: alanine--glyoxylate aminotransferase
  misc_feature (1)..(391): Homolog of NCBI NO: 15028237 NR Description: putative beta-alanine-pyruvate aminotransferase
  misc_feature (1)..(391): Homolog of NCBI NO: 15224499 NR Description: alanine--glyoxylate aminotransferase
  misc_feature (1)..(391): Homolog of NCBI NO: 18420498 NR Description: alanine--glyoxylate aminotransferase
  misc_feature (1)..(391): Homolog of NCBI NO: 5731259 NR Description: alanine:glyoxylate aminotransferase 2 homolog

SEQ ID NO: 33857 - protein, 327 aa, Arabidopsis thaliana; identical to SEQ ID NO: 30267
  peptide (1)..(327): Ceres Seq. ID no. 13591660
  misc_feature (1)..(327): Pfam Name: Aminotransferase class-III Pfam Description: Aminotransferase class-III
  misc_feature (1)..(327): Pfam Name: Aminotransferase class-III Pfam Description: Aminotransferase class-III
  misc_feature (1)..(327): Pfam Name: Aminotransferase class-III Pfam Description: Aminotransferase class-III
  misc_feature (1)..(317): Homolog of NCBI NO: 7434175 NR Description: hypothetical protein T19P19.50 - Arabidopsis
  misc_feature (1)..(80): Homolog of NCBI NO: 28574759 NR Description: CG11241-PA [Drosophila melanogaster]
  misc_feature (1)..(80): Homolog of NCBI NO: 16198011 NR Description: LD24726p [Drosophila melanogaster]
  misc_feature (83)..(325): Homolog of NCBI NO: 28574759 NR Description: CG11241-PA [Drosophila melanogaster]
  misc_feature (83)..(325): Homolog of NCBI NO: 16198011 NR Description: LD24726p [Drosophila melanogaster]
  misc_feature (1)..(317): Homolog of NCBI NO: 7434175 NR Description: hypothetical protein T19P19.50 - Arabidopsis
  misc_feature (1)..(80): Homolog of NCBI NO: 16198011 NR Description: LD24726p [Drosophila melanogaster]
  misc_feature (83)..(325): Homolog of NCBI NO: 16198011 NR Description: LD24726p [Drosophila melanogaster]
  misc_feature (83)..(325): Homolog of NCBI NO: 28574759 NR Description: CG11241-PA [Drosophila melanogaster]
  misc_feature (1)..(80): Homolog of NCBI NO: 16198011 NR Description: LD24726p [Drosophila melanogaster]
  misc_feature (1)..(80): Homolog of NCBI NO: 28574759 NR Description: CG11241-PA [Drosophila melanogaster]
  misc_feature (1)..(317): Homolog of NCBI NO: 7434175 NR Description: hypothetical protein T19P19.50 - Arabidopsis
  misc_feature (1)..(327): Homolog of NCBI NO: 5731259 NR Description: alanine:glyoxylate aminotransferase 2 homolog
  misc_feature (1)..(327): Homolog of NCBI NO: 18420498 NR Description: alanine--glyoxylate aminotransferase
  misc_feature (1)..(327): Homolog of NCBI NO: 15224499 NR Description: alanine--glyoxylate aminotransferase
  misc_feature (1)..(327): Homolog of NCBI NO: 15028237 NR Description: putative beta-alanine-pyruvate aminotransferase
  misc_feature (1)..(327): Homolog of NCBI NO: 15231974 NR Description: alanine--glyoxylate aminotransferase
  misc_feature (1)..(327): Homolog of NCBI NO: 5731259 NR Description: alanine:glyoxylate aminotransferase 2 homolog
  misc_feature (1)..(327): Homolog of NCBI NO: 18420498 NR Description: alanine--glyoxylate aminotransferase
  misc_feature (1)..(327): Homolog of NCBI NO: 15224499 NR Description: alanine--glyoxylate aminotransferase
  misc_feature (1)..(327): Homolog of NCBI NO: 15028237 NR Description: putative beta-alanine-pyruvate aminotransferase
  misc_feature (1)..(327): Homolog of NCBI NO: 15231974 NR Description: alanine--glyoxylate aminotransferase
  misc_feature (83)..(325): Homolog of NCBI NO: 16198011 NR Description: LD24726p [Drosophila melanogaster]
  misc_feature (83)..(325): Homolog of NCBI NO: 28574759 NR Description: CG11241-PA [Drosophila melanogaster]
  misc_feature (1)..(80): Homolog of NCBI NO: 28574759 NR Description: CG11241-PA [Drosophila melanogaster]
  misc_feature (1)..(327): Homolog of NCBI NO: 15231974 NR Description: alanine--glyoxylate aminotransferase
  misc_feature (1)..(327): Homolog of NCBI NO: 15028237 NR Description: putative beta-alanine-pyruvate aminotransferase
  misc_feature (1)..(327): Homolog of NCBI NO: 15224499 NR Description: alanine--glyoxylate aminotransferase
  misc_feature (1)..(327): Homolog of NCBI NO: 18420498 NR Description: alanine--glyoxylate aminotransferase
  misc_feature (1)..(327): Homolog of NCBI NO: 5731259 NR Description: alanine:glyoxylate aminotransferase 2 homolog

SEQ ID NO: 33858 - DNA, 1476 bp, Arabidopsis thaliana; identical to SEQ ID NO: 30268
  misc_feature (1)..(1476): Ceres Seq. ID no. 12422615
  misc_feature: MA Experiment ID: 108434 Result: Down-regulated in Transcription
  misc_feature: MA Experiment 108434 PARAMETER Experiment Name: At_Root_Tips_cDNA_P Parameter: Tissue Value: Root Tips
  misc_feature: MA Experiment ID: 108572 Result: Up-regulated in Transcription
  misc_feature: MA Experiment 108572 PARAMETER Experiment Name: At_Drought_cDNA_P Parameter: Timepoint (hr) Value: 1
  misc_feature: MA Experiment 108572 PARAMETER Experiment Name: At_Drought_cDNA_P Parameter: Tissue Value: Aerial
  misc_feature: MA Experiment 108572 PARAMETER Experiment Name: At_Drought_cDNA_P Parameter: Treatment Value: Drought vs. No Drought
  misc_feature: MA Experiment ID: 108573 Result: Up-regulated in Transcription
  misc_feature: MA Experiment 108573 PARAMETER Experiment Name: At_Drought_cDNA_P Parameter: Timepoint (hr) Value: 6
  misc_feature: MA Experiment 108573 PARAMETER Experiment Name: At_Drought_cDNA_P Parameter: Tissue Value: Aerial
  misc_feature: MA Experiment 108573 PARAMETER Experiment Name: At_Drought_cDNA_P Parameter: Treatment Value: Drought vs. No Drought
  misc_feature: MA Experiment ID: 108574 Result: Up-regulated in Transcription
  misc_feature: MA Experiment 108574 PARAMETER Experiment Name: At_Wounding__cDNA_P Parameter: Timepoint (hr) Value: 1
  misc_feature: MA Experiment 108574 PARAMETER Experiment Name: At_Wounding__cDNA_P Parameter: Tissue Value: Aerial
  misc_feature: MA Experiment 108574 PARAMETER Experiment Name: At_Wounding__cDNA_P Parameter: Treatment Value: Wounding vs. No Wounding
  misc_feature: MA Experiment ID: 108595 Result: Up-regulated in Transcription
  misc_feature: MA Experiment 108595 PARAMETER Experiment Name: At_Ler-pi_Ovule_cDNA_P Parameter: Plant Line Value: null
  misc_feature: MA Experiment ID: 108605 Result: Up-regulated in Transcription
  misc_feature: MA Experiment 108605 PARAMETER Experiment Name: At_100uM_ABA_cDNA_P Parameter: Timepoint (hr) Value: 6
  misc_feature: MA Experiment 108605 PARAMETER Experiment Name: At_100uM_ABA_cDNA_P Parameter: Tissue Value: Aerial
  misc_feature: MA Experiment 108605 PARAMETER Experiment Name: At_100uM_ABA_cDNA_P Parameter: Treatment Value: 100uM ABA vs. No Treatment
  misc_feature: MA Experiment ID: 108607 Result: Up-regulated in Transcription
  misc_feature: MA Experiment 108607 PARAMETER Experiment Name: At_100uM_ABA_cDNA_P Parameter: Timepoint (hr) Value: 4
  misc_feature: MA Experiment 108607 PARAMETER Experiment Name: At_100uM_ABA_cDNA_P Parameter: Tissue Value: Aerial
  misc_feature: MA Experiment 108607 PARAMETER Experiment Name: At_100uM_ABA_cDNA_P Parameter: Treatment Value: 100uM ABA vs. No Treatment
  misc_feature: MA Experiment ID: 20000111 Result: Down-regulated in Transcription
  misc_feature: MA Experiment 20000111 PARAMETER Experiment Name: At_42deg_Heat_cDNA_P Parameter: Temperature (deg C) Value: 42 vs. 22
  misc_feature: MA Experiment 20000111 PARAMETER Experiment Name: At_42deg_Heat_cDNA_P Parameter: Timepoint (hr) Value: 6
  misc_feature: MA Experiment 20000111 PARAMETER Experiment Name: At_42deg_Heat_cDNA_P Parameter: Tissue Value: Aerial
  misc_feature: MA Experiment ID: 20000112 Result: Down-regulated in Transcription
  misc_feature: MA Experiment 20000112 PARAMETER Experiment Name: At_42deg_Heat_cDNA_P Parameter: Temperature (deg C) Value: 42 vs. 22
  misc_feature: MA Experiment 20000112 PARAMETER Experiment Name: At_42deg_Heat_cDNA_P Parameter: Timepoint (hr) Value: 2
  misc_feature: MA Experiment 20000112 PARAMETER Experiment Name: At_42deg_Heat_cDNA_P Parameter: Tissue Value: Aerial
  misc_feature: MA Experiment ID: 20000113 Result: Down-regulated in Transcription
  misc_feature: MA Experiment 20000113 PARAMETER Experiment Name: At_42deg_Heat_cDNA_P Parameter: Temperature (deg C) Value: 42 vs. 22
  misc_feature: MA Experiment 20000113 PARAMETER Experiment Name: At_42deg_Heat_cDNA_P Parameter: Timepoint (hr) Value: 8
  misc_feature: MA Experiment 20000113 PARAMETER Experiment Name: At_42deg_Heat_cDNA_P Parameter: Tissue Value: Aerial
  misc_feature: MA Experiment ID: 20000144 Result: Down-regulated in Transcription
  misc_feature: MA Experiment 20000144 PARAMETER Experiment Name: At_42deg_Heat_cDNA_P Parameter: Temperature (deg C) Value: 42 vs. 22
  misc_feature: MA Experiment 20000144 PARAMETER Experiment Name: At_42deg_Heat_cDNA_P Parameter: Timepoint (hr) Value: 1
  misc_feature: MA Experiment 20000144 PARAMETER Experiment Name: At_42deg_Heat_cDNA_P Parameter: Tissue Value: Aerial
  misc_feature: MA Experiment ID: 20000169 Result: Up-regulated in Transcription
  misc_feature: MA Experiment 20000169 PARAMETER Experiment Name: At_100uM_ABA_P Parameter: Age (day) Value: 14
  misc_feature: MA Experiment 20000169 PARAMETER Experiment Name: At_100uM_ABA_P Parameter: Organism Value: A. thaliana
  misc_feature: MA Experiment 20000169 PARAMETER Experiment Name: At_100uM_ABA_P Parameter: Plant Line Value: WS
  misc_feature: MA Experiment 20000169 PARAMETER Experiment Name: At_100uM_ABA_P Parameter: Timepoint (hr) Value: 6
  misc_feature: MA Experiment 20000169 PARAMETER Experiment Name: At_100uM_ABA_P Parameter: Tissue Value: Aerial
  misc_feature: MA Experiment 20000169 PARAMETER Experiment Name: At_100uM_ABA_P Parameter: Treatment Value: 100uM ABA vs. No Treatment
  misc_feature: MA Experiment ID: 20000171 Result: Down-regulated in Transcription
  misc_feature: MA Experiment 20000171 PARAMETER Experiment Name: At_42deg_Heat_P Parameter: Age (day) Value: 14
  misc_feature: MA Experiment 20000171 PARAMETER Experiment Name: At_42deg_Heat_P Parameter: Organism Value: A. thaliana
  misc_feature: MA Experiment 20000171 PARAMETER Experiment Name: At_42deg_Heat_P Parameter: Plant Line Value: WS
  misc_feature: MA Experiment 20000171 PARAMETER Experiment Name: At_42deg_Heat_P Parameter: Temperature (deg C) Value: 42 vs. 22
  misc_feature: MA Experiment 20000171 PARAMETER Experiment Name: At_42deg_Heat_P Parameter: Timepoint (hr) Value: 1
  misc_feature: MA Experiment 20000171 PARAMETER Experiment Name: At_42deg_Heat_P Parameter: Tissue Value: Aerial
  misc_feature: MA Experiment ID: 20000180 Result: Down-regulated in Transcription
  misc_feature: MA Experiment 20000180 PARAMETER Experiment Name: At_Germinating_Seeds_P Parameter: Age (hr) Value: 24 vs. 0
  misc_feature: MA Experiment 20000180 PARAMETER Experiment Name: At_Germinating_Seeds_P Parameter: Tissue Value: Germinating Seeds
  misc_feature: MA Experiment ID: 20000184 Result: Down-regulated in Transcription
  misc_feature: MA Experiment 20000184 PARAMETER Experiment Name: At_Shoots__P Parameter: Age (day) Value: 7
  misc_feature: MA Experiment 20000184 PARAMETER Experiment Name: At_Shoots__P Parameter: Tissue Value: Shoots vs. Whole Plant
  misc_feature: MA Experiment ID: 20000185 Result: Down-regulated in Transcription
  misc_feature: MA Experiment 20000185 PARAMETER Experiment Name: At_Roots__P Parameter: Age (day) Value: 7 vs. 21
  misc_feature: MA Experiment 20000185 PARAMETER Experiment Name: At_Roots__P Parameter: Organism Value: A. thaliana
  misc_feature: MA Experiment 20000185 PARAMETER Experiment Name: At_Roots__P Parameter: Tissue Value: Roots vs. Whole Plant
  misc_feature: MA Experiment ID: 20000211 Result: Up-regulated in Transcription
  misc_feature: MA Experiment 20000211 PARAMETER Experiment Name: At_0.001percent_MeJA__P Parameter: Age (day) Value: 14
  misc_feature: MA Experiment 20000211 PARAMETER Experiment Name: At_0.001percent_MeJA__P Parameter: Organism Value: A. thaliana
  misc_feature: MA Experiment 20000211 PARAMETER Experiment Name: At_0.001percent_MeJA__P Parameter: Plant Line Value: WS
  misc_feature: MA Experiment 20000211 PARAMETER Experiment Name: At_0.001percent_MeJA__P Parameter: Timepoint (hr) Value: 1
  misc_feature: MA Experiment 20000211 PARAMETER Experiment Name: At_0.001percent_MeJA__P Parameter: Tissue Value: Aerial
  misc_feature: MA Experiment 20000211 PARAMETER Experiment Name: At_0.001percent_MeJA__P Parameter: Treatment Value: 0.001percent MeJA vs. No Treatment
  misc_feature: MA Experiment ID: 20000267 Result: Up-regulated in Transcription
  misc_feature: MA Experiment 20000267 PARAMETER Experiment Name: At_Drought_P Parameter: Age (day) Value: 7
  misc_feature: MA Experiment 20000267 PARAMETER Experiment Name: At_Drought_P Parameter: Organism Value: A. thaliana
  misc_feature: MA Experiment 20000267 PARAMETER Experiment Name: At_Drought_P Parameter: Plant Line Value: WS
  misc_feature: MA Experiment 20000267 PARAMETER Experiment Name: At_Drought_P Parameter: Timepoint (hr) Value: 6
  misc_feature: MA Experiment 20000267 PARAMETER Experiment Name: At_Drought_P Parameter: Tissue Value: Whole Plant
  misc_feature: MA Experiment 20000267 PARAMETER Experiment Name: At_Drought_P Parameter: Treatment Value: Drought vs. No Drought
  misc_feature: MA Experiment ID: 20000268 Result: Up-regulated in Transcription
  misc_feature: MA Experiment 20000268 PARAMETER Experiment Name: At_100mM_NaCl__P Parameter: Age (day) Value: 14
  misc_feature: MA Experiment 20000268 PARAMETER Experiment Name: At_100mM_NaCl__P Parameter: Organism Value: A. thaliana
  misc_feature: MA Experiment 20000268 PARAMETER Experiment Name: At_100mM_NaCl__P Parameter: Plant Line Value: WS
  misc_feature: MA Experiment 20000268 PARAMETER Experiment Name: At_100mM_NaCl__P Parameter: Timepoint (hr) Value: 6
  misc_feature: MA Experiment 20000268 PARAMETER Experiment Name: At_100mM_NaCl__P Parameter: Tissue Value: Whole Plant
  misc_feature: MA Experiment 20000268 PARAMETER Experiment Name: At_100mM_NaCl__P Parameter: Treatment Value: 100mM NaCl vs. No Treatment
  misc_feature: MA Experiment ID: 20000308 Result: Up-regulated in Transcription
  misc_feature: MA Experiment 20000308 PARAMETER Experiment Name: At_100mM_NaCl__P Parameter: Age (day) Value: 17
  misc_feature: MA Experiment 20000308 PARAMETER Experiment Name: At_100mM_NaCl__P Parameter: Organism Value: A. thaliana
  misc_feature: MA Experiment 20000308 PARAMETER Experiment Name: At_100mM_NaCl__P Parameter: Plant Line Value: WS
  misc_feature: MA Experiment 20000308 PARAMETER Experiment Name: At_100mM_NaCl__P Parameter: Timepoint (hr) Value: 72
  misc_feature: MA Experiment 20000308 PARAMETER Experiment Name: At_100mM_NaCl__P Parameter: Tissue Value: Whole Plant
  misc_feature: MA Experiment 20000308 PARAMETER Experiment Name: At_100mM_NaCl__P Parameter: Treatment Value: 100mM NaCl vs. No Treatment
  misc_feature: MA Experiment ID: 20000436 Result: Up-regulated in Transcription
  misc_feature: MA Experiment 20000436 PARAMETER Experiment Name: At_Drought_P Parameter: Age (day) Value: 7
  misc_feature: MA Experiment 20000436 PARAMETER Experiment Name: At_Drought_P Parameter: Organism Value: A. thaliana
  misc_feature: MA Experiment 20000436 PARAMETER Experiment Name: At_Drought_P Parameter: Plant Line Value: WS
  misc_feature: MA Experiment 20000436 PARAMETER Experiment Name: At_Drought_P Parameter: Timepoint (hr) Value: 12
  misc_feature: MA Experiment 20000436 PARAMETER Experiment Name: At_Drought_P Parameter: Tissue Value: Whole Plant
  misc_feature: MA Experiment 20000436 PARAMETER Experiment Name: At_Drought_P Parameter: Treatment Value: Drought vs. No Drought
  misc_feature: MA Experiment ID: 20000437 Result: Up-regulated in Transcription
  misc_feature: MA Experiment 20000437 PARAMETER Experiment Name: At_Drought_P Parameter: Age (day) Value: 8
  misc_feature: MA Experiment 20000437 PARAMETER Experiment Name: At_Drought_P Parameter: Organism Value: A. thaliana
  misc_feature: MA Experiment 20000437 PARAMETER Experiment Name: At_Drought_P Parameter: Plant Line Value: WS
  misc_feature: MA Experiment 20000437 PARAMETER Experiment Name: At_Drought_P Parameter: Timepoint (hr) Value: 24
  misc_feature: MA Experiment 20000437 PARAMETER Experiment Name: At_Drought_P Parameter: Tissue Value: Whole Plant
  misc_feature: MA Experiment 20000437 PARAMETER Experiment Name: At_Drought_P Parameter: Treatment Value: Drought vs. No Drought
  misc_feature: MA Experiment ID: 20000438 Result: Down-regulated in Transcription
  misc_feature: MA Experiment 20000438 PARAMETER Experiment Name: At_Shoots__P Parameter: Age (day) Value: 14
  misc_feature: MA Experiment 20000438 PARAMETER Experiment Name: At_Shoots__P Parameter: Tissue Value: Shoots vs. Whole Plant
  misc_feature: MA Experiment ID: 20000439 Result: Down-regulated in Transcription
  misc_feature: MA Experiment 20000439 PARAMETER Experiment Name: At_Roots__P Parameter: Age (day) Value: 14 vs. 21
  misc_feature: MA Experiment 20000439 PARAMETER Experiment Name: At_Roots__P Parameter: Organism Value: A. thaliana
  misc_feature: MA Experiment 20000439 PARAMETER Experiment Name: At_Roots__P Parameter: Tissue Value: Roots vs. Whole Plant
  misc_feature: MA Experiment ID: 20000451 Result: Up-regulated in Transcription
  misc_feature: MA Experiment 20000451 PARAMETER Experiment Name: At_CS6879_Shoots-Roots_P Parameter: Age (day) Value: 14
  misc_feature: MA Experiment 20000451 PARAMETER Experiment Name: At_CS6879_Shoots-Roots_P Parameter: Organism Value: A. thaliana
  misc_feature: MA Experiment 20000451 PARAMETER Experiment Name: At_CS6879_Shoots-Roots_P Parameter: Plant Line Value: CS6879 vs. WS
  misc_feature: MA Experiment 20000451 PARAMETER Experiment Name: At_CS6879_Shoots-Roots_P Parameter: Tissue Value: Roots
  misc_feature: MA Experiment ID: 20000495 Result: Down-regulated in Transcription
  misc_feature: MA Experiment 20000495 PARAMETER Experiment Name: At_Guard_Cells_P Parameter: Harvest Date Value: 8/2/2002
  misc_feature: MA Experiment 20000495 PARAMETER Experiment Name: At_Guard_Cells_P Parameter: Organism Value: A. thaliana
  misc_feature: MA Experiment 20000495 PARAMETER Experiment Name: At_Guard_Cells_P Parameter: Tissue Value: Guard Cells vs. Leaves
  misc_feature: MA Experiment ID: 20000573 Result: Down-regulated in Transcription
  misc_feature: MA Experiment 20000573 PARAMETER Experiment Name: At_100uM_ABA_Mutants__P Parameter: Organism Value: A. thaliana
  misc_feature: MA Experiment 20000573 PARAMETER Experiment Name: At_100uM_ABA_Mutants__P Parameter: Plant Line Value: CS22 vs. Ler wt
  misc_feature: MA Experiment 20000573 PARAMETER Experiment Name: At_100uM_ABA_Mutants__P Parameter: Timepoint (hr) Value: N/A
  misc_feature: MA Experiment 20000573 PARAMETER Experiment Name: At_100uM_ABA_Mutants__P Parameter: Tissue Value: Whole Plant
  misc_feature: MA Experiment 20000573 PARAMETER Experiment Name: At_100uM_ABA_Mutants__P Parameter: Treatment Value: None
  misc_feature: MA Experiment ID: 20000574 Result: Down-regulated in Transcription
  misc_feature: MA Experiment 20000574 PARAMETER Experiment Name: At_100uM_ABA_Mutants__P Parameter: Organism Value: A. thaliana
  misc_feature: MA Experiment 20000574 PARAMETER Experiment Name: At_100uM_ABA_Mutants__P Parameter: Plant Line Value: CS23 vs. Ler wt
  misc_feature: MA Experiment 20000574 PARAMETER Experiment Name: At_100uM_ABA_Mutants__P Parameter: Timepoint (hr) Value: N/A
  misc_feature: MA Experiment 20000574 PARAMETER Experiment Name: At_100uM_ABA_Mutants__P Parameter: Tissue Value: Whole Plant
  misc_feature: MA Experiment 20000574 PARAMETER Experiment Name: At_100uM_ABA_Mutants__P Parameter: Treatment Value: None
  misc_feature: MA Experiment ID: 20001247 Result: Down-regulated in Transcription
  misc_feature: MA Experiment 20001247 PARAMETER Experiment Name: At_Far-red-induction_P Parameter: Age (day) Value: 7
  misc_feature: MA Experiment 20001247 PARAMETER Experiment Name: At_Far-red-induction_P Parameter: Light Value: Far-red vs. White
  misc_feature: MA Experiment 20001247 PARAMETER Experiment Name: At_Far-red-induction_P Parameter: Organism Value: A. thaliana
  misc_feature: MA Experiment 20001247 PARAMETER Experiment Name: At_Far-red-induction_P Parameter: Plant Line Value: Columbia
  misc_feature: MA Experiment 20001247 PARAMETER Experiment Name: At_Far-red-induction_P Parameter: Timepoint (hr) Value: 1
  misc_feature: MA Experiment 20001247 PARAMETER Experiment Name: At_Far-red-induction_P Parameter: Tissue Value: Whole Plant
  misc_feature: MA Experiment ID: 20001248 Result: Down-regulated in Transcription
  misc_feature: MA Experiment 20001248 PARAMETER Experiment Name: At_Far-red-induction_P Parameter: Age (day) Value: 7
  misc_feature: MA Experiment 20001248 PARAMETER Experiment Name: At_Far-red-induction_P Parameter: Light Value: Far-red vs. White
  misc_feature: MA Experiment 20001248 PARAMETER Experiment Name: At_Far-red-induction_P Parameter: Organism Value: A. thaliana
  misc_feature: MA Experiment 20001248 PARAMETER Experiment Name: At_Far-red-induction_P Parameter: Plant Line Value: Columbia
  misc_feature: MA Experiment 20001248 PARAMETER Experiment Name: At_Far-red-induction_P Parameter: Timepoint (hr) Value: 4
  misc_feature: MA Experiment 20001248 PARAMETER Experiment Name: At_Far-red-induction_P Parameter: Tissue Value: Whole Plant
  misc_feature: MA Experiment ID: 20001450 Result: Down-regulated in Transcription
  misc_feature: MA Experiment 20001450 PARAMETER Experiment Name: At_Far-red-induction_P Parameter: Age (day) Value: 7
  misc_feature: MA Experiment 20001450 PARAMETER Experiment Name: At_Far-red-induction_P Parameter: Light Value: Far-red vs. White
  misc_feature: MA Experiment 20001450 PARAMETER Experiment Name: At_Far-red-induction_P Parameter: Organism Value: A. thaliana
  misc_feature: MA Experiment 20001450 PARAMETER Experiment Name: At_Far-red-induction_P Parameter: Plant Line Value: Columbia
  misc_feature: MA Experiment 20001450 PARAMETER Experiment Name: At_Far-red-induction_P Parameter: Timepoint (hr) Value: 8
  misc_feature: MA Experiment 20001450 PARAMETER Experiment Name: At_Far-red-induction_P Parameter: Tissue Value: Whole Plant
  misc_feature: MA Experiment ID: 20001451 Result: Down-regulated in Transcription
  misc_feature: MA Experiment 20001451 PARAMETER Experiment Name: At_Far-red-induction_P Parameter: Age (day) Value: 7
  misc_feature: MA Experiment 20001451 PARAMETER Experiment Name: At_Far-red-induction_P Parameter: Light Value: Far-red vs. White
  misc_feature: MA Experiment 20001451 PARAMETER Experiment Name: At_Far-red-induction_P Parameter: Organism Value: A. thaliana
  misc_feature: MA Experiment 20001451 PARAMETER Experiment Name: At_Far-red-induction_P Parameter: Plant Line Value: Columbia
  misc_feature: MA Experiment 20001451 PARAMETER Experiment Name: At_Far-red-induction_P Parameter: Timepoint (hr) Value: 24
  misc_feature: MA Experiment 20001451 PARAMETER Experiment Name: At_Far-red-induction_P Parameter: Tissue Value: Whole Plant
  misc_feature: MA Experiment ID: 20001556 Result: Up-regulated in Transcription
  misc_feature: MA Experiment 20001556 PARAMETER Experiment Name: At_Drought_Soil_Dry_P Parameter: Age (day) Value: 26
  misc_feature: MA Experiment 20001556 PARAMETER Experiment Name: At_Drought_Soil_Dry_P Parameter: Organism Value: A. thaliana
  misc_feature: MA Experiment 20001556 PARAMETER Experiment Name: At_Drought_Soil_Dry_P Parameter: Plant Line Value: WS
  misc_feature: MA Experiment 20001556 PARAMETER Experiment Name: At_Drought_Soil_Dry_P Parameter: Post Timepoint (hr) Value: None
  misc_feature: MA Experiment 20001556 PARAMETER Experiment Name: At_Drought_Soil_Dry_P Parameter: Post-Treatment Value: None
  misc_feature: MA Experiment 20001556 PARAMETER Experiment Name: At_Drought_Soil_Dry_P Parameter: Timepoint (day) Value: 12
  misc_feature: MA Experiment 20001556 PARAMETER Experiment Name: At_Drought_Soil_Dry_P Parameter: Treatment Value: Drought vs. No Drought
  misc_feature: MA Experiment ID: 20001757 Result: Down-regulated in Transcription
  misc_feature: MA Experiment 20001757 PARAMETER Experiment Name: At_50mM_NH4NO3_L-to-H_P Parameter: Timepoint (hr) Value: 6
  misc_feature: MA Experiment 20001757 PARAMETER Experiment Name: At_50mM_NH4NO3_L-to-H_P Parameter: Tissue Value: Leaf
  misc_feature: MA Experiment 20001757 PARAMETER Experiment Name: At_50mM_NH4NO3_L-to-H_P Parameter: Treatment Value: 50mM NH4NO3 vs 100mM Mannitol
  misc_feature: MA Experiment ID: 20001904 Result: Up-regulated in Transcription
  misc_feature: MA Experiment 20001904 PARAMETER Experiment Name: At_Drought_Reproduction_P Parameter: Age (day) Value: 37
  misc_feature: MA Experiment 20001904 PARAMETER Experiment Name: At_Drought_Reproduction_P Parameter: Organism Value: A. thaliana
  misc_feature: MA Experiment 20001904 PARAMETER Experiment Name: At_Drought_Reproduction_P Parameter: Plant Line Value: WS
  misc_feature: MA Experiment 20001904 PARAMETER Experiment Name: At_Drought_Reproduction_P Parameter: Timepoint (day) Value: 7
  misc_feature: MA Experiment 20001904 PARAMETER Experiment Name: At_Drought_Reproduction_P Parameter: Tissue Value: Rosettes
  misc_feature: MA Experiment 20001904 PARAMETER Experiment Name: At_Drought_Reproduction_P Parameter: Treatment Value: Drought vs. No Drought
  misc_feature: MA Experiment ID: 20001905 Result: Up-regulated in Transcription
  misc_feature: MA Experiment 20001905 PARAMETER Experiment Name: At_Drought_Reproduction_P Parameter: Age (day) Value: 40
  misc_feature: MA Experiment 20001905 PARAMETER Experiment Name: At_Drought_Reproduction_P Parameter: Organism Value: A. thaliana
  misc_feature: MA Experiment 20001905 PARAMETER Experiment Name: At_Drought_Reproduction_P Parameter: Plant Line Value: WS
  misc_feature: MA Experiment 20001905 PARAMETER Experiment Name: At_Drought_Reproduction_P Parameter: Timepoint (day) Value: 10
  misc_feature: MA Experiment 20001905 PARAMETER Experiment Name: At_Drought_Reproduction_P Parameter: Tissue Value: Rosettes
  misc_feature: MA Experiment 20001905 PARAMETER Experiment Name: At_Drought_Reproduction_P Parameter: Treatment Value: Drought vs. No Drought

SEQ ID NO: 33859 - protein, 368 aa, Arabidopsis thaliana; identical to SEQ ID NO: 30269
  peptide (1)..(368): Ceres Seq. ID no. 12422616
  misc_feature (44)..(368): Homolog of NCBI NO: 2960364 NR Description: cinnamoyl CoA reductase [Populus balsamifera
  misc_feature (55)..(319): Homolog of NCBI NO: 17978649 NR Description: cinnamoyl-CoA reductase [Pinus taeda]
  misc_feature (56)..(322): Homolog of NCBI NO: 21553382 NR Description: putative cinnamoyl CoA reductase [Arabidopsis
  misc_feature (56)..(357): Homolog of NCBI NO: 18400407 NR Description: putative cinnamoyl CoA reductase
  misc_feature (56)..(357): Homolog of NCBI NO: 25412171 NR Description: probable cinnamoyl CoA reductase [imported] -
  misc_feature (46)..(322): Homolog of NCBI NO: 21553548 NR Description: cinnamoyl-CoA reductase-like protein [Arabidopsis
  misc_feature (46)..(322): Homolog of NCBI NO: 15234751 NR Description: cinnamoyl-CoA reductase - like protein
  misc_feature (1)..(367): Homolog of NCBI NO: 34911590 NR Description: putative cinnamoyl CoA reductase
  misc_feature (1)..(368): Homolog of NCBI NO: 21553833 NR Description: cinnamoyl CoA reductase-like protein [Arabidopsis
  misc_feature (1)..(368): Homolog of NCBI NO: 15241467 NR Description: cinnamoyl CoA reductase - like protein

SEQ ID NO: 33860 - protein, 351 aa, Arabidopsis thaliana; identical to SEQ ID NO: 30270
  peptide (1)..(351): Ceres Seq. ID no. 12422617
  misc_feature (27)..(351): Homolog of NCBI NO: 2960364 NR Description: cinnamoyl CoA reductase [Populus balsamifera
  misc_feature (38)..(302): Homolog of NCBI NO: 17978649 NR Description: cinnamoyl-CoA reductase [Pinus taeda]
  misc_feature (39)..(305): Homolog of NCBI NO: 21553382 NR Description: putative cinnamoyl CoA reductase [Arabidopsis
  misc_feature (39)..(340): Homolog of NCBI NO: 18400407 NR Description: putative cinnamoyl CoA reductase
  misc_feature (39)..(340): Homolog of NCBI NO: 25412171 NR Description: probable cinnamoyl CoA reductase [imported] -
  misc_feature (29)..(305): Homolog of NCBI NO: 21553548 NR Description: cinnamoyl-CoA reductase-like protein [Arabidopsis
  misc_feature (29)..(305): Homolog of NCBI NO: 15234751 NR Description: cinnamoyl-CoA reductase - like protein
  misc_feature (1)..(350): Homolog of NCBI NO: 34911590 NR Description: putative cinnamoyl CoA reductase
  misc_feature (1)..(351): Homolog of NCBI NO: 21553833 NR Description: cinnamoyl CoA reductase-like protein [Arabidopsis
  misc_feature (1)..(351): Homolog of NCBI NO: 15241467 NR Description: cinnamoyl CoA reductase - like protein

SEQ ID NO: 33861 - protein, 325 aa, Arabidopsis thaliana; identical to SEQ ID NO: 30271
  peptide (1)..(325): Ceres Seq. ID no. 12422618
  misc_feature (1)..(325): Homolog of NCBI NO: 2960364 NR Description: cinnamoyl CoA reductase [Populus balsamifera
  misc_feature (12)..(276): Homolog of NCBI NO: 17978649 NR Description: cinnamoyl-CoA reductase [Pinus taeda]
  misc_feature (13)..(279): Homolog of NCBI NO: 21553382 NR Description: putative cinnamoyl CoA reductase [Arabidopsis
  misc_feature (13)..(314): Homolog of NCBI NO: 18400407 NR Description: putative cinnamoyl CoA reductase
  misc_feature (13)..(314): Homolog of NCBI NO: 25412171 NR Description: probable cinnamoyl CoA reductase [imported] -
  misc_feature (3)..(279): Homolog of NCBI NO: 21553548 NR Description: cinnamoyl-CoA reductase-like protein [Arabidopsis
  misc_feature (3)..(279): Homolog of NCBI NO: 15234751 NR Description: cinnamoyl-CoA reductase - like protein
  misc_feature (1)..(324): Homolog of NCBI NO: 34911590 NR Description: putative cinnamoyl CoA reductase
  misc_feature (1)..(325): Homolog of NCBI NO: 21553833 NR Description: cinnamoyl CoA reductase-like protein [Arabidopsis
  misc_feature (1)..(325): Homolog of NCBI NO: 15241467 NR Description: cinnamoyl CoA reductase - like protein

SEQ ID NO: 33862 - DNA, 1201 bp, Arabidopsis thaliana; identical to SEQ ID NO: 30272
  misc_feature (1)..(1201): Ceres Seq. ID no. 12384927
  misc_feature: MA Experiment ID: 108501 Result: Up-regulated in Transcription
  misc_feature: MA Experiment 108501 PARAMETER Experiment Name: At_ap2_floral_buds_cDNA_P Parameter: Plant Line Value: ap2 (Ler.)
  misc_feature: MA Experiment 108501 PARAMETER Experiment Name: At_ap2_floral_buds_cDNA_P Parameter: Tissue Value: Closed Flower
  misc_feature: MA Experiment ID: 108579 Result: Up-regulated in Transcription
  misc_feature: MA Experiment 108579 PARAMETER Experiment Name: At_4deg_Cold_cDNA_P Parameter: Temperature (deg C) Value: 4 vs. 22
  misc_feature: MA Experiment 108579 PARAMETER Experiment Name: At_4deg_Cold_cDNA_P Parameter: Timepoint (hr) Value: 6
  misc_feature: MA Experiment 108579 PARAMETER Experiment Name: At_4deg_Cold_cDNA_P Parameter: Tissue Value: Aerial
  misc_feature: MA Experiment ID: 108609 Result: Up-regulated in Transcription
  misc_feature: MA Experiment 108609 PARAMETER Experiment Name: At_100uM_ABA_cDNA_P Parameter: Timepoint (hr) Value: 24
  misc_feature: MA Experiment 108609 PARAMETER Experiment Name: At_100uM_ABA_cDNA_P Parameter: Tissue Value: Aerial
  misc_feature: MA Experiment 108609 PARAMETER Experiment Name: At_100uM_ABA_cDNA_P Parameter: Treatment Value: 100uM ABA vs. No Treatment
  misc_feature: MA Experiment ID: 20000111 Result: Down-regulated in Transcription
  misc_feature: MA Experiment 20000111 PARAMETER Experiment Name: At_42deg_Heat_cDNA_P Parameter: Temperature (deg C) Value: 42 vs. 22
  misc_feature: MA Experiment 20000111 PARAMETER Experiment Name: At_42deg_Heat_cDNA_P Parameter: Timepoint (hr) Value: 6
  misc_feature: MA Experiment 20000111 PARAMETER Experiment Name: At_42deg_Heat_cDNA_P Parameter: Tissue Value: Aerial
  misc_feature: MA Experiment ID: 20000113 Result: Down-regulated in Transcription
  misc_feature: MA Experiment 20000113 PARAMETER Experiment Name: At_42deg_Heat_cDNA_P Parameter: Temperature (deg C) Value: 42 vs. 22
  misc_feature: MA Experiment 20000113 PARAMETER Experiment Name: At_42deg_Heat_cDNA_P Parameter: Timepoint (hr) Value: 8
  misc_feature: MA Experiment 20000113 PARAMETER Experiment Name: At_42deg_Heat_cDNA_P Parameter: Tissue Value: Aerial
  misc_feature: MA Experiment ID: 20000144 Result: Down-regulated in Transcription
  misc_feature: MA Experiment 20000144 PARAMETER Experiment Name: At_42deg_Heat_cDNA_P Parameter: Temperature (deg C) Value: 42 vs. 22
  misc_feature: MA Experiment 20000144 PARAMETER Experiment Name: At_42deg_Heat_cDNA_P Parameter: Timepoint (hr) Value: 1
  misc_feature: MA Experiment 20000144 PARAMETER Experiment Name: At_42deg_Heat_cDNA_P Parameter: Tissue Value: Aerial
  misc_feature: MA Experiment ID: 20000171 Result: Down-regulated in Transcription
  misc_feature: MA Experiment 20000171 PARAMETER Experiment Name: At_42deg_Heat_P Parameter: Age (day) Value: 14
  misc_feature: MA Experiment 20000171 PARAMETER Experiment Name: At_42deg_Heat_P Parameter: Organism Value: A. thaliana
  misc_feature: MA Experiment 20000171 PARAMETER Experiment Name: At_42deg_Heat_P Parameter: Plant Line Value: WS
  misc_feature: MA Experiment 20000171 PARAMETER Experiment Name: At_42deg_Heat_P Parameter: Temperature (deg C) Value: 42 vs. 22
  misc_feature: MA Experiment 20000171 PARAMETER Experiment Name: At_42deg_Heat_P Parameter: Timepoint (hr) Value: 1
  misc_feature: MA Experiment 20000171 PARAMETER Experiment Name: At_42deg_Heat_P Parameter: Tissue Value: Aerial
  misc_feature: MA Experiment ID: 20000173 Result: Down-regulated in Transcription
  misc_feature: MA Experiment 20000173 PARAMETER Experiment Name: At_42deg_Heat_P Parameter: Age (day) Value: 14
  misc_feature: MA Experiment 20000173 PARAMETER Experiment Name: At_42deg_Heat_P Parameter: Organism Value: A. thaliana
  misc_feature: MA Experiment 20000173 PARAMETER Experiment Name: At_42deg_Heat_P Parameter: Plant Line Value: WS
  misc_feature: MA Experiment 20000173 PARAMETER Experiment Name: At_42deg_Heat_P Parameter: Temperature (deg C) Value: 42 vs. 22
  misc_feature: MA Experiment 20000173 PARAMETER Experiment Name: At_42deg_Heat_P Parameter: Timepoint (hr) Value: 6
  misc_feature: MA Experiment 20000173 PARAMETER Experiment Name: At_42deg_Heat_P Parameter: Tissue Value: Aerial
  misc_feature: MA Experiment ID: 20000180 Result: Up-regulated in Transcription
  misc_feature: MA Experiment 20000180 PARAMETER Experiment Name: At_Germinating_Seeds_P Parameter: Age (hr) Value: 24 vs. 0
  misc_feature: MA Experiment 20000180 PARAMETER Experiment Name: At_Germinating_Seeds_P Parameter: Tissue Value: Germinating Seeds
  misc_feature: MA Experiment ID: 20000184 Result: Down-regulated in Transcription
  misc_feature: MA Experiment 20000184 PARAMETER Experiment Name: At_Shoots__P Parameter: Age (day) Value: 7
  misc_feature: MA Experiment 20000184 PARAMETER Experiment Name: At_Shoots__P Parameter: Tissue Value: Shoots vs. Whole Plant
  misc_feature: MA Experiment ID: 20000185 Result: Down-regulated in Transcription
  misc_feature: MA Experiment 20000185 PARAMETER Experiment Name: At_Roots__P Parameter: Age (day) Value: 7 vs. 21
  misc_feature: MA Experiment 20000185 PARAMETER Experiment Name: At_Roots__P Parameter: Organism Value: A. thaliana
  misc_feature: MA Experiment 20000185 PARAMETER Experiment Name: At_Roots__P Parameter: Tissue Value: Roots vs. Whole Plant
  misc_feature: MA Experiment ID: 20000234 Result: Up-regulated in Transcription
  misc_feature: MA Experiment 20000234 PARAMETER Experiment Name: At_Siliques_P Parameter: Age (day) Value: 21
  misc_feature: MA Experiment 20000234 PARAMETER Experiment Name: At_Siliques_P Parameter: Organism Value: A. thaliana
  misc_feature: MA Experiment 20000234 PARAMETER Experiment Name: At_Siliques_P Parameter: Plant Line Value: WS
  misc_feature: MA Experiment 20000234 PARAMETER Experiment Name: At_Siliques_P Parameter: Tissue Value: Less Than 5mm Siliques vs. Whole Plant
  misc_feature: MA Experiment ID: 20000235 Result: Up-regulated in Transcription
  misc_feature: MA Experiment 20000235 PARAMETER Experiment Name: At_Siliques_P Parameter: Age (day) Value: 21
  misc_feature: MA Experiment 20000235 PARAMETER Experiment Name: At_Siliques_P Parameter: Organism Value: A. thaliana
  misc_feature: MA Experiment 20000235 PARAMETER Experiment Name: At_Siliques_P Parameter: Plant Line Value: WS
  misc_feature: MA Experiment 20000235 PARAMETER Experiment Name: At_Siliques_P Parameter: Tissue Value: 5-10mm Siliques vs. Whole Plant
  misc_feature: MA Experiment ID: 20000286 Result: Up-regulated in Transcription
  misc_feature: MA Experiment 20000286 PARAMETER Experiment Name: At_Open_Flower_P Parameter: Age (day) Value: 21
  misc_feature: MA Experiment 20000286 PARAMETER Experiment Name: At_Open_Flower_P Parameter: Plant Line Value: WS
  misc_feature: MA Experiment 20000286 PARAMETER Experiment Name: At_Open_Flower_P Parameter: Tissue Value: Half Open vs. Whole Plant
  misc_feature: MA Experiment ID: 20000437 Result: Down-regulated in Transcription
  misc_feature: MA Experiment 20000437 PARAMETER Experiment Name: At_Drought_P Parameter: Age (day) Value: 8
  misc_feature: MA Experiment 20000437 PARAMETER Experiment Name: At_Drought_P Parameter: Organism Value: A. thaliana
  misc_feature: MA Experiment 20000437 PARAMETER Experiment Name: At_Drought_P Parameter: Plant Line Value: WS
  misc_feature: MA Experiment 20000437 PARAMETER Experiment Name: At_Drought_P Parameter: Timepoint (hr) Value: 24
  misc_feature: MA Experiment 20000437 PARAMETER Experiment Name: At_Drought_P Parameter: Tissue Value: Whole Plant
  misc_feature: MA Experiment 20000437 PARAMETER Experiment Name: At_Drought_P Parameter: Treatment Value: Drought vs. No Drought
  misc_feature: MA Experiment ID: 20000438 Result: Down-regulated in Transcription
  misc_feature: MA Experiment 20000438 PARAMETER Experiment Name: At_Shoots__P Parameter: Age (day) Value: 14
  misc_feature: MA Experiment 20000438 PARAMETER Experiment Name: At_Shoots__P Parameter: Tissue Value: Shoots vs. Whole Plant
  misc_feature: MA Experiment ID: 20000439 Result: Down-regulated in Transcription
  misc_feature: MA Experiment 20000439 PARAMETER Experiment Name: At_Roots__P Parameter: Age (day) Value: 14 vs. 21
  misc_feature: MA Experiment 20000439 PARAMETER Experiment Name: At_Roots__P Parameter: Organism Value: A. thaliana
  misc_feature: MA Experiment 20000439 PARAMETER Experiment Name: At_Roots__P Parameter: Tissue Value: Roots vs. Whole Plant
  misc_feature: MA Experiment ID: 20000573 Result: Down-regulated in Transcription
  misc_feature: MA Experiment 20000573 PARAMETER Experiment Name: At_100uM_ABA_Mutants__P Parameter: Organism Value: A. thaliana
  misc_feature: MA Experiment 20000573 PARAMETER Experiment Name: At_100uM_ABA_Mutants__P Parameter: Plant Line Value: CS22 vs. Ler wt
  misc_feature: MA Experiment 20000573 PARAMETER Experiment Name: At_100uM_ABA_Mutants__P Parameter: Timepoint (hr) Value: N/A
  misc_feature: MA Experiment 20000573 PARAMETER Experiment Name: At_100uM_ABA_Mutants__P Parameter: Tissue Value: Whole Plant
  misc_feature: MA Experiment 20000573 PARAMETER Experiment Name: At_100uM_ABA_Mutants__P Parameter: Treatment Value: None
  misc_feature: MA Experiment ID: 20000574 Result: Down-regulated in Transcription
  misc_feature: MA Experiment 20000574 PARAMETER Experiment Name: At_100uM_ABA_Mutants__P Parameter: Organism Value: A. thaliana
  misc_feature: MA Experiment 20000574 PARAMETER Experiment Name: At_100uM_ABA_Mutants__P Parameter: Plant Line Value: CS23 vs. Ler wt
  misc_feature: MA Experiment 20000574 PARAMETER Experiment Name: At_100uM_ABA_Mutants__P Parameter: Timepoint (hr) Value: N/A
  misc_feature: MA Experiment 20000574 PARAMETER Experiment Name: At_100uM_ABA_Mutants__P Parameter: Tissue Value: Whole Plant
  misc_feature: MA Experiment 20000574 PARAMETER Experiment Name: At_100uM_ABA_Mutants__P Parameter: Treatment Value: None
  misc_feature: MA Experiment ID: 20001248 Result: Down-regulated in Transcription
  misc_feature: MA Experiment 20001248 PARAMETER Experiment Name: At_Far-red-induction_P Parameter: Age (day) Value: 7
  misc_feature: MA Experiment 20001248 PARAMETER Experiment Name: At_Far-red-induction_P Parameter: Light Value: Far-red vs. White
  misc_feature: MA Experiment 20001248 PARAMETER Experiment Name: At_Far-red-induction_P Parameter: Organism Value: A. thaliana
  misc_feature: MA Experiment 20001248 PARAMETER Experiment Name: At_Far-red-induction_P Parameter: Plant Line Value: Columbia
  misc_feature: MA Experiment 20001248 PARAMETER Experiment Name: At_Far-red-induction_P Parameter: Timepoint (hr) Value: 4
  misc_feature: MA Experiment 20001248 PARAMETER Experiment Name: At_Far-red-induction_P Parameter: Tissue Value: Whole Plant
  misc_feature: MA Experiment ID: 20001450 Result: Down-regulated in Transcription
  misc_feature: MA Experiment 20001450 PARAMETER Experiment Name: At_Far-red-induction_P Parameter: Age (day) Value: 7
  misc_feature: MA Experiment 20001450 PARAMETER Experiment Name: At_Far-red-induction_P Parameter: Light Value: Far-red vs. White
  misc_feature: MA Experiment 20001450 PARAMETER Experiment Name: At_Far-red-induction_P Parameter: Organism Value: A. thaliana
  misc_feature: MA Experiment 20001450 PARAMETER Experiment Name: At_Far-red-induction_P Parameter: Plant Line Value: Columbia
  misc_feature: MA Experiment 20001450 PARAMETER Experiment Name: At_Far-red-induction_P Parameter: Timepoint (hr) Value: 8
  misc_feature: MA Experiment 20001450 PARAMETER Experiment Name: At_Far-red-induction_P Parameter: Tissue Value: Whole Plant
  misc_feature: MA Experiment ID: 20001560 Result: Up-regulated in Transcription
  misc_feature: MA Experiment 20001560 PARAMETER Experiment Name: At_Drought_Soil_Dry_P Parameter: Age (day) Value: 28
  misc_feature: MA Experiment 20001560 PARAMETER Experiment Name: At_Drought_Soil_Dry_P Parameter: Organism Value: A. thaliana
  misc_feature: MA Experiment 20001560 PARAMETER Experiment Name: At_Drought_Soil_Dry_P Parameter: Plant Line Value: WS
  misc_feature: MA Experiment 20001560 PARAMETER Experiment Name: At_Drought_Soil_Dry_P Parameter: Post Timepoint (hr) Value: None
  misc_feature: MA Experiment 20001560 PARAMETER Experiment Name: At_Drought_Soil_Dry_P Parameter: Post-Treatment Value: None
  misc_feature: MA Experiment 20001560 PARAMETER Experiment Name: At_Drought_Soil_Dry_P Parameter: Timepoint (day) Value: 14
  misc_feature: MA Experiment 20001560 PARAMETER Experiment Name: At_Drought_Soil_Dry_P Parameter: Treatment Value: Drought vs. No Drought
  misc_feature: MA Experiment ID: 20001906 Result: Down-regulated in Transcription
  misc_feature: MA Experiment 20001906 PARAMETER Experiment Name: At_Drought_Reproduction_P Parameter: Age (day) Value: 35
  misc_feature: MA Experiment 20001906 PARAMETER Experiment Name: At_Drought_Reproduction_P Parameter: Organism Value: A. thaliana
  misc_feature: MA Experiment 20001906 PARAMETER Experiment Name: At_Drought_Reproduction_P Parameter: Plant Line Value: WS
  misc_feature: MA Experiment 20001906 PARAMETER Experiment Name: At_Drought_Reproduction_P Parameter: Timepoint (day) Value: 5
  misc_feature: MA Experiment 20001906 PARAMETER Experiment Name: At_Drought_Reproduction_P Parameter: Tissue Value: Siliques
  misc_feature: MA Experiment 20001906 PARAMETER Experiment Name: At_Drought_Reproduction_P Parameter: Treatment Value: Drought vs. No Drought
  misc_feature: MA Experiment ID: 20001907 Result: Down-regulated in Transcription
  misc_feature: MA Experiment 20001907 PARAMETER Experiment Name: At_Drought_Reproduction_P Parameter: Age (day) Value: 37
  misc_feature: MA Experiment 20001907 PARAMETER Experiment Name: At_Drought_Reproduction_P Parameter: Organism Value: A. thaliana
  misc_feature: MA Experiment 20001907 PARAMETER Experiment Name: At_Drought_Reproduction_P Parameter: Plant Line Value: WS
  misc_feature: MA Experiment 20001907 PARAMETER Experiment Name: At_Drought_Reproduction_P Parameter: Timepoint (day) Value: 7
  misc_feature: MA Experiment 20001907 PARAMETER Experiment Name: At_Drought_Reproduction_P Parameter: Tissue Value: Siliques
  misc_feature: MA Experiment 20001907 PARAMETER Experiment Name: At_Drought_Reproduction_P Parameter: Treatment Value: Drought vs. No Drought
  misc_feature: MA Experiment ID: 20001908 Result: Down-regulated in Transcription
  misc_feature: MA Experiment 20001908 PARAMETER Experiment Name: At_Drought_Reproduction_P Parameter: Age (day) Value: 40
  misc_feature: MA Experiment 20001908 PARAMETER Experiment Name: At_Drought_Reproduction_P Parameter: Organism Value: A. thaliana
  misc_feature: MA Experiment 20001908 PARAMETER Experiment Name: At_Drought_Reproduction_P Parameter: Plant Line Value: WS
  misc_feature: MA Experiment 20001908 PARAMETER Experiment Name: At_Drought_Reproduction_P Parameter: Timepoint (day) Value: 10
  misc_feature: MA Experiment 20001908 PARAMETER Experiment Name: At_Drought_Reproduction_P Parameter: Tissue Value: Siliques
  misc_feature: MA Experiment 20001908 PARAMETER Experiment Name: At_Drought_Reproduction_P Parameter: Treatment Value: Drought vs. No Drought
  misc_feature: MA Experiment ID: 20001911 Result: Down-regulated in Transcription
  misc_feature: MA Experiment 20001911 PARAMETER Experiment Name: At_Drought_Reproduction_P Parameter: Age (day) Value: 40
  misc_feature: MA Experiment 20001911 PARAMETER Experiment Name: At_Drought_Reproduction_P Parameter: Organism Value: A. thaliana
  misc_feature: MA Experiment 20001911 PARAMETER Experiment Name: At_Drought_Reproduction_P Parameter: Plant Line Value: WS
  misc_feature: MA Experiment 20001911 PARAMETER Experiment Name: At_Drought_Reproduction_P Parameter: Timepoint (day) Value: 10
  misc_feature: MA Experiment 20001911 PARAMETER Experiment Name: At_Drought_Reproduction_P Parameter: Tissue Value: Flowers
  misc_feature: MA Experiment 20001911 PARAMETER Experiment Name: At_Drought_Reproduction_P Parameter: Treatment Value: Drought vs. No Drought

SEQ ID NO: 33863 - protein, 286 aa, Arabidopsis thaliana; identical to SEQ ID NO: 30273
  peptide (1)..(286): Ceres Seq. ID no. 12384928
  misc_feature (1)..(284): Pfam Name: Transferase family Pfam Description: Transferase family
  misc_feature (1)..(283): Homolog of NCBI NO: 27475616 NR Description: hydroxycinnamoyl transferase [Nicotiana tabacum]
  misc_feature (1)..(285): Homolog of NCBI NO: 20161743 NR Description: N-hydroxycinnamoyl/benzoyltransferase-like
  misc_feature (1)..(278): Homolog of NCBI NO: 21553692 NR Description: acyltransferase-like protein [Arabidopsis
  misc_feature (1)..(278): Homolog of NCBI NO: 34222064 NR Description: At3g48720 [Arabidopsis thaliana]
  misc_feature (1)..(278): Homolog of NCBI NO: 15229017 NR Description: putative protein; protein id: At3g48720.1
  misc_feature (1)..(278): Homolog of NCBI NO: 15242820 NR Description: acyltransferase-like protein
  misc_feature (1)..(281): Homolog of NCBI NO: 30693725 NR Description: transferase family [Arabidopsis thaliana]
  misc_feature (1)..(281): Homolog of NCBI NO: 30693723 NR Description: transferase family [Arabidopsis thaliana]
  misc_feature (1)..(286): Homolog of NCBI NO: 18408287 NR Description: expressed protein
  misc_feature (1)..(286): Homolog of NCBI NO: 7487802 NR Description: hypothetical protein T8F5.23 - Arabidopsis

SEQ ID NO: 33864 - DNA, 2221 bp, Arabidopsis thaliana; identical to SEQ ID NO: 30144
  misc_feature (1)..(2221): Ceres Seq. ID no. 13490207
  misc_feature: MA Experiment ID: 108434 Result: Down-regulated in Transcription
  misc_feature: MA Experiment 108434 PARAMETER Experiment Name: At_Root_Tips_cDNA_P Parameter: Tissue Value: Root Tips
  misc_feature: MA Experiment ID: 108461 Result: Up-regulated in Transcription
  misc_feature: MA Experiment 108461 PARAMETER Experiment Name: At_Germinating_Seeds_cDNA_P Parameter: Age (day) Value: 1 vs. 0
  misc_feature: MA Experiment 108461 PARAMETER Experiment Name: At_Germinating_Seeds_cDNA_P Parameter: Tissue Value: Germinating Seeds
  misc_feature: MA Experiment ID: 108462 Result: Up-regulated in Transcription
  misc_feature: MA Experiment 108462 PARAMETER Experiment Name: At_Germinating_Seeds_cDNA_P Parameter: Age (day) Value: 2 vs. 0
  misc_feature: MA Experiment 108462 PARAMETER Experiment Name: At_Germinating_Seeds_cDNA_P Parameter: Tissue Value: Germinating Seeds
  misc_feature: MA Experiment ID: 108464 Result: Up-regulated in Transcription
  misc_feature: MA Experiment 108464 PARAMETER Experiment Name: At_Germinating_Seeds_cDNA_P Parameter: Age (day) Value: 4 vs. 0
  misc_feature: MA Experiment 108464 PARAMETER Experiment Name: At_Germinating_Seeds_cDNA_P Parameter: Tissue Value: Germinating Seeds
  misc_feature: MA Experiment ID: 108488 Result: Down-regulated in Transcription
  misc_feature: MA Experiment ID: 108489 Result: Up-regulated in Transcription
  misc_feature: MA Experiment ID: 108501 Result: Down-regulated in Transcription
  misc_feature: MA Experiment 108501 PARAMETER Experiment Name: At_ap2_floral_buds_cDNA_P Parameter: Plant Line Value: ap2 (Ler.)
  misc_feature: MA Experiment 108501 PARAMETER Experiment Name: At_ap2_floral_buds_cDNA_P Parameter: Tissue Value: Closed Flower
  misc_feature: MA Experiment ID: 108561 Result: Up-regulated in Transcription
  misc_feature: MA Experiment 108561 PARAMETER Experiment Name: At_100uM_ABA_cDNA_P Parameter: Timepoint (hr) Value: 6
  misc_feature: MA Experiment 108561 PARAMETER Experiment Name: At_100uM_ABA_cDNA_P Parameter: Tissue Value: Aerial
  misc_feature: MA Experiment 108561 PARAMETER Experiment Name: At_100uM_ABA_cDNA_P Parameter: Treatment Value: 100uM ABA vs. No Treatment
  misc_feature: MA Experiment ID: 108574 Result: Down-regulated in Transcription
  misc_feature: MA Experiment 108574 PARAMETER Experiment Name: At_Wounding__cDNA_P Parameter: Timepoint (hr) Value: 1
  misc_feature: MA Experiment 108574 PARAMETER Experiment Name: At_Wounding__cDNA_P Parameter: Tissue Value: Aerial
  misc_feature: MA Experiment 108574 PARAMETER Experiment Name: At_Wounding__cDNA_P Parameter: Treatment Value: Wounding vs. No Wounding
  misc_feature: MA Experiment ID: 108579 Result: Down-regulated in Transcription
  misc_feature: MA Experiment 108579 PARAMETER Experiment Name: At_4deg_Cold_cDNA_P Parameter: Temperature (deg C) Value: 4 vs. 22
  misc_feature: MA Experiment 108579 PARAMETER Experiment Name: At_4deg_Cold_cDNA_P Parameter: Timepoint (hr) Value: 6
  misc_feature: MA Experiment 108579 PARAMETER Experiment Name: At_4deg_Cold_cDNA_P Parameter: Tissue Value: Aerial
  misc_feature: MA Experiment ID: 108594 Result: Up-regulated in Transcription
  misc_feature: MA Experiment 108594 PARAMETER Experiment Name: At_Ler-rhl_Root_cDNA_P Parameter: Plant Line Value: null
  misc_feature: MA Experiment ID: 108595 Result: Up-regulated in Transcription
  misc_feature: MA Experiment 108595 PARAMETER Experiment Name: At_Ler-pi_Ovule_cDNA_P Parameter: Plant Line Value: null
  misc_feature: MA Experiment ID: 108607 Result: Up-regulated in Transcription
  misc_feature: MA Experiment 108607 PARAMETER Experiment Name: At_100uM_ABA_cDNA_P Parameter: Timepoint (hr) Value: 4
  misc_feature: MA Experiment 108607 PARAMETER Experiment Name: At_100uM_ABA_cDNA_P Parameter: Tissue Value: Aerial
  misc_feature: MA Experiment 108607 PARAMETER Experiment Name: At_100uM_ABA_cDNA_P Parameter: Treatment Value: 100uM ABA vs. No Treatment
  misc_feature: MA Experiment ID: 20000069 Result: Up-regulated in Transcription
  misc_feature: MA Experiment 20000069 PARAMETER Experiment Name: At_100uM_ABA_Mutants_cDNA_P Parameter: Plant Line Value: CS23
  misc_feature: MA Experiment 20000069 PARAMETER Experiment Name: At_100uM_ABA_Mutants_cDNA_P Parameter: Timepoint (hr) Value: 6
  misc_feature: MA Experiment 20000069 PARAMETER Experiment Name: At_100uM_ABA_Mutants_cDNA_P Parameter: Tissue Value: Aerial
  misc_feature: MA Experiment 20000069 PARAMETER Experiment Name: At_100uM_ABA_Mutants_cDNA_P Parameter: Treatment Value: 100uM ABA vs. No Treatment
  misc_feature: MA Experiment ID: 20000070 Result: Up-regulated in Transcription
  misc_feature: MA Experiment 20000070 PARAMETER Experiment Name: At_100uM_ABA_Mutants_cDNA_P Parameter: Plant Line Value: CS24
  misc_feature: MA Experiment 20000070 PARAMETER Experiment Name: At_100uM_ABA_Mutants_cDNA_P Parameter: Timepoint (hr) Value: 6
  misc_feature: MA Experiment 20000070 PARAMETER Experiment Name: At_100uM_ABA_Mutants_cDNA_P Parameter: Tissue Value: Aerial
  misc_feature: MA Experiment 20000070 PARAMETER Experiment Name: At_100uM_ABA_Mutants_cDNA_P Parameter: Treatment Value: 100uM ABA vs. No Treatment
  misc_feature: MA Experiment ID: 20000086 Result: Up-regulated in Transcription
  misc_feature: MA Experiment 20000086 PARAMETER Experiment Name: At_100uM_ABA_Mutants_cDNA_P Parameter: Plant Line Value: CS22
  misc_feature: MA Experiment 20000086 PARAMETER Experiment Name: At_100uM_ABA_Mutants_cDNA_P Parameter: Timepoint (hr) Value: 6
  misc_feature: MA Experiment 20000086 PARAMETER Experiment Name: At_100uM_ABA_Mutants_cDNA_P Parameter: Tissue Value: Aerial
  misc_feature: MA Experiment 20000086 PARAMETER Experiment Name: At_100uM_ABA_Mutants_cDNA_P Parameter: Treatment Value: 100uM ABA vs. No Treatment
  misc_feature: MA Experiment ID: 20000087 Result: Up-regulated in Transcription
  misc_feature: MA Experiment 20000087 PARAMETER Experiment Name: At_100uM_ABA_Mutants_cDNA_P Parameter: Plant Line Value: WS
  misc_feature: MA Experiment 20000087 PARAMETER Experiment Name: At_100uM_ABA_Mutants_cDNA_P Parameter: Timepoint (hr) Value: 6
  misc_feature: MA Experiment 20000087 PARAMETER Experiment Name: At_100uM_ABA_Mutants_cDNA_P Parameter: Tissue Value: Aerial
  misc_feature: MA Experiment 20000087 PARAMETER Experiment Name: At_100uM_ABA_Mutants_cDNA_P Parameter: Treatment Value: 100uM ABA vs. No Treatment
  misc_feature: MA Experiment ID: 20000117 Result: Up-regulated in Transcription
  misc_feature: MA Experiment 20000117 PARAMETER Experiment Name: At_100uM_ABA_Mutants_cDNA_P Parameter: Plant Line Value: Columbia
  misc_feature: MA Experiment 20000117 PARAMETER Experiment Name: At_100uM_ABA_Mutants_cDNA_P Parameter: Timepoint (hr) Value: 6
  misc_feature: MA Experiment 20000117 PARAMETER Experiment Name: At_100uM_ABA_Mutants_cDNA_P Parameter: Tissue Value: Aerial
  misc_feature: MA Experiment 20000117 PARAMETER Experiment Name: At_100uM_ABA_Mutants_cDNA_P Parameter: Treatment Value: 100uM ABA vs. No Treatment
  misc_feature: MA Experiment ID: 20000180 Result: Up-regulated in Transcription
  misc_feature: MA Experiment 20000180 PARAMETER Experiment Name: At_Germinating_Seeds_P Parameter: Age (hr) Value: 24 vs. 0
  misc_feature: MA Experiment 20000180 PARAMETER Experiment Name: At_Germinating_Seeds_P Parameter: Tissue Value: Germinating Seeds
  misc_feature: MA Experiment ID: 20000224 Result: Down-regulated in Transcription
  misc_feature: MA Experiment ID: 20000234 Result: Down-regulated in Transcription
  misc_feature: MA Experiment 20000234 PARAMETER Experiment Name: At_Siliques_P Parameter: Age (day) Value: 21
  misc_feature: MA Experiment 20000234 PARAMETER Experiment Name: At_Siliques_P Parameter: Organism Value: A. thaliana
  misc_feature: MA Experiment 20000234 PARAMETER Experiment Name: At_Siliques_P Parameter: Plant Line Value: WS
  misc_feature: MA Experiment 20000234 PARAMETER Experiment Name: At_Siliques_P Parameter: Tissue Value: Less Than 5mm Siliques vs. Whole Plant
  misc_feature: MA Experiment ID: 20000264 Result: Down-regulated in Transcription
  misc_feature: MA Experiment 20000264 PARAMETER Experiment Name: At_Open_Flower_P Parameter: Age (day) Value: 21
  misc_feature: MA Experiment 20000264 PARAMETER Experiment Name: At_Open_Flower_P Parameter: Plant Line Value: WS
  misc_feature: MA Experiment 20000264 PARAMETER Experiment Name: At_Open_Flower_P Parameter: Tissue Value: Open Flower vs. Whole Plant
  misc_feature: MA Experiment ID: 20000265 Result: Down-regulated in Transcription
  misc_feature: MA Experiment 20000265 PARAMETER Experiment Name: At_Open_Flower_P Parameter: Age (day) Value: 21
  misc_feature: MA Experiment 20000265 PARAMETER Experiment Name: At_Open_Flower_P Parameter: Plant Line Value: WS
  misc_feature: MA Experiment 20000265 PARAMETER Experiment Name: At_Open_Flower_P Parameter: Tissue Value: Closed Flower vs. Whole Plant
  misc_feature: MA Experiment ID: 20000268 Result: Down-regulated in Transcription
  misc_feature: MA Experiment 20000268 PARAMETER Experiment Name: At_100mM_NaCl__P Parameter: Age (day) Value: 14
  misc_feature: MA Experiment 20000268 PARAMETER Experiment Name: At_100mM_NaCl__P Parameter: Organism Value: A. thaliana
  misc_feature: MA Experiment 20000268 PARAMETER Experiment Name: At_100mM_NaCl__P Parameter: Plant Line Value: WS
  misc_feature: MA Experiment 20000268 PARAMETER Experiment Name: At_100mM_NaCl__P Parameter: Timepoint (hr) Value: 6
  misc_feature: MA Experiment 20000268 PARAMETER Experiment Name: At_100mM_NaCl__P Parameter: Tissue Value: Whole Plant
  misc_feature: MA Experiment 20000268 PARAMETER Experiment Name: At_100mM_NaCl__P Parameter: Treatment Value: 100mM NaCl vs. No Treatment
  misc_feature: MA Experiment ID: 20000286 Result: Down-regulated in Transcription
  misc_feature: MA Experiment 20000286 PARAMETER Experiment Name: At_Open_Flower_P Parameter: Age (day) Value: 21
  misc_feature: MA Experiment 20000286 PARAMETER Experiment Name: At_Open_Flower_P Parameter: Plant Line Value: WS
  misc_feature: MA Experiment 20000286 PARAMETER Experiment Name: At_Open_Flower_P Parameter: Tissue Value: Half Open vs. Whole Plant
  misc_feature: MA Experiment ID: 20000308 Result: Down-regulated in Transcription
  misc_feature: MA Experiment 20000308 PARAMETER Experiment Name: At_100mM_NaCl__P Parameter: Age (day) Value: 17
  misc_feature: MA Experiment 20000308 PARAMETER Experiment Name: At_100mM_NaCl__P Parameter: Organism Value: A. thaliana
  misc_feature: MA Experiment 20000308 PARAMETER Experiment Name: At_100mM_NaCl__P Parameter: Plant Line Value: WS
  misc_feature: MA Experiment 20000308 PARAMETER Experiment Name: At_100mM_NaCl__P Parameter: Timepoint (hr) Value: 72
  misc_feature: MA Experiment 20000308 PARAMETER Experiment Name: At_100mM_NaCl__P Parameter: Tissue Value: Whole Plant
  misc_feature: MA Experiment 20000308 PARAMETER Experiment Name: At_100mM_NaCl__P Parameter: Treatment Value: 100mM NaCl vs. No Treatment
  misc_feature: MA Experiment ID: 20000438 Result: Down-regulated in Transcription
  misc_feature: MA Experiment 20000438 PARAMETER Experiment Name: At_Shoots__P Parameter: Age (day) Value: 14
  misc_feature: MA Experiment 20000438 PARAMETER Experiment Name: At_Shoots__P Parameter: Tissue Value: Shoots vs. Whole Plant
  misc_feature: MA Experiment ID: 20000439 Result: Down-regulated in Transcription
  misc_feature: MA Experiment 20000439 PARAMETER Experiment Name: At_Roots__P Parameter: Age (day) Value: 14 vs. 21
  misc_feature: MA Experiment 20000439 PARAMETER Experiment Name: At_Roots__P Parameter: Organism Value: A. thaliana
  misc_feature: MA Experiment 20000439 PARAMETER Experiment Name: At_Roots__P Parameter: Tissue Value: Roots vs. Whole Plant
  misc_feature: MA Experiment ID: 20000441 Result: Up-regulated in Transcription
  misc_feature: MA Experiment 20000441 PARAMETER Experiment Name: At_1uM_BR-BRZ__P Parameter: Tissue Value: Shoot Apices
  misc_feature: MA Experiment 20000441 PARAMETER Experiment Name: At_1uM_BR-BRZ__P Parameter: Treatment Value: 1uM BR vs. No Treatment
  misc_feature: MA Experiment ID: 20000443 Result: Up-regulated in Transcription
  misc_feature: MA Experiment 20000443 PARAMETER Experiment Name: At_1uM_BR-BRZ__P Parameter: Tissue Value: Shoot Apices
  misc_feature: MA Experiment 20000443 PARAMETER Experiment Name: At_1uM_BR-BRZ__P Parameter: Treatment Value: 1uM BRZ vs. No Treatment
  misc_feature: MA Experiment ID: 20000575 Result: Down-regulated in Transcription
  misc_feature: MA Experiment 20000575 PARAMETER Experiment Name: At_100uM_ABA_Mutants__P Parameter: Organism Value: A. thaliana
  misc_feature: MA Experiment 20000575 PARAMETER Experiment Name: At_100uM_ABA_Mutants__P Parameter: Plant Line Value: CS22
  misc_feature: MA Experiment 20000575 PARAMETER Experiment Name: At_100uM_ABA_Mutants__P Parameter: Timepoint (hr) Value: 6
  misc_feature: MA Experiment 20000575 PARAMETER Experiment Name: At_100uM_ABA_Mutants__P Parameter: Tissue Value: Whole Plant
  misc_feature: MA Experiment 20000575 PARAMETER Experiment Name: At_100uM_ABA_Mutants__P Parameter: Treatment Value: 1uM ABA vs. No Treatment
  misc_feature: MA Experiment ID: 20000578 Result: Up-regulated in Transcription
  misc_feature: MA Experiment 20000578 PARAMETER Experiment Name: At_CS3726__P Parameter: Organism Value: A. thaliana
  misc_feature: MA Experiment 20000578 PARAMETER Experiment Name: At_CS3726__P Parameter: Plant Line Value: CS3726
  misc_feature: MA Experiment 20000578 PARAMETER Experiment Name: At_CS3726__P Parameter: Tissue Value: Whole Plant
  misc_feature: MA Experiment ID: 20001450 Result: Up-regulated in Transcription
  misc_feature: MA Experiment 20001450 PARAMETER Experiment Name: At_Far-red-induction_P Parameter: Age (day) Value: 7
  misc_feature: MA Experiment 20001450 PARAMETER Experiment Name: At_Far-red-induction_P Parameter: Light Value: Far-red vs. White
  misc_feature: MA Experiment 20001450 PARAMETER Experiment Name: At_Far-red-induction_P Parameter: Organism Value: A. thaliana
  misc_feature: MA Experiment 20001450 PARAMETER Experiment Name: At_Far-red-induction_P Parameter: Plant Line Value: Columbia
  misc_feature: MA Experiment 20001450 PARAMETER Experiment Name: At_Far-red-induction_P Parameter: Timepoint (hr) Value: 8
  misc_feature: MA Experiment 20001450 PARAMETER Experiment Name: At_Far-red-induction_P Parameter: Tissue Value: Whole Plant
  misc_feature: MA Experiment ID: 20001451 Result: Up-regulated in Transcription
  misc_feature: MA Experiment 20001451 PARAMETER Experiment Name: At_Far-red-induction_P Parameter: Age (day) Value: 7
  misc_feature: MA Experiment 20001451 PARAMETER Experiment Name: At_Far-red-induction_P Parameter: Light Value: Far-red vs. White
  misc_feature: MA Experiment 20001451 PARAMETER Experiment Name: At_Far-red-induction_P Parameter: Organism Value: A. thaliana
  misc_feature: MA Experiment 20001451 PARAMETER Experiment Name: At_Far-red-induction_P Parameter: Plant Line Value: Columbia
  misc_feature: MA Experiment 20001451 PARAMETER Experiment Name: At_Far-red-induction_P Parameter: Timepoint (hr) Value: 24
  misc_feature: MA Experiment 20001451 PARAMETER Experiment Name: At_Far-red-induction_P Parameter: Tissue Value: Whole Plant
  misc_feature: MA Experiment ID: 20001905 Result: Up-regulated in Transcription
  misc_feature: MA Experiment 20001905 PARAMETER Experiment Name: At_Drought_Reproduction_P Parameter: Age (day) Value: 40
  misc_feature: MA Experiment 20001905 PARAMETER Experiment Name: At_Drought_Reproduction_P Parameter: Organism Value: A. thaliana
  misc_feature: MA Experiment 20001905 PARAMETER Experiment Name: At_Drought_Reproduction_P Parameter: Plant Line Value: WS
  misc_feature: MA Experiment 20001905 PARAMETER Experiment Name: At_Drought_Reproduction_P Parameter: Timepoint (day) Value: 10
  misc_feature: MA Experiment 20001905 PARAMETER Experiment Name: At_Drought_Reproduction_P Parameter: Tissue Value: Rosettes
  misc_feature: MA Experiment 20001905 PARAMETER Experiment Name: At_Drought_Reproduction_P Parameter: Treatment Value: Drought vs. No Drought
  misc_feature: Phenotype: FERTILITY Fertility-Reduced
  misc_feature: Phenotype: ROSETTE LEAVES Other
  misc_feature: Phenotype: FERTILITY Fertility-Reduced
  misc_feature: Phenotype: FERTILITY Fertility-Reduced
  misc_feature: Phenotype: FERTILITY Fertility-Reduced

SEQ ID NO: 33865 - protein, 327 aa, Arabidopsis thaliana; identical to SEQ ID NO: 30145
  peptide (1)..(327): Ceres Seq. ID no. 15218812
  misc_feature (112)..(281): Homolog of NCBI NO: 32415413 NR Description: related to multifunctional cyclin-dependent
  misc_feature (1)..(95): Homolog of NCBI NO: 7445886 NR Description: PHO85-like protein - fission yeast
  misc_feature (98)..(272): Homolog of NCBI NO: 7445886 NR Description: PHO85-like protein - fission yeast
  misc_feature (1)..(139): Homolog of NCBI NO: 21740744 NR Description: OSJNBa0072K14.9 [Oryza sativa (japonica
  misc_feature (153)..(326): Homolog of NCBI NO: 21740744 NR Description: OSJNBa0072K14.9 [Oryza sativa (japonica
  misc_feature (1)..(284): Homolog of NCBI NO: 34146826 NR Description: At5g43300 [Arabidopsis thaliana]
  misc_feature (1)..(326): Homolog of NCBI NO: 38175529 NR Description: PHO85-like protein [Oryza sativa (japonica
  misc_feature (1)..(327): Homolog of NCBI NO: 28058728 NR Description: expressed protein [Arabidopsis thaliana]
  misc_feature (1)..(327): Homolog of NCBI NO: 18396047 NR Description: expressed protein [Arabidopsis thaliana]
  misc_feature (1)..(327): Homolog of NCBI NO: 15237552 NR Description: expressed protein [Arabidopsis thaliana]
  misc_feature (112)..(281): Homolog of NCBI NO: 32415413 NR Description: related to multifunctional cyclin-dependent
  misc_feature (1)..(95): Homolog of NCBI NO: 7445886 NR Description: PHO85-like protein - fission yeast
  misc_feature (98)..(272): Homolog of NCBI NO: 7445886 NR Description: PHO85-like protein - fission yeast
  misc_feature (1)..(139): Homolog of NCBI NO: 21740744 NR Description: OSJNBa0072K14.9 [Oryza sativa (japonica
  misc_feature (153)..(326): Homolog of NCBI NO: 21740744 NR Description: OSJNBa0072K14.9 [Oryza sativa (japonica
  misc_feature (1)..(284): Homolog of NCBI NO: 34146826 NR Description: At5g43300 [Arabidopsis thaliana]
  misc_feature (1)..(326): Homolog of NCBI NO: 38175529 NR Description: PHO85-like protein [Oryza sativa (japonica
  misc_feature (1)..(327): Homolog of NCBI NO: 28058728 NR Description: expressed protein [Arabidopsis thaliana]
  misc_feature (1)..(327): Homolog of NCBI NO: 18396047 NR Description: expressed protein [Arabidopsis thaliana]
  misc_feature (1)..(327): Homolog of NCBI NO: 15237552 NR Description: expressed protein [Arabidopsis thaliana]

SEQ ID NO: 33866 - protein, 237 aa, Arabidopsis thaliana; identical to SEQ ID NO: 30146
  peptide (1)..(237): Ceres Seq. ID no. 15218813
  misc_feature (8)..(182): Homolog of NCBI NO: 19115043 NR Description: contains glycerophosphoryl diester
  misc_feature (22)..(191): Homolog of NCBI NO: 32415413 NR Description: related to multifunctional cyclin-dependent
  misc_feature (8)..(182): Homolog of NCBI NO: 7445886 NR Description: PHO85-like protein - fission yeast
  misc_feature (1)..(49): Homolog of NCBI NO: 21740744 NR Description: OSJNBa0072K14.9 [Oryza sativa (japonica
  misc_feature (63)..(236): Homolog of NCBI NO: 21740744 NR Description: OSJNBa0072K14.9 [Oryza sativa (japonica
  misc_feature (1)..(194): Homolog of NCBI NO: 34146826 NR Description: At5g43300 [Arabidopsis thaliana]
  misc_feature (1)..(236): Homolog of NCBI NO: 38175529 NR Description: PHO85-like protein [Oryza sativa (japonica
  misc_feature (1)..(237): Homolog of NCBI NO: 28058728 NR Description: expressed protein [Arabidopsis thaliana]
  misc_feature (1)..(237): Homolog of NCBI NO: 18396047 NR Description: expressed protein [Arabidopsis thaliana]
  misc_feature (1)..(237): Homolog of NCBI NO: 15237552 NR Description: expressed protein [Arabidopsis thaliana]
  misc_feature (8)..(182): Homolog of NCBI NO: 19115043 NR Description: contains glycerophosphoryl diester
  misc_feature (22)..(191): Homolog of NCBI NO: 32415413 NR Description: related to multifunctional cyclin-dependent
  misc_feature (8)..(182): Homolog of NCBI NO: 7445886 NR Description: PHO85-like protein - fission yeast
  misc_feature (1)..(49): Homolog of NCBI NO: 21740744 NR Description: OSJNBa0072K14.9 [Oryza sativa (japonica
  misc_feature (63)..(236): Homolog of NCBI NO: 21740744 NR Description: OSJNBa0072K14.9 [Oryza sativa (japonica
  misc_feature (1)..(194): Homolog of NCBI NO: 34146826 NR Description: At5g43300 [Arabidopsis thaliana]
  misc_feature (1)..(236): Homolog of NCBI NO: 38175529 NR Description: PHO85-like protein [Oryza sativa (japonica
  misc_feature (1)..(237): Homolog of NCBI NO: 28058728 NR Description: expressed protein [Arabidopsis thaliana]
  misc_feature (1)..(237): Homolog of NCBI NO: 18396047 NR Description: expressed protein [Arabidopsis thaliana]
  misc_feature (1)..(237): Homolog of NCBI NO: 15237552 NR Description: expressed protein [Arabidopsis thaliana]

SEQ ID NO: 33867 - DNA, 1766 bp, Arabidopsis thaliana; identical to SEQ ID NO: 30277
  misc_feature (1)..(1766): Ceres Seq. ID no. 12348549
  misc_feature: MA Experiment ID: 108461 Result: Up-regulated in Transcription
  misc_feature: MA Experiment 108461 PARAMETER Experiment Name: At_Germinating_Seeds_cDNA_P Parameter: Age (day) Value: 1 vs. 0
  misc_feature: MA Experiment 108461 PARAMETER Experiment Name: At_Germinating_Seeds_cDNA_P Parameter: Tissue Value: Germinating Seeds
  misc_feature: MA Experiment ID: 108462 Result: Up-regulated in Transcription
  misc_feature: MA Experiment 108462 PARAMETER Experiment Name: At_Germinating_Seeds_cDNA_P Parameter: Age (day) Value: 2 vs. 0
  misc_feature: MA Experiment 108462 PARAMETER Experiment Name: At_Germinating_Seeds_cDNA_P Parameter: Tissue Value: Germinating Seeds
  misc_feature: MA Experiment ID: 108569 Result: Up-regulated in Transcription
  misc_feature: MA Experiment 108569 PARAMETER Experiment Name: At_0.001%_MeJA__cDNA_P Parameter: Timepoint (hr) Value: 6
  misc_feature: MA Experiment 108569 PARAMETER Experiment Name: At_0.001%_MeJA__cDNA_P Parameter: Tissue Value: Aerial
  misc_feature: MA Experiment 108569 PARAMETER Experiment Name: At_0.001%_MeJA__cDNA_P Parameter: Treatment Value: 0.001% MeJA vs. No Treatment
  misc_feature: MA Experiment ID: 108573 Result: Up-regulated in Transcription
  misc_feature: MA Experiment 108573 PARAMETER Experiment Name: At_Drought_cDNA_P Parameter: Timepoint (hr) Value: 6
  misc_feature: MA Experiment 108573 PARAMETER Experiment Name: At_Drought_cDNA_P Parameter: Tissue Value: Aerial
  misc_feature: MA Experiment 108573 PARAMETER Experiment Name: At_Drought_cDNA_P Parameter: Treatment Value: Drought vs. No Drought
  misc_feature: MA Experiment ID: 108576 Result: Down-regulated in Transcription
  misc_feature: MA Experiment 108576 PARAMETER Experiment Name: At_42deg_Heat_cDNA_P Parameter: Temperature (deg C) Value: 42 vs. 22
  misc_feature: MA Experiment 108576 PARAMETER Experiment Name: At_42deg_Heat_cDNA_P Parameter: Timepoint (hr) Value: 1
  misc_feature: MA Experiment 108576 PARAMETER Experiment Name: At_42deg_Heat_cDNA_P Parameter: Tissue Value: Aerial
  misc_feature: MA Experiment ID: 108577 Result: Down-regulated in Transcription
  misc_feature: MA Experiment 108577 PARAMETER Experiment Name: At_42deg_Heat_cDNA_P Parameter: Temperature (deg C) Value: 42 vs. 22
  misc_feature: MA Experiment 108577 PARAMETER Experiment Name: At_42deg_Heat_cDNA_P Parameter: Timepoint (hr) Value: 6
  misc_feature: MA Experiment 108577 PARAMETER Experiment Name: At_42deg_Heat_cDNA_P Parameter: Tissue Value: Aerial
  misc_feature: MA Experiment ID: 108595 Result: Down-regulated in Transcription
  misc_feature: MA Experiment 108595 PARAMETER Experiment Name: At_Ler-pi_Ovule_cDNA_P Parameter: Plant Line Value: null
  misc_feature: MA Experiment ID: 20000087 Result: Down-regulated in Transcription
  misc_feature: MA Experiment 20000087 PARAMETER Experiment Name: At_100uM_ABA_Mutants_cDNA_P Parameter: Plant Line Value: WS
  misc_feature: MA Experiment 20000087 PARAMETER Experiment Name: At_100uM_ABA_Mutants_cDNA_P Parameter: Timepoint (hr) Value: 6
  misc_feature: MA Experiment 20000087 PARAMETER Experiment Name: At_100uM_ABA_Mutants_cDNA_P Parameter: Tissue Value: Aerial
  misc_feature: MA Experiment 20000087 PARAMETER Experiment Name: At_100uM_ABA_Mutants_cDNA_P Parameter: Treatment Value: 100uM ABA vs. No Treatment
  misc_feature: MA Experiment ID: 20000112 Result: Down-regulated in Transcription
  misc_feature: MA Experiment 20000112 PARAMETER Experiment Name: At_42deg_Heat_cDNA_P Parameter: Temperature (deg C) Value: 42 vs. 22
  misc_feature: MA Experiment 20000112 PARAMETER Experiment Name: At_42deg_Heat_cDNA_P Parameter: Timepoint (hr) Value: 2
  misc_feature: MA Experiment 20000112 PARAMETER Experiment Name: At_42deg_Heat_cDNA_P Parameter: Tissue Value: Aerial
  misc_feature: MA Experiment ID: 20000144 Result: Down-regulated in Transcription
  misc_feature: MA Experiment 20000144 PARAMETER Experiment Name: At_42deg_Heat_cDNA_P Parameter: Temperature (deg C) Value: 42 vs. 22
  misc_feature: MA Experiment 20000144 PARAMETER Experiment Name: At_42deg_Heat_cDNA_P Parameter: Timepoint (hr) Value: 1
  misc_feature: MA Experiment 20000144 PARAMETER Experiment Name: At_42deg_Heat_cDNA_P Parameter: Tissue Value: Aerial
  misc_feature: MA Experiment ID: 20000180 Result: Up-regulated in Transcription
  misc_feature: MA Experiment 20000180 PARAMETER Experiment Name: At_Germinating_Seeds_P Parameter: Age (hr) Value: 24 vs. 0
  misc_feature: MA Experiment 20000180 PARAMETER Experiment Name: At_Germinating_Seeds_P Parameter: Tissue Value: Germinating Seeds
  misc_feature: MA Experiment ID: 20001908 Result: Down-regulated in Transcription
  misc_feature: MA Experiment 20001908 PARAMETER Experiment Name: At_Drought_Reproduction_P Parameter: Age (day) Value: 40
  misc_feature: MA Experiment 20001908 PARAMETER Experiment Name: At_Drought_Reproduction_P Parameter: Organism Value: A. thaliana
  misc_feature: MA Experiment 20001908 PARAMETER Experiment Name: At_Drought_Reproduction_P Parameter: Plant Line Value: WS
  misc_feature: MA Experiment 20001908 PARAMETER Experiment Name: At_Drought_Reproduction_P Parameter: Timepoint (day) Value: 10
  misc_feature: MA Experiment 20001908 PARAMETER Experiment Name: At_Drought_Reproduction_P Parameter: Tissue Value: Siliques
  misc_feature: MA Experiment 20001908 PARAMETER Experiment Name: At_Drought_Reproduction_P Parameter: Treatment Value: Drought vs. No Drought
  misc_feature: MA Experiment ID: 20001911 Result: Down-regulated in Transcription
  misc_feature: MA Experiment 20001911 PARAMETER Experiment Name: At_Drought_Reproduction_P Parameter: Age (day) Value: 40
  misc_feature: MA Experiment 20001911 PARAMETER Experiment Name: At_Drought_Reproduction_P Parameter: Organism Value: A. thaliana
  misc_feature: MA Experiment 20001911 PARAMETER Experiment Name: At_Drought_Reproduction_P Parameter: Plant Line Value: WS
  misc_feature: MA Experiment 20001911 PARAMETER Experiment Name: At_Drought_Reproduction_P Parameter: Timepoint (day) Value: 10
  misc_feature: MA Experiment 20001911 PARAMETER Experiment Name: At_Drought_Reproduction_P Parameter: Tissue Value: Flowers
  misc_feature: MA Experiment 20001911 PARAMETER Experiment Name: At_Drought_Reproduction_P Parameter: Treatment Value: Drought vs. No Drought

SEQ ID NO: 33868 - protein, 456 aa, Arabidopsis thaliana; identical to SEQ ID NO: 30278
  peptide (1)..(456): Ceres Seq. ID no. 12348550
  misc_feature (14)..(450): Homolog of NCBI NO: 30685446 NR Description: phytochelatin synthetase -related [Arabidopsis
  misc_feature (19)..(452): Homolog of NCBI NO: 30090032 NR Description: phytochelatin synthetase [Triticum monococcum]
  misc_feature (29)..(452): Homolog of NCBI NO: 30090026 NR Description: phytochelatin synthetase-like protein 2 [Sorghum
  misc_feature (11)..(450): Homolog of NCBI NO: 18406342 NR Description: phytochelatin synthetase-like protein
  misc_feature (1)..(450): Homolog of NCBI NO: 21618129 NR Description: phytochelatin synthetase-like protein
  misc_feature (11)..(450): Homolog of NCBI NO: 13477083 NR Description: phytochelatin synthetase-like protein
  misc_feature (1)..(451): Homolog of NCBI NO: 15232863 NR Description: unknown protein; protein id: At3g02210.1
  misc_feature (95)..(456): Homolog of NCBI NO: 25456127 NR Description: probable phytochelatin synthetase
  misc_feature (1)..(456): Homolog of NCBI NO: 21553837 NR Description: phytochelatin synthetase-like protein
  misc_feature (1)..(456): Homolog of NCBI NO: 18424412 NR Description: phytochelatin synthetase - like protein

SEQ ID NO: 33869 - protein, 409 aa, Arabidopsis thaliana; identical to SEQ ID NO: 30279
  peptide (1)..(409): Ceres Seq. ID no. 12348551
  misc_feature (1)..(403): Homolog of NCBI NO: 30685446 NR Description: phytochelatin synthetase -related [Arabidopsis
  misc_feature (1)..(405): Homolog of NCBI NO: 30090032 NR Description: phytochelatin synthetase [Triticum monococcum]
  misc_feature (1)..(405): Homolog of NCBI NO: 30090026 NR Description: phytochelatin synthetase-like protein 2 [Sorghum
  misc_feature (1)..(403): Homolog of NCBI NO: 18406342 NR Description: phytochelatin synthetase-like protein
  misc_feature (1)..(403): Homolog of NCBI NO: 21618129 NR Description: phytochelatin synthetase-like protein
  misc_feature (1)..(403): Homolog of NCBI NO: 13477083 NR Description: phytochelatin synthetase-like protein
  misc_feature (1)..(404): Homolog of NCBI NO: 15232863 NR Description: unknown protein; protein id: At3g02210.1
  misc_feature (48)..(409): Homolog of NCBI NO: 25456127 NR Description: probable phytochelatin synthetase
  misc_feature (1)..(409): Homolog of NCBI NO: 21553837 NR Description: phytochelatin synthetase-like protein
  misc_feature (1)..(409): Homolog of NCBI NO: 18424412 NR Description: phytochelatin synthetase - like protein

SEQ ID NO: 33870 - protein, 404 aa, Arabidopsis thaliana; identical to SEQ ID NO: 30280
  peptide (1)..(404): Ceres Seq. ID no. 12348552
  misc_feature (1)..(398): Homolog of NCBI NO: 30685446 NR Description: phytochelatin synthetase -related [Arabidopsis
  misc_feature (1)..(400): Homolog of NCBI NO: 30090032 NR Description: phytochelatin synthetase [Triticum monococcum]
  misc_feature (1)..(400): Homolog of NCBI NO: 30090026 NR Description: phytochelatin synthetase-like protein 2 [Sorghum
  misc_feature (1)..(398): Homolog of NCBI NO: 18406342 NR Description: phytochelatin synthetase-like protein
  misc_feature (1)..(398): Homolog of NCBI NO: 21618129 NR Description: phytochelatin synthetase-like protein
  misc_feature (1)..(398): Homolog of NCBI NO: 13477083 NR Description: phytochelatin synthetase-like protein
  misc_feature (1)..(399): Homolog of NCBI NO: 15232863 NR Description: unknown protein; protein id: At3g02210.1
  misc_feature (43)..(404): Homolog of NCBI NO: 25456127 NR Description: probable phytochelatin synthetase
  misc_feature (1)..(404): Homolog of NCBI NO: 21553837 NR Description: phytochelatin synthetase-like protein
  misc_feature (1)..(404): Homolog of NCBI NO: 18424412 NR Description: phytochelatin synthetase - like protein

SEQ ID NO: 33871 - DNA, 1015 bp, Arabidopsis thaliana; identical to SEQ ID NO: 30281
  misc_feature (1)..(1015): Ceres Seq. ID no. 12481977
  misc_feature: MA Experiment ID: 108462 Result: Down-regulated in Transcription
  misc_feature: MA Experiment 108462 PARAMETER Experiment Name: At_Germinating_Seeds_cDNA_P Parameter: Age (day) Value: 2 vs. 0
  misc_feature: MA Experiment 108462 PARAMETER Experiment Name: At_Germinating_Seeds_cDNA_P Parameter: Tissue Value: Germinating Seeds
  misc_feature: MA Experiment ID: 108463 Result: Down-regulated in Transcription
  misc_feature: MA Experiment 108463 PARAMETER Experiment Name: At_Germinating_Seeds_cDNA_P Parameter: Age (day) Value: 3 vs. 0
  misc_feature: MA Experiment 108463 PARAMETER Experiment Name: At_Germinating_Seeds_cDNA_P Parameter: Tissue Value: Germinating Seeds
  misc_feature: MA Experiment ID: 108464 Result: Down-regulated in Transcription
  misc_feature: MA Experiment 108464 PARAMETER Experiment Name: At_Germinating_Seeds_cDNA_P Parameter: Age (day) Value: 4 vs. 0
  misc_feature: MA Experiment 108464 PARAMETER Experiment Name: At_Germinating_Seeds_cDNA_P Parameter: Tissue Value: Germinating Seeds
  misc_feature: MA Experiment ID: 108488 Result: Down-regulated in Transcription
  misc_feature: MA Experiment ID: 108573 Result: Up-regulated in Transcription
  misc_feature: MA Experiment 108573 PARAMETER Experiment Name: At_Drought_cDNA_P Parameter: Timepoint (hr) Value: 6
  misc_feature: MA Experiment 108573 PARAMETER Experiment Name: At_Drought_cDNA_P Parameter: Tissue Value: Aerial
  misc_feature: MA Experiment 108573 PARAMETER Experiment Name: At_Drought_cDNA_P Parameter: Treatment Value: Drought vs. No Drought
  misc_feature: MA Experiment ID: 108579 Result: Down-regulated in Transcription
  misc_feature: MA Experiment 108579 PARAMETER Experiment Name: At_4deg_Cold_cDNA_P Parameter: Temperature (deg C) Value: 4 vs. 22
  misc_feature: MA Experiment 108579 PARAMETER Experiment Name: At_4deg_Cold_cDNA_P Parameter: Timepoint (hr) Value: 6
  misc_feature: MA Experiment 108579 PARAMETER Experiment Name: At_4deg_Cold_cDNA_P Parameter: Tissue Value: Aerial
  misc_feature: MA Experiment ID: 20000224 Result: Down-regulated in Transcription
  misc_feature: MA Experiment ID: 20000794 Result: Up-regulated in Transcription
  misc_feature: MA Experiment 20000794 PARAMETER Experiment Name: At_Petals_P Parameter: Age (day) Value: 23-25 days
  misc_feature: MA Experiment 20000794 PARAMETER Experiment Name: At_Petals_P Parameter: Plant Line Value: WS
  misc_feature: MA Experiment 20000794 PARAMETER Experiment Name: At_Petals_P Parameter: Tissue Value: Petals vs. Whole plant

SEQ ID NO: 33872 - protein, 231 aa, Arabidopsis thaliana; identical to SEQ ID NO: 23905
  peptide (1)..(231): Ceres Seq. ID no. 12481978
  misc_feature (11)..(222): Pfam Name: Peroxisomal biogenesis factor 11 (PEX11) Pfam Description: Peroxisomal biogenesis factor 11 (PEX11)
  misc_feature (131)..(231): Homolog of NCBI NO: 14335058 NR Description: At2g45740/F4I18.28 [Arabidopsis thaliana]
  misc_feature (1)..(227): Homolog of NCBI NO: 34898026 NR Description: ESTs AU064537(E31904),AU082147(E31904) correspond a region of the predicted gene.~Similar to Arabidopsis thaliana
  misc_feature (1)..(229): Homolog of NCBI NO: 25553559 NR Description: OSJNBa0038F22.7 [Oryza sativa (japonica
  misc_feature (1)..(229): Homolog of NCBI NO: 8489788 NR Description: unknown [Lycopersicon esculentum]
  misc_feature (2)..(221): Homolog of NCBI NO: 7486466 NR Description: hypothetical protein At2g45740 [imported] -
  misc_feature (1)..(229): Homolog of NCBI NO: 18378887 NR Description: expressed protein
  misc_feature (2)..(231): Homolog of NCBI NO: 18406877 NR Description: expressed protein
  misc_feature (1)..(231): Homolog of NCBI NO: 11358250 NR Description: hypothetical protein T27I15_160 - Arabidopsis
  misc_feature (1)..(231): Homolog of NCBI NO: 30695340 NR Description: expressed protein [Arabidopsis thaliana]

SEQ ID NO: 33873 - DNA, 1941 bp, Arabidopsis thaliana; identical to SEQ ID NO: 30283
  misc_feature (1)..(1941): Ceres Seq. ID no. 13490571
  misc_feature: MA Experiment ID: 108434 Result: Down-regulated in Transcription
  misc_feature: MA Experiment 108434 PARAMETER Experiment Name: At_Root_Tips_cDNA_P Parameter: Tissue Value: Root Tips
  misc_feature: MA Experiment ID: 108572 Result: Up-regulated in Transcription
  misc_feature: MA Experiment 108572 PARAMETER Experiment Name: At_Drought_cDNA_P Parameter: Timepoint (hr) Value: 1
  misc_feature: MA Experiment 108572 PARAMETER Experiment Name: At_Drought_cDNA_P Parameter: Tissue Value: Aerial
  misc_feature: MA Experiment 108572 PARAMETER Experiment Name: At_Drought_cDNA_P Parameter: Treatment Value: Drought vs. No Drought
  misc_feature: MA Experiment ID: 108574 Result: Up-regulated in Transcription
  misc_feature: MA Experiment 108574 PARAMETER Experiment Name: At_Wounding__cDNA_P Parameter: Timepoint (hr) Value: 1
  misc_feature: MA Experiment 108574 PARAMETER Experiment Name: At_Wounding__cDNA_P Parameter: Tissue Value: Aerial
  misc_feature: MA Experiment 108574 PARAMETER Experiment Name: At_Wounding__cDNA_P Parameter: Treatment Value: Wounding vs. No Wounding
  misc_feature: MA Experiment ID: 108577 Result: Down-regulated in Transcription
  misc_feature: MA Experiment 108577 PARAMETER Experiment Name: At_42deg_Heat_cDNA_P Parameter: Temperature (deg C) Value: 42 vs. 22
  misc_feature: MA Experiment 108577 PARAMETER Experiment Name: At_42deg_Heat_cDNA_P Parameter: Timepoint (hr) Value: 6
  misc_feature: MA Experiment 108577 PARAMETER Experiment Name: At_42deg_Heat_cDNA_P Parameter: Tissue Value: Aerial
  misc_feature: MA Experiment ID: 108595 Result: Up-regulated in Transcription
  misc_feature: MA Experiment 108595 PARAMETER Experiment Name: At_Ler-pi_Ovule_cDNA_P Parameter: Plant Line Value: null
  misc_feature: MA Experiment ID: 108607 Result: Up-regulated in Transcription
  misc_feature: MA Experiment 108607 PARAMETER Experiment Name: At_100uM_ABA_cDNA_P Parameter: Timepoint (hr) Value: 4
  misc_feature: MA Experiment 108607 PARAMETER Experiment Name: At_100uM_ABA_cDNA_P Parameter: Tissue Value: Aerial
  misc_feature: MA Experiment 108607 PARAMETER Experiment Name: At_100uM_ABA_cDNA_P Parameter: Treatment Value: 100uM ABA vs. No Treatment
  misc_feature: MA Experiment ID: 20000068 Result: Up-regulated in Transcription
  misc_feature: MA Experiment ID: 20000069 Result: Up-regulated in Transcription
  misc_feature: MA Experiment 20000069 PARAMETER Experiment Name: At_100uM_ABA_Mutants_cDNA_P Parameter: Plant Line Value: CS23
  misc_feature: MA Experiment 20000069 PARAMETER Experiment Name: At_100uM_ABA_Mutants_cDNA_P Parameter: Timepoint (hr) Value: 6
  misc_feature: MA Experiment 20000069 PARAMETER Experiment Name: At_100uM_ABA_Mutants_cDNA_P Parameter: Tissue Value: Aerial
  misc_feature: MA Experiment 20000069 PARAMETER Experiment Name: At_100uM_ABA_Mutants_cDNA_P Parameter: Treatment Value: 100uM ABA vs. No Treatment
  misc_feature: MA Experiment ID: 20000070 Result: Up-regulated in Transcription
  misc_feature: MA Experiment 20000070 PARAMETER Experiment Name: At_100uM_ABA_Mutants_cDNA_P Parameter: Plant Line Value: CS24
  misc_feature: MA Experiment 20000070 PARAMETER Experiment Name: At_100uM_ABA_Mutants_cDNA_P Parameter: Timepoint (hr) Value: 6
  misc_feature: MA Experiment 20000070 PARAMETER Experiment Name: At_100uM_ABA_Mutants_cDNA_P Parameter: Tissue Value: Aerial
  misc_feature: MA Experiment 20000070 PARAMETER Experiment Name: At_100uM_ABA_Mutants_cDNA_P Parameter: Treatment Value: 100uM ABA vs. No Treatment
  misc_feature: MA Experiment ID: 20000071 Result: Up-regulated in Transcription
  misc_feature: MA Experiment 20000071 PARAMETER Experiment Name: At_100uM_ABA_Mutants_cDNA_P Parameter: Plant Line Value: CS8104
  misc_feature: MA Experiment 20000071 PARAMETER Experiment Name: At_100uM_ABA_Mutants_cDNA_P Parameter: Timepoint (hr) Value: 6
  misc_feature: MA Experiment 20000071 PARAMETER Experiment Name: At_100uM_ABA_Mutants_cDNA_P Parameter: Tissue Value: Aerial
  misc_feature: MA Experiment 20000071 PARAMETER Experiment Name: At_100uM_ABA_Mutants_cDNA_P Parameter: Treatment Value: 100uM ABA vs. No Treatment
  misc_feature: MA Experiment ID: 20000072 Result: Up-regulated in Transcription
  misc_feature: MA Experiment 20000072 PARAMETER Experiment Name: At_100uM_ABA_Mutants_cDNA_P Parameter: Plant Line Value: CS8105
  misc_feature: MA Experiment 20000072 PARAMETER Experiment Name: At_100uM_ABA_Mutants_cDNA_P Parameter: Timepoint (hr) Value: 6
  misc_feature: MA Experiment 20000072 PARAMETER Experiment Name: At_100uM_ABA_Mutants_cDNA_P Parameter: Tissue Value: Aerial
  misc_feature: MA Experiment 20000072 PARAMETER Experiment Name: At_100uM_ABA_Mutants_cDNA_P Parameter: Treatment Value: 100uM ABA vs. No Treatment
  misc_feature: MA Experiment ID: 20000087 Result: Up-regulated in Transcription
  misc_feature: MA Experiment 20000087 PARAMETER Experiment Name: At_100uM_ABA_Mutants_cDNA_P Parameter: Plant Line Value: WS
  misc_feature: MA Experiment 20000087 PARAMETER Experiment Name: At_100uM_ABA_Mutants_cDNA_P Parameter: Timepoint (hr) Value: 6
  misc_feature: MA Experiment 20000087 PARAMETER Experiment Name: At_100uM_ABA_Mutants_cDNA_P Parameter: Tissue Value: Aerial
  misc_feature: MA Experiment 20000087 PARAMETER Experiment Name: At_100uM_ABA_Mutants_cDNA_P Parameter: Treatment Value: 100uM ABA vs. No Treatment
  misc_feature: MA Experiment ID: 20000088 Result: Up-regulated in Transcription
  misc_feature: MA Experiment 20000088 PARAMETER Experiment Name: At_100uM_ABA_Mutants_cDNA_P Parameter: Plant Line Value: Landsberg
  misc_feature: MA Experiment 20000088 PARAMETER Experiment Name: At_100uM_ABA_Mutants_cDNA_P Parameter: Timepoint (hr) Value: 6
  misc_feature: MA Experiment 20000088 PARAMETER Experiment Name: At_100uM_ABA_Mutants_cDNA_P Parameter: Tissue Value: Aerial
  misc_feature: MA Experiment 20000088 PARAMETER Experiment Name: At_100uM_ABA_Mutants_cDNA_P Parameter: Treatment Value: 100uM ABA vs. No Treatment
  misc_feature: MA Experiment ID: 20000111 Result: Down-regulated in Transcription
  misc_feature: MA Experiment 20000111 PARAMETER Experiment Name: At_42deg_Heat_cDNA_P Parameter: Temperature (deg C) Value: 42 vs. 22
  misc_feature: MA Experiment 20000111 PARAMETER Experiment Name: At_42deg_Heat_cDNA_P Parameter: Timepoint (hr) Value: 6
  misc_feature: MA Experiment 20000111 PARAMETER Experiment Name: At_42deg_Heat_cDNA_P Parameter: Tissue Value: Aerial
  misc_feature: MA Experiment ID: 20000112 Result: Down-regulated in Transcription
  misc_feature: MA Experiment 20000112 PARAMETER Experiment Name: At_42deg_Heat_cDNA_P Parameter: Temperature (deg C) Value: 42 vs. 22
  misc_feature: MA Experiment 20000112 PARAMETER Experiment Name: At_42deg_Heat_cDNA_P Parameter: Timepoint (hr) Value: 2
  misc_feature: MA Experiment 20000112 PARAMETER Experiment Name: At_42deg_Heat_cDNA_P Parameter: Tissue Value: Aerial
  misc_feature: MA Experiment ID: 20000113 Result: Down-regulated in Transcription
  misc_feature: MA Experiment 20000113 PARAMETER Experiment Name: At_42deg_Heat_cDNA_P Parameter: Temperature (deg C) Value: 42 vs. 22
  misc_feature: MA Experiment 20000113 PARAMETER Experiment Name: At_42deg_Heat_cDNA_P Parameter: Timepoint (hr) Value: 8
  misc_feature: MA Experiment 20000113 PARAMETER Experiment Name: At_42deg_Heat_cDNA_P Parameter: Tissue Value: Aerial
  misc_feature: MA Experiment ID: 20000117 Result: Up-regulated in Transcription
  misc_feature: MA Experiment 20000117 PARAMETER Experiment Name: At_100uM_ABA_Mutants_cDNA_P Parameter: Plant Line Value: Columbia
  misc_feature: MA Experiment 20000117 PARAMETER Experiment Name: At_100uM_ABA_Mutants_cDNA_P Parameter: Timepoint (hr) Value: 6
  misc_feature: MA Experiment 20000117 PARAMETER Experiment Name: At_100uM_ABA_Mutants_cDNA_P Parameter: Tissue Value: Aerial
  misc_feature: MA Experiment 20000117 PARAMETER Experiment Name: At_100uM_ABA_Mutants_cDNA_P Parameter: Treatment Value: 100uM ABA vs. No Treatment
  misc_feature: MA Experiment ID: 20000144 Result: Down-regulated in Transcription
  misc_feature: MA Experiment 20000144 PARAMETER Experiment Name: At_42deg_Heat_cDNA_P Parameter: Temperature (deg C) Value: 42 vs. 22
  misc_feature: MA Experiment 20000144 PARAMETER Experiment Name: At_42deg_Heat_cDNA_P Parameter: Timepoint (hr) Value: 1
  misc_feature: MA Experiment 20000144 PARAMETER Experiment Name: At_42deg_Heat_cDNA_P Parameter: Tissue Value: Aerial
  misc_feature: MA Experiment ID: 20000180 Result: Up-regulated in Transcription
  misc_feature: MA Experiment 20000180 PARAMETER Experiment Name: At_Germinating_Seeds_P Parameter: Age (hr) Value: 24 vs. 0
  misc_feature: MA Experiment 20000180 PARAMETER Experiment Name: At_Germinating_Seeds_P Parameter: Tissue Value: Germinating Seeds
  misc_feature: MA Experiment ID: 20000211 Result: Up-regulated in Transcription
  misc_feature: MA Experiment 20000211 PARAMETER Experiment Name: At_0.001percent_MeJA__P Parameter: Age (day) Value: 14
  misc_feature: MA Experiment 20000211 PARAMETER Experiment Name: At_0.001percent_MeJA__P Parameter: Organism Value: A. thaliana
  misc_feature: MA Experiment 20000211 PARAMETER Experiment Name: At_0.001percent_MeJA__P Parameter: Plant Line Value: WS
  misc_feature: MA Experiment 20000211 PARAMETER Experiment Name: At_0.001percent_MeJA__P Parameter: Timepoint (hr) Value: 1
  misc_feature: MA Experiment 20000211 PARAMETER Experiment Name: At_0.001percent_MeJA__P Parameter: Tissue Value: Aerial
  misc_feature: MA Experiment 20000211 PARAMETER Experiment Name: At_0.001percent_MeJA__P Parameter: Treatment Value: 0.001percent MeJA vs. No Treatment
  misc_feature: MA Experiment ID: 20000234 Result: Up-regulated in Transcription
  misc_feature: MA Experiment 20000234 PARAMETER Experiment Name: At_Siliques_P Parameter: Age (day) Value: 21
  misc_feature: MA Experiment 20000234 PARAMETER Experiment Name: At_Siliques_P Parameter: Organism Value: A. thaliana
  misc_feature: MA Experiment 20000234 PARAMETER Experiment Name: At_Siliques_P Parameter: Plant Line Value: WS
  misc_feature: MA Experiment 20000234 PARAMETER Experiment Name: At_Siliques_P Parameter: Tissue Value: Less Than 5mm Siliques vs. Whole Plant
  misc_feature: MA Experiment ID: 20000264 Result: Up-regulated in Transcription
  misc_feature: MA Experiment 20000264 PARAMETER Experiment Name: At_Open_Flower_P Parameter: Age (day) Value: 21
  misc_feature: MA Experiment 20000264 PARAMETER Experiment Name: At_Open_Flower_P Parameter: Plant Line Value: WS
  misc_feature: MA Experiment 20000264 PARAMETER Experiment Name: At_Open_Flower_P Parameter: Tissue Value: Open Flower vs. Whole Plant
  misc_feature: MA Experiment ID: 20000265 Result: Up-regulated in Transcription
  misc_feature: MA Experiment 20000265 PARAMETER Experiment Name: At_Open_Flower_P Parameter: Age (day) Value: 21
  misc_feature: MA Experiment 20000265 PARAMETER Experiment Name: At_Open_Flower_P Parameter: Plant Line Value: WS
  misc_feature: MA Experiment 20000265 PARAMETER Experiment Name: At_Open_Flower_P Parameter: Tissue Value: Closed Flower vs. Whole Plant
  misc_feature: MA Experiment ID: 20000286 Result: Up-regulated in Transcription
  misc_feature: MA Experiment 20000286 PARAMETER Experiment Name: At_Open_Flower_P Parameter: Age (day) Value: 21
  misc_feature: MA Experiment 20000286 PARAMETER Experiment Name: At_Open_Flower_P Parameter: Plant Line Value: WS
  misc_feature: MA Experiment 20000286 PARAMETER Experiment Name: At_Open_Flower_P Parameter: Tissue Value: Half Open vs. Whole Plant
  misc_feature: MA Experiment ID: 20000495 Result: Up-regulated in Transcription
  misc_feature: MA Experiment 20000495 PARAMETER Experiment Name: At_Guard_Cells_P Parameter: Harvest Date Value: 8/2/2002
  misc_feature: MA Experiment 20000495 PARAMETER Experiment Name: At_Guard_Cells_P Parameter: Organism Value: A. thaliana
  misc_feature: MA Experiment 20000495 PARAMETER Experiment Name: At_Guard_Cells_P Parameter: Tissue Value: Guard Cells vs. Leaves
  misc_feature: MA Experiment ID: 20000496 Result: Up-regulated in Transcription
  misc_feature: MA Experiment 20000496 PARAMETER Experiment Name: At_Guard_Cells_P Parameter: Harvest Date Value: 7/19/2002
  misc_feature: MA Experiment 20000496 PARAMETER Experiment Name: At_Guard_Cells_P Parameter: Organism Value: Canola
  misc_feature: MA Experiment 20000496 PARAMETER Experiment Name: At_Guard_Cells_P Parameter: Tissue Value: Guard Cells vs. Leaves
  misc_feature: MA Experiment ID: 20001248 Result: Down-regulated in Transcription
  misc_feature: MA Experiment 20001248 PARAMETER Experiment Name: At_Far-red-induction_P Parameter: Age (day) Value: 7
  misc_feature: MA Experiment 20001248 PARAMETER Experiment Name: At_Far-red-induction_P Parameter: Light Value: Far-red vs. White
  misc_feature: MA Experiment 20001248 PARAMETER Experiment Name: At_Far-red-induction_P Parameter: Organism Value: A. thaliana
  misc_feature: MA Experiment 20001248 PARAMETER Experiment Name: At_Far-red-induction_P Parameter: Plant Line Value: Columbia
  misc_feature: MA Experiment 20001248 PARAMETER Experiment Name: At_Far-red-induction_P Parameter: Timepoint (hr) Value: 4
  misc_feature: MA Experiment 20001248 PARAMETER Experiment Name: At_Far-red-induction_P Parameter: Tissue Value: Whole Plant
  misc_feature: MA Experiment ID: 20001450 Result: Down-regulated in Transcription
  misc_feature: MA Experiment 20001450 PARAMETER Experiment Name: At_Far-red-induction_P Parameter: Age (day) Value: 7
  misc_feature: MA Experiment 20001450 PARAMETER Experiment Name: At_Far-red-induction_P Parameter: Light Value: Far-red vs. White
  misc_feature: MA Experiment 20001450 PARAMETER Experiment Name: At_Far-red-induction_P Parameter: Organism Value: A. thaliana
  misc_feature: MA Experiment 20001450 PARAMETER Experiment Name: At_Far-red-induction_P Parameter: Plant Line Value: Columbia
  misc_feature: MA Experiment 20001450 PARAMETER Experiment Name: At_Far-red-induction_P Parameter: Timepoint (hr) Value: 8
  misc_feature: MA Experiment 20001450 PARAMETER Experiment Name: At_Far-red-induction_P Parameter: Tissue Value: Whole Plant
  misc_feature: MA Experiment ID: 20001555 Result: Up-regulated in Transcription
  misc_feature: MA Experiment 20001555 PARAMETER Experiment Name: At_Drought_Soil_Dry_P Parameter: Age (day) Value: 24
  misc_feature: MA Experiment 20001555 PARAMETER Experiment Name: At_Drought_Soil_Dry_P Parameter: Organism Value: A. thaliana
  misc_feature: MA Experiment 20001555 PARAMETER Experiment Name: At_Drought_Soil_Dry_P Parameter: Plant Line Value: WS
  misc_feature: MA Experiment 20001555 PARAMETER Experiment Name: At_Drought_Soil_Dry_P Parameter: Post Timepoint (hr) Value: None
  misc_feature: MA Experiment 20001555 PARAMETER Experiment Name: At_Drought_Soil_Dry_P Parameter: Post-Treatment Value: None
  misc_feature: MA Experiment 20001555 PARAMETER Experiment Name: At_Drought_Soil_Dry_P Parameter: Timepoint (day) Value: 10
  misc_feature: MA Experiment 20001555 PARAMETER Experiment Name: At_Drought_Soil_Dry_P Parameter: Treatment Value: Drought vs. No Drought
  misc_feature: MA Experiment ID: 20001556 Result: Up-regulated in Transcription
  misc_feature: MA Experiment 20001556 PARAMETER Experiment Name: At_Drought_Soil_Dry_P Parameter: Age (day) Value: 26
  misc_feature: MA Experiment 20001556 PARAMETER Experiment Name: At_Drought_Soil_Dry_P Parameter: Organism Value: A. thaliana
  misc_feature: MA Experiment 20001556 PARAMETER Experiment Name: At_Drought_Soil_Dry_P Parameter: Plant Line Value: WS
  misc_feature: MA Experiment 20001556 PARAMETER Experiment Name: At_Drought_Soil_Dry_P Parameter: Post Timepoint (hr) Value: None
  misc_feature: MA Experiment 20001556 PARAMETER Experiment Name: At_Drought_Soil_Dry_P Parameter: Post-Treatment Value: None
  misc_feature: MA Experiment 20001556 PARAMETER Experiment Name: At_Drought_Soil_Dry_P Parameter: Timepoint (day) Value: 12
  misc_feature: MA Experiment 20001556 PARAMETER Experiment Name: At_Drought_Soil_Dry_P Parameter: Treatment Value: Drought vs. No Drought
  misc_feature: MA Experiment ID: 20001559 Result: Up-regulated in Transcription
  misc_feature: MA Experiment 20001559 PARAMETER Experiment Name: At_Drought_Soil_Dry_P Parameter: Age (day) Value: 28
  misc_feature: MA Experiment 20001559 PARAMETER Experiment Name: At_Drought_Soil_Dry_P Parameter: Organism Value: A. thaliana
  misc_feature: MA Experiment 20001559 PARAMETER Experiment Name: At_Drought_Soil_Dry_P Parameter: Plant Line Value: WS
  misc_feature: MA Experiment 20001559 PARAMETER Experiment Name: At_Drought_Soil_Dry_P Parameter: Post Timepoint (hr) Value: 29
  misc_feature: MA Experiment 20001559 PARAMETER Experiment Name: At_Drought_Soil_Dry_P Parameter: Post-Treatment Value: Re-Water vs. No Drought
  misc_feature: MA Experiment 20001559 PARAMETER Experiment Name: At_Drought_Soil_Dry_P Parameter: Timepoint (day) Value: 14
  misc_feature: MA Experiment 20001559 PARAMETER Experiment Name: At_Drought_Soil_Dry_P Parameter: Treatment Value: Drought vs. No Drought

SEQ ID NO: 33874 - protein, 507 aa, Arabidopsis thaliana; identical to SEQ ID NO: 30284
  peptide (1)..(507): Ceres Seq. ID no. 13490572
  misc_feature (285)..(448): Pfam Name: MatE Pfam Description: MatE
  misc_feature (16)..(503): Homolog of NCBI NO: 20466556 NR Description: integral membrane protein, putative [Arabidopsis
  misc_feature (16)..(503): Homolog of NCBI NO: 15233127 NR Description: MATE efflux protein family [Arabidopsis thaliana]
  misc_feature (4)..(505): Homolog of NCBI NO: 22655139 NR Description: unknown protein [Arabidopsis thaliana]
  misc_feature (4)..(505): Homolog of NCBI NO: 15221073 NR Description: MATE efflux protein family [Arabidopsis thaliana]
  misc_feature (3)..(505): Homolog of NCBI NO: 15081773 NR Description: At1g61890/F8K4_9 [Arabidopsis thaliana]
  misc_feature (3)..(505): Homolog of NCBI NO: 18407368 NR Description: MATE efflux protein family [Arabidopsis thaliana]
  misc_feature (76)..(496): Homolog of NCBI NO: 15234633 NR Description: MATE efflux protein family [Arabidopsis thaliana]
  misc_feature (1)..(467): Homolog of NCBI NO: 7487826 NR Description: hypothetical protein T8O5.120 - Arabidopsis
  misc_feature (1)..(507): Homolog of NCBI NO: 18415793 NR Description: MATE efflux protein family [Arabidopsis thaliana]
  misc_feature (1)..(507): Homolog of NCBI NO: 21553843 NR Description: unknown [Arabidopsis thaliana]

SEQ ID NO: 33875 - protein, 432 aa, Arabidopsis thaliana; identical to SEQ ID NO: 30285
  peptide (1)..(432): Ceres Seq. ID no. 13490573
  misc_feature (210)..(373): Pfam Name: MatE Pfam Description: MatE
  misc_feature (1)..(428): Homolog of NCBI NO: 20466556 NR Description: integral membrane protein, putative [Arabidopsis
  misc_feature (1)..(428): Homolog of NCBI NO: 15233127 NR Description: MATE efflux protein family [Arabidopsis thaliana]
  misc_feature (1)..(430): Homolog of NCBI NO: 22655139 NR Description: unknown protein [Arabidopsis thaliana]
  misc_feature (1)..(430): Homolog of NCBI NO: 15221073 NR Description: MATE efflux protein family [Arabidopsis thaliana]
  misc_feature (1)..(430): Homolog of NCBI NO: 15081773 NR Description: At1g61890/F8K4_9 [Arabidopsis thaliana]
  misc_feature (1)..(430): Homolog of NCBI NO: 18407368 NR Description: MATE efflux protein family [Arabidopsis thaliana]
  misc_feature (1)..(421): Homolog of NCBI NO: 15234633 NR Description: MATE efflux protein family [Arabidopsis thaliana]
  misc_feature (1)..(392): Homolog of NCBI NO: 7487826 NR Description: hypothetical protein T8O5.120 - Arabidopsis
  misc_feature (1)..(432): Homolog of NCBI NO: 18415793 NR Description: MATE efflux protein family [Arabidopsis thaliana]
  misc_feature (1)..(432): Homolog of NCBI NO: 21553843 NR Description: unknown [Arabidopsis thaliana]

SEQ ID NO: 33876 - protein, 399 aa, Arabidopsis thaliana; identical to SEQ ID NO: 30286
  peptide (1)..(399): Ceres Seq. ID no. 13490574
  misc_feature (177)..(340): Pfam Name: MatE Pfam Description: MatE
  misc_feature (1)..(395): Homolog of NCBI NO: 20466556 NR Description: integral membrane protein, putative [Arabidopsis
  misc_feature (1)..(395): Homolog of NCBI NO: 15233127 NR Description: MATE efflux protein family [Arabidopsis thaliana]
  misc_feature (1)..(397): Homolog of NCBI NO: 22655139 NR Description: unknown protein [Arabidopsis thaliana]
  misc_feature (1)..(397): Homolog of NCBI NO: 15221073 NR Description: MATE efflux protein family [Arabidopsis thaliana]
  misc_feature (1)..(397): Homolog of NCBI NO: 15081773 NR Description: At1g61890/F8K4_9 [Arabidopsis thaliana]
  misc_feature (1)..(397): Homolog of NCBI NO: 18407368 NR Description: MATE efflux protein family [Arabidopsis thaliana]
  misc_feature (1)..(388): Homolog of NCBI NO: 15234633 NR Description: MATE efflux protein family [Arabidopsis thaliana]
  misc_feature (1)..(359): Homolog of NCBI NO: 7487826 NR Description: hypothetical protein T8O5.120 - Arabidopsis
  misc_feature (1)..(399): Homolog of NCBI NO: 18415793 NR Description: MATE efflux protein family [Arabidopsis thaliana]
  misc_feature (1)..(399): Homolog of NCBI NO: 21553843 NR Description: unknown [Arabidopsis thaliana]

SEQ ID NO: 33877 - DNA, 632 bp, Arabidopsis thaliana; identical to SEQ ID NO: 30287
  misc_feature (1)..(632): Ceres Seq. ID no. 13490432
  misc_feature: MA Experiment ID: 108561 Result: Up-regulated in Transcription
  misc_feature: MA Experiment 108561 PARAMETER Experiment Name: At_100uM_ABA_cDNA_P Parameter: Timepoint (hr) Value: 6
  misc_feature: MA Experiment 108561 PARAMETER Experiment Name: At_100uM_ABA_cDNA_P Parameter: Tissue Value: Aerial
  misc_feature: MA Experiment 108561 PARAMETER Experiment Name: At_100uM_ABA_cDNA_P Parameter: Treatment Value: 100uM ABA vs. No Treatment
  misc_feature: MA Experiment ID: 108585 Result: Up-regulated in Transcription
  misc_feature: MA Experiment 108585 PARAMETER Experiment Name: At_5mM_NaNP_cDNA_P Parameter: Timepoint (hr) Value: 6
  misc_feature: MA Experiment 108585 PARAMETER Experiment Name: At_5mM_NaNP_cDNA_P Parameter: Tissue Value: Aerial
  misc_feature: MA Experiment 108585 PARAMETER Experiment Name: At_5mM_NaNP_cDNA_P Parameter: Treatment Value: null
  misc_feature: MA Experiment ID: 108595 Result: Up-regulated in Transcription
  misc_feature: MA Experiment 108595 PARAMETER Experiment Name: At_Ler-pi_Ovule_cDNA_P Parameter: Plant Line Value: null
  misc_feature: MA Experiment ID: 108608 Result: Up-regulated in Transcription
  misc_feature: MA Experiment 108608 PARAMETER Experiment Name: At_100uM_ABA_cDNA_P Parameter: Timepoint (hr) Value: 1
  misc_feature: MA Experiment 108608 PARAMETER Experiment Name: At_100uM_ABA_cDNA_P Parameter: Tissue Value: Aerial
  misc_feature: MA Experiment 108608 PARAMETER Experiment Name: At_100uM_ABA_cDNA_P Parameter: Treatment Value: 100uM ABA vs. No Treatment
  misc_feature: MA Experiment ID: 108668 Result: Up-regulated in Transcription
  misc_feature: MA Experiment 108668 PARAMETER Experiment Name: At_2mM_SA_cDNA_P Parameter: Plant Line Value: WS
  misc_feature: MA Experiment 108668 PARAMETER Experiment Name: At_2mM_SA_cDNA_P Parameter: Timepoint (hr) Value: 6
  misc_feature: MA Experiment 108668 PARAMETER Experiment Name: At_2mM_SA_cDNA_P Parameter: Treatment Value: 2mM SA vs. No Treatment
  misc_feature: MA Experiment ID: 20000030 Result: Down-regulated in Transcription
  misc_feature: MA Experiment 20000030 PARAMETER Experiment Name: At_CS6630_Roots_cDNA_P Parameter: Plant Line Value: CS6630 vs. WS
  misc_feature: MA Experiment 20000030 PARAMETER Experiment Name: At_CS6630_Roots_cDNA_P Parameter: Tissue Value: Roots
  misc_feature: MA Experiment ID: 20000069 Result: Up-regulated in Transcription
  misc_feature: MA Experiment 20000069 PARAMETER Experiment Name: At_100uM_ABA_Mutants_cDNA_P Parameter: Plant Line Value: CS23
  misc_feature: MA Experiment 20000069 PARAMETER Experiment Name: At_100uM_ABA_Mutants_cDNA_P Parameter: Timepoint (hr) Value: 6
  misc_feature: MA Experiment 20000069 PARAMETER Experiment Name: At_100uM_ABA_Mutants_cDNA_P Parameter: Tissue Value: Aerial
  misc_feature: MA Experiment 20000069 PARAMETER Experiment Name: At_100uM_ABA_Mutants_cDNA_P Parameter: Treatment Value: 100uM ABA vs. No Treatment
  misc_feature: MA Experiment ID: 20000072 Result: Up-regulated in Transcription
  misc_feature: MA Experiment 20000072 PARAMETER Experiment Name: At_100uM_ABA_Mutants_cDNA_P Parameter: Plant Line Value: CS8105
  misc_feature: MA Experiment 20000072 PARAMETER Experiment Name: At_100uM_ABA_Mutants_cDNA_P Parameter: Timepoint (hr) Value: 6
  misc_feature: MA Experiment 20000072 PARAMETER Experiment Name: At_100uM_ABA_Mutants_cDNA_P Parameter: Tissue Value: Aerial
  misc_feature: MA Experiment 20000072 PARAMETER Experiment Name: At_100uM_ABA_Mutants_cDNA_P Parameter: Treatment Value: 100uM ABA vs. No Treatment
  misc_feature: MA Experiment ID: 20000166 Result: Up-regulated in Transcription
  misc_feature: MA Experiment 20000166 PARAMETER Experiment Name: At_100uM_ABA_P Parameter: Age (day) Value: 14
  misc_feature: MA Experiment 20000166 PARAMETER Experiment Name: At_100uM_ABA_P Parameter: Organism Value: A. thaliana
  misc_feature: MA Experiment 20000166 PARAMETER Experiment Name: At_100uM_ABA_P Parameter: Plant Line Value: WS
  misc_feature: MA Experiment 20000166 PARAMETER Experiment Name: At_100uM_ABA_P Parameter: Timepoint (hr) Value: 1
  misc_feature: MA Experiment 20000166 PARAMETER Experiment Name: At_100uM_ABA_P Parameter: Tissue Value: Aerial
  misc_feature: MA Experiment 20000166 PARAMETER Experiment Name: At_100uM_ABA_P Parameter: Treatment Value: 100uM ABA vs. No Treatment
  misc_feature: MA Experiment ID: 20000169 Result: Up-regulated in Transcription
  misc_feature: MA Experiment 20000169 PARAMETER Experiment Name: At_100uM_ABA_P Parameter: Age (day) Value: 14
  misc_feature: MA Experiment 20000169 PARAMETER Experiment Name: At_100uM_ABA_P Parameter: Organism Value: A. thaliana
  misc_feature: MA Experiment 20000169 PARAMETER Experiment Name: At_100uM_ABA_P Parameter: Plant Line Value: WS
  misc_feature: MA Experiment 20000169 PARAMETER Experiment Name: At_100uM_ABA_P Parameter: Timepoint (hr) Value: 6
  misc_feature: MA Experiment 20000169 PARAMETER Experiment Name: At_100uM_ABA_P Parameter: Tissue Value: Aerial
  misc_feature: MA Experiment 20000169 PARAMETER Experiment Name: At_100uM_ABA_P Parameter: Treatment Value: 100uM ABA vs. No Treatment
  misc_feature: MA Experiment ID: 20000173 Result: Down-regulated in Transcription
  misc_feature: MA Experiment 20000173 PARAMETER Experiment Name: At_42deg_Heat_P Parameter: Age (day) Value: 14
  misc_feature: MA Experiment 20000173 PARAMETER Experiment Name: At_42deg_Heat_P Parameter: Organism Value: A. thaliana
  misc_feature: MA Experiment 20000173 PARAMETER Experiment Name: At_42deg_Heat_P Parameter: Plant Line Value: WS
  misc_feature: MA Experiment 20000173 PARAMETER Experiment Name: At_42deg_Heat_P Parameter: Temperature (deg C) Value: 42 vs. 22
  misc_feature: MA Experiment 20000173 PARAMETER Experiment Name: At_42deg_Heat_P Parameter: Timepoint (hr) Value: 6
  misc_feature: MA Experiment 20000173 PARAMETER Experiment Name: At_42deg_Heat_P Parameter: Tissue Value: Aerial
  misc_feature: MA Experiment ID: 20000182 Result: Up-regulated in Transcription
  misc_feature: MA Experiment 20000182 PARAMETER Experiment Name: At_2mM_SA_P Parameter: Age (day) Value: 14
  misc_feature: MA Experiment 20000182 PARAMETER Experiment Name: At_2mM_SA_P Parameter: Organism Value: A. thaliana
  misc_feature: MA Experiment 20000182 PARAMETER Experiment Name: At_2mM_SA_P Parameter: Plant Line Value: WS
  misc_feature: MA Experiment 20000182 PARAMETER Experiment Name: At_2mM_SA_P Parameter: Timepoint (hr) Value: 6
  misc_feature: MA Experiment 20000182 PARAMETER Experiment Name: At_2mM_SA_P Parameter: Tissue Value: Aerial
  misc_feature: MA Experiment 20000182 PARAMETER Experiment Name: At_2mM_SA_P Parameter: Treatment Value: 2mM SA vs. No Treatment
  misc_feature: MA Experiment ID: 20000184 Result: Down-regulated in Transcription
  misc_feature: MA Experiment 20000184 PARAMETER Experiment Name: At_Shoots__P Parameter: Age (day) Value: 7
  misc_feature: MA Experiment 20000184 PARAMETER Experiment Name: At_Shoots__P Parameter: Tissue Value: Shoots vs. Whole Plant
  misc_feature: MA Experiment ID: 20000265 Result: Up-regulated in Transcription
  misc_feature: MA Experiment 20000265 PARAMETER Experiment Name: At_Open_Flower_P Parameter: Age (day) Value: 21
  misc_feature: MA Experiment 20000265 PARAMETER Experiment Name: At_Open_Flower_P Parameter: Plant Line Value: WS
  misc_feature: MA Experiment 20000265 PARAMETER Experiment Name: At_Open_Flower_P Parameter: Tissue Value: Closed Flower vs. Whole Plant
  misc_feature: MA Experiment ID: 20000453 Result: Up-regulated in Transcription
  misc_feature: MA Experiment 20000453 PARAMETER Experiment Name: At_100uM_ABA_P Parameter: Age (day) Value: 15
  misc_feature: MA Experiment 20000453 PARAMETER Experiment Name: At_100uM_ABA_P Parameter: Organism Value: A. thaliana
  misc_feature: MA Experiment 20000453 PARAMETER Experiment Name: At_100uM_ABA_P Parameter: Plant Line Value: WS
  misc_feature: MA Experiment 20000453 PARAMETER Experiment Name: At_100uM_ABA_P Parameter: Timepoint (hr) Value: 24
  misc_feature: MA Experiment 20000453 PARAMETER Experiment Name: At_100uM_ABA_P Parameter: Tissue Value: Aerial
  misc_feature: MA Experiment 20000453 PARAMETER Experiment Name: At_100uM_ABA_P Parameter: Treatment Value: 100uM ABA vs. No Treatment
  misc_feature: MA Experiment ID: 20001554 Result: Up-regulated in Transcription
  misc_feature: MA Experiment 20001554 PARAMETER Experiment Name: At_Drought_Soil_Dry_P Parameter: Age (day) Value: 21
  misc_feature: MA Experiment 20001554 PARAMETER Experiment Name: At_Drought_Soil_Dry_P Parameter: Organism Value: A. thaliana
  misc_feature: MA Experiment 20001554 PARAMETER Experiment Name: At_Drought_Soil_Dry_P Parameter: Plant Line Value: WS
  misc_feature: MA Experiment 20001554 PARAMETER Experiment Name: At_Drought_Soil_Dry_P Parameter: Post Timepoint (hr) Value: None
  misc_feature: MA Experiment 20001554 PARAMETER Experiment Name: At_Drought_Soil_Dry_P Parameter: Post-Treatment Value: None
  misc_feature: MA Experiment 20001554 PARAMETER Experiment Name: At_Drought_Soil_Dry_P Parameter: Timepoint (day) Value: 7
  misc_feature: MA Experiment 20001554 PARAMETER Experiment Name: At_Drought_Soil_Dry_P Parameter: Treatment Value: Drought vs. No Drought
  misc_feature: MA Experiment ID: 20001555 Result: Up-regulated in Transcription
  misc_feature: MA Experiment 20001555 PARAMETER Experiment Name: At_Drought_Soil_Dry_P Parameter: Age (day) Value: 24
  misc_feature: MA Experiment 20001555 PARAMETER Experiment Name: At_Drought_Soil_Dry_P Parameter: Organism Value: A. thaliana
  misc_feature: MA Experiment 20001555 PARAMETER Experiment Name: At_Drought_Soil_Dry_P Parameter: Plant Line Value: WS
  misc_feature: MA Experiment 20001555 PARAMETER Experiment Name: At_Drought_Soil_Dry_P Parameter: Post Timepoint (hr) Value: None
  misc_feature: MA Experiment 20001555 PARAMETER Experiment Name: At_Drought_Soil_Dry_P Parameter: Post-Treatment Value: None
  misc_feature: MA Experiment 20001555 PARAMETER Experiment Name: At_Drought_Soil_Dry_P Parameter: Timepoint (day) Value: 10
  misc_feature: MA Experiment 20001555 PARAMETER Experiment Name: At_Drought_Soil_Dry_P Parameter: Treatment Value: Drought vs. No Drought
  misc_feature: MA Experiment ID: 20001560 Result: Up-regulated in Transcription
  misc_feature: MA Experiment 20001560 PARAMETER Experiment Name: At_Drought_Soil_Dry_P Parameter: Age (day) Value: 28
  misc_feature: MA Experiment 20001560 PARAMETER Experiment Name: At_Drought_Soil_Dry_P Parameter: Organism Value: A. thaliana
  misc_feature: MA Experiment 20001560 PARAMETER Experiment Name: At_Drought_Soil_Dry_P Parameter: Plant Line Value: WS
  misc_feature: MA Experiment 20001560 PARAMETER Experiment Name: At_Drought_Soil_Dry_P Parameter: Post Timepoint (hr) Value: None
  misc_feature: MA Experiment 20001560 PARAMETER Experiment Name: At_Drought_Soil_Dry_P Parameter: Post-Treatment Value: None
  misc_feature: MA Experiment 20001560 PARAMETER Experiment Name: At_Drought_Soil_Dry_P Parameter: Timepoint (day) Value: 14
  misc_feature: MA Experiment 20001560 PARAMETER Experiment Name: At_Drought_Soil_Dry_P Parameter: Treatment Value: Drought vs. No Drought
  misc_feature: MA Experiment ID: 20001757 Result: Down-regulated in Transcription
  misc_feature: MA Experiment 20001757 PARAMETER Experiment Name: At_50mM_NH4NO3_L-to-H_P Parameter: Timepoint (hr) Value: 6
  misc_feature: MA Experiment 20001757 PARAMETER Experiment Name: At_50mM_NH4NO3_L-to-H_P Parameter: Tissue Value: Leaf
  misc_feature: MA Experiment 20001757 PARAMETER Experiment Name: At_50mM_NH4NO3_L-to-H_P Parameter: Treatment Value: 50mM NH4NO3 vs 100mM Mannitol
  misc_feature: MA Experiment ID: 20001904 Result: Up-regulated in Transcription
  misc_feature: MA Experiment 20001904 PARAMETER Experiment Name: At_Drought_Reproduction_P Parameter: Age (day) Value: 37
  misc_feature: MA Experiment 20001904 PARAMETER Experiment Name: At_Drought_Reproduction_P Parameter: Organism Value: A. thaliana
  misc_feature: MA Experiment 20001904 PARAMETER Experiment Name: At_Drought_Reproduction_P Parameter: Plant Line Value: WS
  misc_feature: MA Experiment 20001904 PARAMETER Experiment Name: At_Drought_Reproduction_P Parameter: Timepoint (day) Value: 7
  misc_feature: MA Experiment 20001904 PARAMETER Experiment Name: At_Drought_Reproduction_P Parameter: Tissue Value: Rosettes
  misc_feature: MA Experiment 20001904 PARAMETER Experiment Name: At_Drought_Reproduction_P Parameter: Treatment Value: Drought vs. No Drought
  misc_feature: MA Experiment ID: 20001905 Result: Up-regulated in Transcription
  misc_feature: MA Experiment 20001905 PARAMETER Experiment Name: At_Drought_Reproduction_P Parameter: Age (day) Value: 40
  misc_feature: MA Experiment 20001905 PARAMETER Experiment Name: At_Drought_Reproduction_P Parameter: Organism Value: A. thaliana
  misc_feature: MA Experiment 20001905 PARAMETER Experiment Name: At_Drought_Reproduction_P Parameter: Plant Line Value: WS
  misc_feature: MA Experiment 20001905 PARAMETER Experiment Name: At_Drought_Reproduction_P Parameter: Timepoint (day) Value: 10
  misc_feature: MA Experiment 20001905 PARAMETER Experiment Name: At_Drought_Reproduction_P Parameter: Tissue Value: Rosettes
  misc_feature: MA Experiment 20001905 PARAMETER Experiment Name: At_Drought_Reproduction_P Parameter: Treatment Value: Drought vs. No Drought
  misc_feature: MA Experiment ID: 20001906 Result: Up-regulated in Transcription
  misc_feature: MA Experiment 20001906 PARAMETER Experiment Name: At_Drought_Reproduction_P Parameter: Age (day) Value: 35
  misc_feature: MA Experiment 20001906 PARAMETER Experiment Name: At_Drought_Reproduction_P Parameter: Organism Value: A. thaliana
  misc_feature: MA Experiment 20001906 PARAMETER Experiment Name: At_Drought_Reproduction_P Parameter: Plant Line Value: WS
  misc_feature: MA Experiment 20001906 PARAMETER Experiment Name: At_Drought_Reproduction_P Parameter: Timepoint (day) Value: 5
  misc_feature: MA Experiment 20001906 PARAMETER Experiment Name: At_Drought_Reproduction_P Parameter: Tissue Value: Siliques
  misc_feature: MA Experiment 20001906 PARAMETER Experiment Name: At_Drought_Reproduction_P Parameter: Treatment Value: Drought vs. No Drought
  misc_feature: MA Experiment ID: 20001911 Result: Up-regulated in Transcription
  misc_feature: MA Experiment 20001911 PARAMETER Experiment Name: At_Drought_Reproduction_P Parameter: Age (day) Value: 40
  misc_feature: MA Experiment 20001911 PARAMETER Experiment Name: At_Drought_Reproduction_P Parameter: Organism Value: A. thaliana
  misc_feature: MA Experiment 20001911 PARAMETER Experiment Name: At_Drought_Reproduction_P Parameter: Plant Line Value: WS
  misc_feature: MA Experiment 20001911 PARAMETER Experiment Name: At_Drought_Reproduction_P Parameter: Timepoint (day) Value: 10
  misc_feature: MA Experiment 20001911 PARAMETER Experiment Name: At_Drought_Reproduction_P Parameter: Tissue Value: Flowers
  misc_feature: MA Experiment 20001911 PARAMETER Experiment Name: At_Drought_Reproduction_P Parameter: Treatment Value: Drought vs. No Drought

SEQ ID NO: 33878 - protein, 141 aa, Arabidopsis thaliana; identical to SEQ ID NO: 30288
  peptide (1)..(141): Ceres Seq. ID no. 13490433
  misc_feature (10)..(117): Homolog of NCBI NO: 34495748 NR Description: conserved hypothetical protein
  misc_feature (15)..(124): Homolog of NCBI NO: 34864617 NR Description: similar to RS21-C6 protein [Rattus norvegicus]
  misc_feature (16)..(124): Homolog of NCBI NO: 34877104 NR Description: similar to RS21-C6 protein [Rattus norvegicus]
  misc_feature (3)..(115): Homolog of NCBI NO: 13129100 NR Description: hypothetical protein MGC5627 [Homo sapiens]
  misc_feature (15)..(124): Homolog of NCBI NO: 12963573 NR Description: RIKEN cDNA 2410015N17 [Mus musculus]
  misc_feature (15)..(124): Homolog of NCBI NO: 20302079 NR Description: RS21-C6 protein [Rattus norvegicus]
  misc_feature (15)..(118): Homolog of NCBI NO: 33468615 NR Description: SI:zC150A22.2 (novel protein) [Danio rerio]
  misc_feature (1)..(115): Homolog of NCBI NO: 32352194 NR Description: hypothetical protein [Oryza sativa (japonica
  misc_feature (14)..(120): Homolog of NCBI NO: 32482945 NR Description: OSJNBb0072M01.10 [Oryza sativa (japonica
  misc_feature (1)..(141): Homolog of NCBI NO: 30687841 NR Description: expressed protein [Arabidopsis thaliana]

SEQ ID NO: 33879 - protein, 119 aa, Arabidopsis thaliana; identical to SEQ ID NO: 30289
  peptide (1)..(119): Ceres Seq. ID no. 13490434
  misc_feature (1)..(95): Homolog of NCBI NO: 34495748 NR Description: conserved hypothetical protein
  misc_feature (1)..(102): Homolog of NCBI NO: 34864617 NR Description: similar to RS21-C6 protein [Rattus norvegicus]
  misc_feature (1)..(102): Homolog of NCBI NO: 34877104 NR Description: similar to RS21-C6 protein [Rattus norvegicus]
  misc_feature (1)..(93): Homolog of NCBI NO: 13129100 NR Description: hypothetical protein MGC5627 [Homo sapiens]
  misc_feature (1)..(102): Homolog of NCBI NO: 12963573 NR Description: RIKEN cDNA 2410015N17 [Mus musculus]
  misc_feature (1)..(102): Homolog of NCBI NO: 20302079 NR Description: RS21-C6 protein [Rattus norvegicus]
  misc_feature (1)..(96): Homolog of NCBI NO: 33468615 NR Description: SI:zC150A22.2 (novel protein) [Danio rerio]
  misc_feature (1)..(93): Homolog of NCBI NO: 32352194 NR Description: hypothetical protein [Oryza sativa (japonica
  misc_feature (1)..(98): Homolog of NCBI NO: 32482945 NR Description: OSJNBb0072M01.10 [Oryza sativa (japonica
  misc_feature (1)..(119): Homolog of NCBI NO: 30687841 NR Description: expressed protein [Arabidopsis thaliana]

SEQ ID NO: 33880 - protein, 97 aa, Arabidopsis thaliana; identical to SEQ ID NO: 30290
  peptide (1)..(97): Ceres Seq. ID no. 13490435
  misc_feature (1)..(73): Homolog of NCBI NO: 34495748 NR Description: conserved hypothetical protein
  misc_feature (1)..(80): Homolog of NCBI NO: 34864617 NR Description: similar to RS21-C6 protein [Rattus norvegicus]
  misc_feature (1)..(80): Homolog of NCBI NO: 34877104 NR Description: similar to RS21-C6 protein [Rattus norvegicus]
  misc_feature (1)..(71): Homolog of NCBI NO: 13129100 NR Description: hypothetical protein MGC5627 [Homo sapiens]
  misc_feature (1)..(80): Homolog of NCBI NO: 12963573 NR Description: RIKEN cDNA 2410015N17 [Mus musculus]
  misc_feature (1)..(80): Homolog of NCBI NO: 20302079 NR Description: RS21-C6 protein [Rattus norvegicus]
  misc_feature (1)..(74): Homolog of NCBI NO: 33468615 NR Description: SI:zC150A22.2 (novel protein) [Danio rerio]
  misc_feature (1)..(71): Homolog of NCBI NO: 32352194 NR Description: hypothetical protein [Oryza sativa (japonica
  misc_feature (1)..(76): Homolog of NCBI NO: 32482945 NR Description: OSJNBb0072M01.10 [Oryza sativa (japonica
  misc_feature (1)..(97): Homolog of NCBI NO: 30687841 NR Description: expressed protein [Arabidopsis thaliana]

SEQ ID NO: 33881 - DNA, 1072 bp, Arabidopsis thaliana; identical to SEQ ID NO: 30291
  misc_feature (1)..(1072): Ceres Seq. ID no. 13495755
  misc_feature: MA Experiment ID: 108434 Result: Up-regulated in Transcription
  misc_feature: MA Experiment 108434 PARAMETER Experiment Name: At_Root_Tips_cDNA_P Parameter: Tissue Value: Root Tips
  misc_feature: MA Experiment ID: 108462 Result: Down-regulated in Transcription
  misc_feature: MA Experiment 108462 PARAMETER Experiment Name: At_Germinating_Seeds_cDNA_P Parameter: Age (day) Value: 2 vs. 0
  misc_feature: MA Experiment 108462 PARAMETER Experiment Name: At_Germinating_Seeds_cDNA_P Parameter: Tissue Value: Germinating Seeds
  misc_feature: MA Experiment ID: 108463 Result: Down-regulated in Transcription
  misc_feature: MA Experiment 108463 PARAMETER Experiment Name: At_Germinating_Seeds_cDNA_P Parameter: Age (day) Value: 3 vs. 0
  misc_feature: MA Experiment 108463 PARAMETER Experiment Name: At_Germinating_Seeds_cDNA_P Parameter: Tissue Value: Germinating Seeds
  misc_feature: MA Experiment ID: 108464 Result: Down-regulated in Transcription
  misc_feature: MA Experiment 108464 PARAMETER Experiment Name: At_Germinating_Seeds_cDNA_P Parameter: Age (day) Value: 4 vs. 0
  misc_feature: MA Experiment 108464 PARAMETER Experiment Name: At_Germinating_Seeds_cDNA_P Parameter: Tissue Value: Germinating Seeds
  misc_feature: MA Experiment ID: 108572 Result: Down-regulated in Transcription
  misc_feature: MA Experiment 108572 PARAMETER Experiment Name: At_Drought_cDNA_P Parameter: Timepoint (hr) Value: 1
  misc_feature: MA Experiment 108572 PARAMETER Experiment Name: At_Drought_cDNA_P Parameter: Tissue Value: Aerial
  misc_feature: MA Experiment 108572 PARAMETER Experiment Name: At_Drought_cDNA_P Parameter: Treatment Value: Drought vs. No Drought
  misc_feature: MA Experiment ID: 108579 Result: Up-regulated in Transcription
  misc_feature: MA Experiment 108579 PARAMETER Experiment Name: At_4deg_Cold_cDNA_P Parameter: Temperature (deg C) Value: 4 vs. 22
  misc_feature: MA Experiment 108579 PARAMETER Experiment Name: At_4deg_Cold_cDNA_P Parameter: Timepoint (hr) Value: 6
  misc_feature: MA Experiment 108579 PARAMETER Experiment Name: At_4deg_Cold_cDNA_P Parameter: Tissue Value: Aerial
  misc_feature: MA Experiment ID: 108585 Result: Down-regulated in Transcription
  misc_feature: MA Experiment 108585 PARAMETER Experiment Name: At_5mM_NaNP_cDNA_P Parameter: Timepoint (hr) Value: 6
  misc_feature: MA Experiment 108585 PARAMETER Experiment Name: At_5mM_NaNP_cDNA_P Parameter: Tissue Value: Aerial
  misc_feature: MA Experiment 108585 PARAMETER Experiment Name: At_5mM_NaNP_cDNA_P Parameter: Treatment Value: null
  misc_feature: MA Experiment ID: 108607 Result: Down-regulated in Transcription
  misc_feature: MA Experiment 108607 PARAMETER Experiment Name: At_100uM_ABA_cDNA_P Parameter: Timepoint (hr) Value: 4
  misc_feature: MA Experiment 108607 PARAMETER Experiment Name: At_100uM_ABA_cDNA_P Parameter: Tissue Value: Aerial
  misc_feature: MA Experiment 108607 PARAMETER Experiment Name: At_100uM_ABA_cDNA_P Parameter: Treatment Value: 100uM ABA vs. No Treatment
  misc_feature: MA Experiment ID: 108668 Result: Down-regulated in Transcription
  misc_feature: MA Experiment 108668 PARAMETER Experiment Name: At_2mM_SA_cDNA_P Parameter: Plant Line Value: WS
  misc_feature: MA Experiment 108668 PARAMETER Experiment Name: At_2mM_SA_cDNA_P Parameter: Timepoint (hr) Value: 6
  misc_feature: MA Experiment 108668 PARAMETER Experiment Name: At_2mM_SA_cDNA_P Parameter: Treatment Value: 2mM SA vs. No Treatment
  misc_feature: MA Experiment ID: 20000069 Result: Up-regulated in Transcription
  misc_feature: MA Experiment 20000069 PARAMETER Experiment Name: At_100uM_ABA_Mutants_cDNA_P Parameter: Plant Line Value: CS23
  misc_feature: MA Experiment 20000069 PARAMETER Experiment Name: At_100uM_ABA_Mutants_cDNA_P Parameter: Timepoint (hr) Value: 6
  misc_feature: MA Experiment 20000069 PARAMETER Experiment Name: At_100uM_ABA_Mutants_cDNA_P Parameter: Tissue Value: Aerial
  misc_feature: MA Experiment 20000069 PARAMETER Experiment Name: At_100uM_ABA_Mutants_cDNA_P Parameter: Treatment Value: 100uM ABA vs. No Treatment
  misc_feature: MA Experiment ID: 20000070 Result: Up-regulated in Transcription
  misc_feature: MA Experiment 20000070 PARAMETER Experiment Name: At_100uM_ABA_Mutants_cDNA_P Parameter: Plant Line Value: CS24
  misc_feature: MA Experiment 20000070 PARAMETER Experiment Name: At_100uM_ABA_Mutants_cDNA_P Parameter: Timepoint (hr) Value: 6
  misc_feature: MA Experiment 20000070 PARAMETER Experiment Name: At_100uM_ABA_Mutants_cDNA_P Parameter: Tissue Value: Aerial
  misc_feature: MA Experiment 20000070 PARAMETER Experiment Name: At_100uM_ABA_Mutants_cDNA_P Parameter: Treatment Value: 100uM ABA vs. No Treatment
  misc_feature: MA Experiment ID: 20000071 Result: Up-regulated in Transcription
  misc_feature: MA Experiment 20000071 PARAMETER Experiment Name: At_100uM_ABA_Mutants_cDNA_P Parameter: Plant Line Value: CS8104
  misc_feature: MA Experiment 20000071 PARAMETER Experiment Name: At_100uM_ABA_Mutants_cDNA_P Parameter: Timepoint (hr) Value: 6
  misc_feature: MA Experiment 20000071 PARAMETER Experiment Name: At_100uM_ABA_Mutants_cDNA_P Parameter: Tissue Value: Aerial
  misc_feature: MA Experiment 20000071 PARAMETER Experiment Name: At_100uM_ABA_Mutants_cDNA_P Parameter: Treatment Value: 100uM ABA vs. No Treatment
  misc_feature: MA Experiment ID: 20000072 Result: Up-regulated in Transcription
  misc_feature: MA Experiment 20000072 PARAMETER Experiment Name: At_100uM_ABA_Mutants_cDNA_P Parameter: Plant Line Value: CS8105
  misc_feature: MA Experiment 20000072 PARAMETER Experiment Name: At_100uM_ABA_Mutants_cDNA_P Parameter: Timepoint (hr) Value: 6
  misc_feature: MA Experiment 20000072 PARAMETER Experiment Name: At_100uM_ABA_Mutants_cDNA_P Parameter: Tissue Value: Aerial
  misc_feature: MA Experiment 20000072 PARAMETER Experiment Name: At_100uM_ABA_Mutants_cDNA_P Parameter: Treatment Value: 100uM ABA vs. No Treatment
  misc_feature: MA Experiment ID: 20000087 Result: Up-regulated in Transcription
  misc_feature: MA Experiment 20000087 PARAMETER Experiment Name: At_100uM_ABA_Mutants_cDNA_P Parameter: Plant Line Value: WS
  misc_feature: MA Experiment 20000087 PARAMETER Experiment Name: At_100uM_ABA_Mutants_cDNA_P Parameter: Timepoint (hr) Value: 6
  misc_feature: MA Experiment 20000087 PARAMETER Experiment Name: At_100uM_ABA_Mutants_cDNA_P Parameter: Tissue Value: Aerial
  misc_feature: MA Experiment 20000087 PARAMETER Experiment Name: At_100uM_ABA_Mutants_cDNA_P Parameter: Treatment Value: 100uM ABA vs. No Treatment
  misc_feature: MA Experiment ID: 20000088 Result: Up-regulated in Transcription
  misc_feature: MA Experiment 20000088 PARAMETER Experiment Name: At_100uM_ABA_Mutants_cDNA_P Parameter: Plant Line Value: Landsberg
  misc_feature: MA Experiment 20000088 PARAMETER Experiment Name: At_100uM_ABA_Mutants_cDNA_P Parameter: Timepoint (hr) Value: 6
  misc_feature: MA Experiment 20000088 PARAMETER Experiment Name: At_100uM_ABA_Mutants_cDNA_P Parameter: Tissue Value: Aerial
  misc_feature: MA Experiment 20000088 PARAMETER Experiment Name: At_100uM_ABA_Mutants_cDNA_P Parameter: Treatment Value: 100uM ABA vs. No Treatment
  misc_feature: MA Experiment ID: 20000090 Result: Up-regulated in Transcription
  misc_feature: MA Experiment ID: 20000111 Result: Down-regulated in Transcription
  misc_feature: MA Experiment 20000111 PARAMETER Experiment Name: At_42deg_Heat_cDNA_P Parameter: Temperature (deg C) Value: 42 vs. 22
  misc_feature: MA Experiment 20000111 PARAMETER Experiment Name: At_42deg_Heat_cDNA_P Parameter: Timepoint (hr) Value: 6
  misc_feature: MA Experiment 20000111 PARAMETER Experiment Name: At_42deg_Heat_cDNA_P Parameter: Tissue Value: Aerial
  misc_feature: MA Experiment ID: 20000213 Result: Up-regulated in Transcription
  misc_feature: MA Experiment 20000213 PARAMETER Experiment Name: At_4deg_Cold_P Parameter: Timepoint (hr) Value: 2
  misc_feature: MA Experiment ID: 20000437 Result: Up-regulated in Transcription
  misc_feature: MA Experiment 20000437 PARAMETER Experiment Name: At_Drought_P Parameter: Age (day) Value: 8
  misc_feature: MA Experiment 20000437 PARAMETER Experiment Name: At_Drought_P Parameter: Organism Value: A. thaliana
  misc_feature: MA Experiment 20000437 PARAMETER Experiment Name: At_Drought_P Parameter: Plant Line Value: WS
  misc_feature: MA Experiment 20000437 PARAMETER Experiment Name: At_Drought_P Parameter: Timepoint (hr) Value: 24
  misc_feature: MA Experiment 20000437 PARAMETER Experiment Name: At_Drought_P Parameter: Tissue Value: Whole Plant
  misc_feature: MA Experiment 20000437 PARAMETER Experiment Name: At_Drought_P Parameter: Treatment Value: Drought vs. No Drought
  misc_feature: MA Experiment ID: 20000438 Result: Down-regulated in Transcription
  misc_feature: MA Experiment 20000438 PARAMETER Experiment Name: At_Shoots__P Parameter: Age (day) Value: 14
  misc_feature: MA Experiment 20000438 PARAMETER Experiment Name: At_Shoots__P Parameter: Tissue Value: Shoots vs. Whole Plant
  misc_feature: MA Experiment ID: 20001451 Result: Up-regulated in Transcription
  misc_feature: MA Experiment 20001451 PARAMETER Experiment Name: At_Far-red-induction_P Parameter: Age (day) Value: 7
  misc_feature: MA Experiment 20001451 PARAMETER Experiment Name: At_Far-red-induction_P Parameter: Light Value: Far-red vs. White
  misc_feature: MA Experiment 20001451 PARAMETER Experiment Name: At_Far-red-induction_P Parameter: Organism Value: A. thaliana
  misc_feature: MA Experiment 20001451 PARAMETER Experiment Name: At_Far-red-induction_P Parameter: Plant Line Value: Columbia
  misc_feature: MA Experiment 20001451 PARAMETER Experiment Name: At_Far-red-induction_P Parameter: Timepoint (hr) Value: 24
  misc_feature: MA Experiment 20001451 PARAMETER Experiment Name: At_Far-red-induction_P Parameter: Tissue Value: Whole Plant
  misc_feature: MA Experiment ID: 20001557 Result: Up-regulated in Transcription
  misc_feature: MA Experiment 20001557 PARAMETER Experiment Name: At_Drought_Soil_Dry_P Parameter: Age (day) Value: 27
  misc_feature: MA Experiment 20001557 PARAMETER Experiment Name: At_Drought_Soil_Dry_P Parameter: Organism Value: A. thaliana
  misc_feature: MA Experiment 20001557 PARAMETER Experiment Name: At_Drought_Soil_Dry_P Parameter: Plant Line Value: WS
  misc_feature: MA Experiment 20001557 PARAMETER Experiment Name: At_Drought_Soil_Dry_P Parameter: Post Timepoint (hr) Value: 3
  misc_feature: MA Experiment 20001557 PARAMETER Experiment Name: At_Drought_Soil_Dry_P Parameter: Post-Treatment Value: Re-Water vs. No Drought
  misc_feature: MA Experiment 20001557 PARAMETER Experiment Name: At_Drought_Soil_Dry_P Parameter: Timepoint (day) Value: 13
  misc_feature: MA Experiment 20001557 PARAMETER Experiment Name: At_Drought_Soil_Dry_P Parameter: Treatment Value: Drought vs. No Drought

SEQ ID NO: 33882 - protein, 114 aa, Arabidopsis thaliana; identical to SEQ ID NO: 27779
  peptide (1)..(114): Ceres Seq. ID no. 13495756
  misc_feature (27)..(112): Pfam Name: Herpesvirus large structural phosphoprotein UL32 Pfam Description: Herpesvirus large structural phosphoprotein UL32
  misc_feature (1)..(114): Homolog of NCBI NO: 10799202 NR Description: glycine-rich RNA-binding protein [Sorghum bicolor]
  misc_feature (1)..(114): Homolog of NCBI NO: 544423 NR Description: Glycine-rich RNA-binding protein 2
  misc_feature (1)..(114): Homolog of NCBI NO: 544416 NR Description: Glycine-rich RNA-binding protein 10
  misc_feature (1)..(114): Homolog of NCBI NO: 34851124 NR Description: putative glycine-rich RNA-binding protein [Prunus
  misc_feature (1)..(114): Homolog of NCBI NO: 15235002 NR Description: glycine-rich RNA-binding protein 8 (GRP8) (CCR1)
  misc_feature (1)..(114): Homolog of NCBI NO: 30681492 NR Description: glycine-rich RNA-binding protein (AtGRP7)
  misc_feature (1)..(114): Homolog of NCBI NO: 1346180 NR Description: Glycine-rich RNA-binding protein GRP1A
  misc_feature (1)..(114): Homolog of NCBI NO: 1346181 NR Description: Glycine-rich RNA-binding protein GRP2A
  misc_feature (1)..(114): Homolog of NCBI NO: 15226605 NR Description: glycine-rich RNA-binding protein (AtGRP7)
  misc_feature (1)..(114): Homolog of NCBI NO: 21553354 NR Description: glycine-rich RNA binding protein 7 [Arabidopsis

SEQ ID NO: 33883 - protein, 107 aa, Arabidopsis thaliana; identical to SEQ ID NO: 27780
  peptide (1)..(107): Ceres Seq. ID no. 13495757
  misc_feature (20)..(105): Pfam Name: Herpesvirus large structural phosphoprotein UL32 Pfam Description: Herpesvirus large structural phosphoprotein UL32
  misc_feature (1)..(107): Homolog of NCBI NO: 10799202 NR Description: glycine-rich RNA-binding protein [Sorghum bicolor]
  misc_feature (1)..(107): Homolog of NCBI NO: 544423 NR Description: Glycine-rich RNA-binding protein 2
  misc_feature (1)..(107): Homolog of NCBI NO: 544416 NR Description: Glycine-rich RNA-binding protein 10
  misc_feature (1)..(107): Homolog of NCBI NO: 34851124 NR Description: putative glycine-rich RNA-binding protein [Prunus
  misc_feature (1)..(107): Homolog of NCBI NO: 15235002 NR Description: glycine-rich RNA-binding protein 8 (GRP8) (CCR1)
  misc_feature (1)..(107): Homolog of NCBI NO: 30681492 NR Description: glycine-rich RNA-binding protein (AtGRP7)
  misc_feature (1)..(107): Homolog of NCBI NO: 1346180 NR Description: Glycine-rich RNA-binding protein GRP1A
  misc_feature (1)..(107): Homolog of NCBI NO: 1346181 NR Description: Glycine-rich RNA-binding protein GRP2A
  misc_feature (1)..(107): Homolog of NCBI NO: 15226605 NR Description: glycine-rich RNA-binding protein (AtGRP7)
  misc_feature (1)..(107): Homolog of NCBI NO: 21553354 NR Description: glycine-rich RNA binding protein 7 [Arabidopsis

SEQ ID NO: 33884 - protein, 105 aa, Arabidopsis thaliana; identical to SEQ ID NO: 30294
  peptide (1)..(105): Ceres Seq. ID no. 13495758

SEQ ID NO: 33885 - DNA, 1321 bp, Arabidopsis thaliana; identical to SEQ ID NO: 30295
  misc_feature (1)..(1321): Ceres Seq. ID no. 13497165
  misc_feature: MA Experiment ID: 108569 Result: Up-regulated in Transcription
  misc_feature: MA Experiment 108569 PARAMETER Experiment Name: At_0.001%_MeJA__cDNA_P Parameter: Timepoint (hr) Value: 6
  misc_feature: MA Experiment 108569 PARAMETER Experiment Name: At_0.001%_MeJA__cDNA_P Parameter: Tissue Value: Aerial
  misc_feature: MA Experiment 108569 PARAMETER Experiment Name: At_0.001%_MeJA__cDNA_P Parameter: Treatment Value: 0.001% MeJA vs. No Treatment
  misc_feature: MA Experiment ID: 108573 Result: Down-regulated in Transcription
  misc_feature: MA Experiment 108573 PARAMETER Experiment Name: At_Drought_cDNA_P Parameter: Timepoint (hr) Value: 6
  misc_feature: MA Experiment 108573 PARAMETER Experiment Name: At_Drought_cDNA_P Parameter: Tissue Value: Aerial
  misc_feature: MA Experiment 108573 PARAMETER Experiment Name: At_Drought_cDNA_P Parameter: Treatment Value: Drought vs. No Drought
  misc_feature: MA Experiment ID: 108576 Result: Down-regulated in Transcription
  misc_feature: MA Experiment 108576 PARAMETER Experiment Name: At_42deg_Heat_cDNA_P Parameter: Temperature (deg C) Value: 42 vs. 22
  misc_feature: MA Experiment 108576 PARAMETER Experiment Name: At_42deg_Heat_cDNA_P Parameter: Timepoint (hr) Value: 1
  misc_feature: MA Experiment 108576 PARAMETER Experiment Name: At_42deg_Heat_cDNA_P Parameter: Tissue Value: Aerial
  misc_feature: MA Experiment ID: 20000169 Result: Up-regulated in Transcription
  misc_feature: MA Experiment 20000169 PARAMETER Experiment Name: At_100uM_ABA_P Parameter: Age (day) Value: 14
  misc_feature: MA Experiment 20000169 PARAMETER Experiment Name: At_100uM_ABA_P Parameter: Organism Value: A. thaliana
  misc_feature: MA Experiment 20000169 PARAMETER Experiment Name: At_100uM_ABA_P Parameter: Plant Line Value: WS
  misc_feature: MA Experiment 20000169 PARAMETER Experiment Name: At_100uM_ABA_P Parameter: Timepoint (hr) Value: 6
  misc_feature: MA Experiment 20000169 PARAMETER Experiment Name: At_100uM_ABA_P Parameter: Tissue Value: Aerial
  misc_feature: MA Experiment 20000169 PARAMETER Experiment Name: At_100uM_ABA_P Parameter: Treatment Value: 100uM ABA vs. No Treatment
  misc_feature: MA Experiment ID: 20000171 Result: Down-regulated in Transcription
  misc_feature: MA Experiment 20000171 PARAMETER Experiment Name: At_42deg_Heat_P Parameter: Age (day) Value: 14
  misc_feature: MA Experiment 20000171 PARAMETER Experiment Name: At_42deg_Heat_P Parameter: Organism Value: A. thaliana
  misc_feature: MA Experiment 20000171 PARAMETER Experiment Name: At_42deg_Heat_P Parameter: Plant Line Value: WS
  misc_feature: MA Experiment 20000171 PARAMETER Experiment Name: At_42deg_Heat_P Parameter: Temperature (deg C) Value: 42 vs. 22
  misc_feature: MA Experiment 20000171 PARAMETER Experiment Name: At_42deg_Heat_P Parameter: Timepoint (hr) Value: 1
  misc_feature: MA Experiment 20000171 PARAMETER Experiment Name: At_42deg_Heat_P Parameter: Tissue Value: Aerial
  misc_feature: MA Experiment ID: 20000173 Result: Down-regulated in Transcription
  misc_feature: MA Experiment 20000173 PARAMETER Experiment Name: At_42deg_Heat_P Parameter: Age (day) Value: 14
  misc_feature: MA Experiment 20000173 PARAMETER Experiment Name: At_42deg_Heat_P Parameter: Organism Value: A. thaliana
  misc_feature: MA Experiment 20000173 PARAMETER Experiment Name: At_42deg_Heat_P Parameter: Plant Line Value: WS
  misc_feature: MA Experiment 20000173 PARAMETER Experiment Name: At_42deg_Heat_P Parameter: Temperature (deg C) Value: 42 vs. 22
  misc_feature: MA Experiment 20000173 PARAMETER Experiment Name: At_42deg_Heat_P Parameter: Timepoint (hr) Value: 6
  misc_feature: MA Experiment 20000173 PARAMETER Experiment Name: At_42deg_Heat_P Parameter: Tissue Value: Aerial
  misc_feature: MA Experiment ID: 20000179 Result: Down-regulated in Transcription
  misc_feature: MA Experiment 20000179 PARAMETER Experiment Name: At_Germinating_Seeds_P Parameter: Age (hr) Value: 6 vs. 0
  misc_feature: MA Experiment 20000179 PARAMETER Experiment Name: At_Germinating_Seeds_P Parameter: Tissue Value: Germinating Seeds
  misc_feature: MA Experiment ID: 20000184 Result: Up-regulated in Transcription
  misc_feature: MA Experiment 20000184 PARAMETER Experiment Name: At_Shoots__P Parameter: Age (day) Value: 7
  misc_feature: MA Experiment 20000184 PARAMETER Experiment Name: At_Shoots__P Parameter: Tissue Value: Shoots vs. Whole Plant
  misc_feature: MA Experiment ID: 20000227 Result: Down-regulated in Transcription
  misc_feature: MA Experiment 20000227 PARAMETER Experiment Name: At_Root-Tips-vs-Tops_P Parameter: Tissue Value: Root Tips vs. Root Tops
  misc_feature: MA Experiment ID: 20000234 Result: Up-regulated in Transcription
  misc_feature: MA Experiment 20000234 PARAMETER Experiment Name: At_Siliques_P Parameter: Age (day) Value: 21
  misc_feature: MA Experiment 20000234 PARAMETER Experiment Name: At_Siliques_P Parameter: Organism Value: A. thaliana
  misc_feature: MA Experiment 20000234 PARAMETER Experiment Name: At_Siliques_P Parameter: Plant Line Value: WS
  misc_feature: MA Experiment 20000234 PARAMETER Experiment Name: At_Siliques_P Parameter: Tissue Value: Less Than 5mm Siliques vs. Whole Plant
  misc_feature: MA Experiment ID: 20000264 Result: Up-regulated in Transcription
  misc_feature: MA Experiment 20000264 PARAMETER Experiment Name: At_Open_Flower_P Parameter: Age (day) Value: 21
  misc_feature: MA Experiment 20000264 PARAMETER Experiment Name: At_Open_Flower_P Parameter: Plant Line Value: WS
  misc_feature: MA Experiment 20000264 PARAMETER Experiment Name: At_Open_Flower_P Parameter: Tissue Value: Open Flower vs. Whole Plant
  misc_feature: MA Experiment ID: 20000439 Result: Up-regulated in Transcription
  misc_feature: MA Experiment 20000439 PARAMETER Experiment Name: At_Roots__P Parameter: Age (day) Value: 14 vs. 21
  misc_feature: MA Experiment 20000439 PARAMETER Experiment Name: At_Roots__P Parameter: Organism Value: A. thaliana
  misc_feature: MA Experiment 20000439 PARAMETER Experiment Name: At_Roots__P Parameter: Tissue Value: Roots vs. Whole Plant
  misc_feature: MA Experiment ID: 20000444 Result: Up-regulated in Transcription
  misc_feature: MA Experiment 20000444 PARAMETER Experiment Name: At_100uM_NAA__P Parameter: Age (day) Value: 14
  misc_feature: MA Experiment 20000444 PARAMETER Experiment Name: At_100uM_NAA__P Parameter: Organism Value: A. thaliana
  misc_feature: MA Experiment 20000444 PARAMETER Experiment Name: At_100uM_NAA__P Parameter: Plant Line Value: WS
  misc_feature: MA Experiment 20000444 PARAMETER Experiment Name: At_100uM_NAA__P Parameter: Timepoint (hr) Value: 1
  misc_feature: MA Experiment 20000444 PARAMETER Experiment Name: At_100uM_NAA__P Parameter: Tissue Value: Aerial
  misc_feature: MA Experiment 20000444 PARAMETER Experiment Name: At_100uM_NAA__P Parameter: Treatment Value: 100uM NAA vs. No Treatment
  misc_feature: MA Experiment ID: 20000495 Result: Up-regulated in Transcription
  misc_feature: MA Experiment 20000495 PARAMETER Experiment Name: At_Guard_Cells_P Parameter: Harvest Date Value: 8/2/2002
  misc_feature: MA Experiment 20000495 PARAMETER Experiment Name: At_Guard_Cells_P Parameter: Organism Value: A. thaliana
  misc_feature: MA Experiment 20000495 PARAMETER Experiment Name: At_Guard_Cells_P Parameter: Tissue Value: Guard Cells vs. Leaves
  misc_feature: MA Experiment ID: 20000496 Result: Up-regulated in Transcription
  misc_feature: MA Experiment 20000496 PARAMETER Experiment Name: At_Guard_Cells_P Parameter: Harvest Date Value: 7/19/2002
  misc_feature: MA Experiment 20000496 PARAMETER Experiment Name: At_Guard_Cells_P Parameter: Organism Value: Canola
  misc_feature: MA Experiment 20000496 PARAMETER Experiment Name: At_Guard_Cells_P Parameter: Tissue Value: Guard Cells vs. Leaves
  misc_feature: MA Experiment ID: 20000573 Result: Down-regulated in Transcription
  misc_feature: MA Experiment 20000573 PARAMETER Experiment Name: At_100uM_ABA_Mutants__P Parameter: Organism Value: A. thaliana
  misc_feature: MA Experiment 20000573 PARAMETER Experiment Name: At_100uM_ABA_Mutants__P Parameter: Plant Line Value: CS22 vs. Ler wt
  misc_feature: MA Experiment 20000573 PARAMETER Experiment Name: At_100uM_ABA_Mutants__P Parameter: Timepoint (hr) Value: N/A
  misc_feature: MA Experiment 20000573 PARAMETER Experiment Name: At_100uM_ABA_Mutants__P Parameter: Tissue Value: Whole Plant
  misc_feature: MA Experiment 20000573 PARAMETER Experiment Name: At_100uM_ABA_Mutants__P Parameter: Treatment Value: None
  misc_feature: MA Experiment ID: 20001450 Result: Down-regulated in Transcription
  misc_feature: MA Experiment 20001450 PARAMETER Experiment Name: At_Far-red-induction_P Parameter: Age (day) Value: 7
  misc_feature: MA Experiment 20001450 PARAMETER Experiment Name: At_Far-red-induction_P Parameter: Light Value: Far-red vs. White
  misc_feature: MA Experiment 20001450 PARAMETER Experiment Name: At_Far-red-induction_P Parameter: Organism Value: A. thaliana
  misc_feature: MA Experiment 20001450 PARAMETER Experiment Name: At_Far-red-induction_P Parameter: Plant Line Value: Columbia
  misc_feature: MA Experiment 20001450 PARAMETER Experiment Name: At_Far-red-induction_P Parameter: Timepoint (hr) Value: 8
  misc_feature: MA Experiment 20001450 PARAMETER Experiment Name: At_Far-red-induction_P Parameter: Tissue Value: Whole Plant
  misc_feature: MA Experiment ID: 20001556 Result: Down-regulated in Transcription
  misc_feature: MA Experiment 20001556 PARAMETER Experiment Name: At_Drought_Soil_Dry_P Parameter: Age (day) Value: 26
  misc_feature: MA Experiment 20001556 PARAMETER Experiment Name: At_Drought_Soil_Dry_P Parameter: Organism Value: A. thaliana
  misc_feature: MA Experiment 20001556 PARAMETER Experiment Name: At_Drought_Soil_Dry_P Parameter: Plant Line Value: WS
  misc_feature: MA Experiment 20001556 PARAMETER Experiment Name: At_Drought_Soil_Dry_P Parameter: Post Timepoint (hr) Value: None
  misc_feature: MA Experiment 20001556 PARAMETER Experiment Name: At_Drought_Soil_Dry_P Parameter: Post-Treatment Value: None
  misc_feature: MA Experiment 20001556 PARAMETER Experiment Name: At_Drought_Soil_Dry_P Parameter: Timepoint (day) Value: 12
  misc_feature: MA Experiment 20001556 PARAMETER Experiment Name: At_Drought_Soil_Dry_P Parameter: Treatment Value: Drought vs. No Drought

SEQ ID NO: 33886 - protein, 257 aa, Arabidopsis thaliana; identical to SEQ ID NO: 30296
  peptide (1)..(257): Ceres Seq. ID no. 13497166
  misc_feature (164)..(241): Pfam Name: Pollen allergen Pfam Description: Pollen allergen
  misc_feature (1)..(257): Homolog of NCBI NO: 15227005 NR Description: expansin, putative [Arabidopsis thaliana]
  misc_feature (1)..(257): Homolog of NCBI NO: 20502786 NR Description: expansin 12 precursor [Rumex palustris]
  misc_feature (1)..(257): Homolog of NCBI NO: 20502784 NR Description: expansin 11 precursor [Rumex palustris]
  misc_feature (1)..(257): Homolog of NCBI NO: 38046726 NR Description: alpha-expansin 1 [Populus tremula x Populus
  misc_feature (3)..(257): Homolog of NCBI NO: 29467595 NR Description: expansin [Pyrus communis]
  misc_feature (17)..(257): Homolog of NCBI NO: 13898655 NR Description: expansin [Prunus cerasus]
  misc_feature (14)..(257): Homolog of NCBI NO: 29466643 NR Description: expansin [Prunus persica]
  misc_feature (1)..(257): Homolog of NCBI NO: 15233283 NR Description: expansin, putative (EXP16) [Arabidopsis thaliana]
  misc_feature (1)..(257): Homolog of NCBI NO: 21553844 NR Description: Alpha-expansin 4 precursor (At-EXP4) (AtEx4)
  misc_feature (1)..(257): Homolog of NCBI NO: 15225530 NR Description: expansin, putative (EXP4) [Arabidopsis thaliana]

SEQ ID NO: 33887 - protein, 210 aa, Arabidopsis thaliana; identical to SEQ ID NO: 30297
  peptide (1)..(210): Ceres Seq. ID no. 13497167
  misc_feature (117)..(194): Pfam Name: Pollen allergen Pfam Description: Pollen allergen
  misc_feature (1)..(210): Homolog of NCBI NO: 15227005 NR Description: expansin, putative [Arabidopsis thaliana]
  misc_feature (1)..(210): Homolog of NCBI NO: 20502786 NR Description: expansin 12 precursor [Rumex palustris]
  misc_feature (1)..(210): Homolog of NCBI NO: 20502784 NR Description: expansin 11 precursor [Rumex palustris]
  misc_feature (1)..(210): Homolog of NCBI NO: 38046726 NR Description: alpha-expansin 1 [Populus tremula x Populus
  misc_feature (1)..(210): Homolog of NCBI NO: 29467595 NR Description: expansin [Pyrus communis]
  misc_feature (1)..(210): Homolog of NCBI NO: 13898655 NR Description: expansin [Prunus cerasus]
  misc_feature (1)..(210): Homolog of NCBI NO: 29466643 NR Description: expansin [Prunus persica]
  misc_feature (1)..(210): Homolog of NCBI NO: 15233283 NR Description: expansin, putative (EXP16) [Arabidopsis thaliana]
  misc_feature (1)..(210): Homolog of NCBI NO: 21553844 NR Description: Alpha-expansin 4 precursor (At-EXP4) (AtEx4)
  misc_feature (1)..(210): Homolog of NCBI NO: 15225530 NR Description: expansin, putative (EXP4) [Arabidopsis thaliana]

SEQ ID NO: 33888 - protein, 180 aa, Arabidopsis thaliana; identical to SEQ ID NO: 30298
  peptide (1)..(180): Ceres Seq. ID no. 13497168
  misc_feature (87)..(164): Pfam Name: Pollen allergen Pfam Description: Pollen allergen
  misc_feature (1)..(180): Homolog of NCBI NO: 15227005 NR Description: expansin, putative [Arabidopsis thaliana]
  misc_feature (1)..(180): Homolog of NCBI NO: 20502786 NR Description: expansin 12 precursor [Rumex palustris]
  misc_feature (1)..(180): Homolog of NCBI NO: 20502784 NR Description: expansin 11 precursor [Rumex palustris]
  misc_feature (1)..(180): Homolog of NCBI NO: 38046726 NR Description: alpha-expansin 1 [Populus tremula x Populus
  misc_feature (1)..(180): Homolog of NCBI NO: 29467595 NR Description: expansin [Pyrus communis]
  misc_feature (1)..(180): Homolog of NCBI NO: 13898655 NR Description: expansin [Prunus cerasus]
  misc_feature (1)..(180): Homolog of NCBI NO: 29466643 NR Description: expansin [Prunus persica]
  misc_feature (1)..(180): Homolog of NCBI NO: 15233283 NR Description: expansin, putative (EXP16) [Arabidopsis thaliana]
  misc_feature (1)..(180): Homolog of NCBI NO: 21553844 NR Description: Alpha-expansin 4 precursor (At-EXP4) (AtEx4)
  misc_feature (1)..(180): Homolog of NCBI NO: 15225530 NR Description: expansin, putative (EXP4) [Arabidopsis thaliana]

SEQ ID NO: 33889 - DNA, 836 bp, Arabidopsis thaliana; identical to SEQ ID NO: 30299
  misc_feature (1)..(836): Ceres Seq. ID no. 13490390
  misc_feature: MA Experiment ID: 108473 Result: Down-regulated in Transcription
  misc_feature: MA Experiment 108473 PARAMETER Experiment Name: At_Drought_Flowers_cDNA_P Parameter: Timepoint (hr) Value: 7 d
  misc_feature: MA Experiment 108473 PARAMETER Experiment Name: At_Drought_Flowers_cDNA_P Parameter: Tissue Value: Flower
  misc_feature: MA Experiment 108473 PARAMETER Experiment Name: At_Drought_Flowers_cDNA_P Parameter: Treatment Value: Drought vs. No Drought
  misc_feature: MA Experiment ID: 108501 Result: Down-regulated in Transcription
  misc_feature: MA Experiment 108501 PARAMETER Experiment Name: At_ap2_floral_buds_cDNA_P Parameter: Plant Line Value: ap2 (Ler.)
  misc_feature: MA Experiment 108501 PARAMETER Experiment Name: At_ap2_floral_buds_cDNA_P Parameter: Tissue Value: Closed Flower
  misc_feature: MA Experiment ID: 108667 Result: Down-regulated in Transcription
  misc_feature: MA Experiment 108667 PARAMETER Experiment Name: At_2mM_SA_cDNA_P Parameter: Plant Line Value: WS
  misc_feature: MA Experiment 108667 PARAMETER Experiment Name: At_2mM_SA_cDNA_P Parameter: Timepoint (hr) Value: 1
  misc_feature: MA Experiment 108667 PARAMETER Experiment Name: At_2mM_SA_cDNA_P Parameter: Treatment Value: 2mM SA vs. No Treatment
  misc_feature: MA Experiment ID: 20000184 Result: Down-regulated in Transcription
  misc_feature: MA Experiment 20000184 PARAMETER Experiment Name: At_Shoots__P Parameter: Age (day) Value: 7
  misc_feature: MA Experiment 20000184 PARAMETER Experiment Name: At_Shoots__P Parameter: Tissue Value: Shoots vs. Whole Plant
  misc_feature: MA Experiment ID: 20000234 Result: Down-regulated in Transcription
  misc_feature: MA Experiment 20000234 PARAMETER Experiment Name: At_Siliques_P Parameter: Age (day) Value: 21
  misc_feature: MA Experiment 20000234 PARAMETER Experiment Name: At_Siliques_P Parameter: Organism Value: A. thaliana
  misc_feature: MA Experiment 20000234 PARAMETER Experiment Name: At_Siliques_P Parameter: Plant Line Value: WS
  misc_feature: MA Experiment 20000234 PARAMETER Experiment Name: At_Siliques_P Parameter: Tissue Value: Less Than 5mm Siliques vs. Whole Plant
  misc_feature: MA Experiment ID: 20000235 Result: Down-regulated in Transcription
  misc_feature: MA Experiment 20000235 PARAMETER Experiment Name: At_Siliques_P Parameter: Age (day) Value: 21
  misc_feature: MA Experiment 20000235 PARAMETER Experiment Name: At_Siliques_P Parameter: Organism Value: A. thaliana
  misc_feature: MA Experiment 20000235 PARAMETER Experiment Name: At_Siliques_P Parameter: Plant Line Value: WS
  misc_feature: MA Experiment 20000235 PARAMETER Experiment Name: At_Siliques_P Parameter: Tissue Value: 5-10mm Siliques vs. Whole Plant
  misc_feature: MA Experiment ID: 20000265 Result: Up-regulated in Transcription
  misc_feature: MA Experiment 20000265 PARAMETER Experiment Name: At_Open_Flower_P Parameter: Age (day) Value: 21
  misc_feature: MA Experiment 20000265 PARAMETER Experiment Name: At_Open_Flower_P Parameter: Plant Line Value: WS
  misc_feature: MA Experiment 20000265 PARAMETER Experiment Name: At_Open_Flower_P Parameter: Tissue Value: Closed Flower vs. Whole Plant
  misc_feature: MA Experiment ID: 20000286 Result: Up-regulated in Transcription
  misc_feature: MA Experiment 20000286 PARAMETER Experiment Name: At_Open_Flower_P Parameter: Age (day) Value: 21
  misc_feature: MA Experiment 20000286 PARAMETER Experiment Name: At_Open_Flower_P Parameter: Plant Line Value: WS
  misc_feature: MA Experiment 20000286 PARAMETER Experiment Name: At_Open_Flower_P Parameter: Tissue Value: Half Open vs. Whole Plant
  misc_feature: MA Experiment ID: 20000438 Result: Down-regulated in Transcription
  misc_feature: MA Experiment 20000438 PARAMETER Experiment Name: At_Shoots__P Parameter: Age (day) Value: 14
  misc_feature: MA Experiment 20000438 PARAMETER Experiment Name: At_Shoots__P Parameter: Tissue Value: Shoots vs. Whole Plant
  misc_feature: MA Experiment ID: 20000439 Result: Down-regulated in Transcription
  misc_feature: MA Experiment 20000439 PARAMETER Experiment Name: At_Roots__P Parameter: Age (day) Value: 14 vs. 21
  misc_feature: MA Experiment 20000439 PARAMETER Experiment Name: At_Roots__P Parameter: Organism Value: A. thaliana
  misc_feature: MA Experiment 20000439 PARAMETER Experiment Name: At_Roots__P Parameter: Tissue Value: Roots vs. Whole Plant
  misc_feature: MA Experiment ID: 20001760 Result: Up-regulated in Transcription
  misc_feature: MA Experiment 20001760 PARAMETER Experiment Name: At_50mM_NH4NO3_L-to-H_P Parameter: Timepoint (hr) Value: 2
  misc_feature: MA Experiment 20001760 PARAMETER Experiment Name: At_50mM_NH4NO3_L-to-H_P Parameter: Tissue Value: Siliques
  misc_feature: MA Experiment 20001760 PARAMETER Experiment Name: At_50mM_NH4NO3_L-to-H_P Parameter: Treatment Value: 50mM NH4NO3 vs 100mM Mannitol
  misc_feature: MA Experiment ID: 20001761 Result: Up-regulated in Transcription
  misc_feature: MA Experiment 20001761 PARAMETER Experiment Name: At_50mM_NH4NO3_L-to-H_P Parameter: Timepoint (hr) Value: 4
  misc_feature: MA Experiment 20001761 PARAMETER Experiment Name: At_50mM_NH4NO3_L-to-H_P Parameter: Tissue Value: Siliques
  misc_feature: MA Experiment 20001761 PARAMETER Experiment Name: At_50mM_NH4NO3_L-to-H_P Parameter: Treatment Value: 50mM NH4NO3 vs 100mM Mannitol
  misc_feature: MA Experiment ID: 20001773 Result: Up-regulated in Transcription
  misc_feature: MA Experiment 20001773 PARAMETER Experiment Name: At_Far-red-enriched-adult_P Parameter: Age (day) Value: 30
  misc_feature: MA Experiment 20001773 PARAMETER Experiment Name: At_Far-red-enriched-adult_P Parameter: Light Value: Far-red enriched vs. White
  misc_feature: MA Experiment 20001773 PARAMETER Experiment Name: At_Far-red-enriched-adult_P Parameter: Organism Value: A. thaliana
  misc_feature: MA Experiment 20001773 PARAMETER Experiment Name: At_Far-red-enriched-adult_P Parameter: Plant Line Value: Columbia
  misc_feature: MA Experiment 20001773 PARAMETER Experiment Name: At_Far-red-enriched-adult_P Parameter: Timepoint (hr) Value: 48
  misc_feature: MA Experiment 20001773 PARAMETER Experiment Name: At_Far-red-enriched-adult_P Parameter: Tissue Value: Aerial
  misc_feature: MA Experiment ID: 20001910 Result: Down-regulated in Transcription
  misc_feature: MA Experiment 20001910 PARAMETER Experiment Name: At_Drought_Reproduction_P Parameter: Age (day) Value: 37
  misc_feature: MA Experiment 20001910 PARAMETER Experiment Name: At_Drought_Reproduction_P Parameter: Organism Value: A. thaliana
  misc_feature: MA Experiment 20001910 PARAMETER Experiment Name: At_Drought_Reproduction_P Parameter: Plant Line Value: WS
  misc_feature: MA Experiment 20001910 PARAMETER Experiment Name: At_Drought_Reproduction_P Parameter: Timepoint (day) Value: 7
  misc_feature: MA Experiment 20001910 PARAMETER Experiment Name: At_Drought_Reproduction_P Parameter: Tissue Value: Flowers
  misc_feature: MA Experiment 20001910 PARAMETER Experiment Name: At_Drought_Reproduction_P Parameter: Treatment Value: Drought vs. No Drought

SEQ ID NO: 33890 - protein, 199 aa, Arabidopsis thaliana; identical to SEQ ID NO: 30300
  peptide (1)..(199): Ceres Seq. ID no. 13490391
  misc_feature (4)..(68): Pfam Name: AP2 domain Pfam Description: AP2 domain
  misc_feature (5)..(95): Homolog of NCBI NO: 38346619 NR Description: OSJNBa0074L08.10 [Oryza sativa (japonica
  misc_feature (5)..(82): Homolog of NCBI NO: 131754 NR Description: PPLZ02 PROTEIN
  misc_feature (6)..(67): Homolog of NCBI NO: 38343976 NR Description: OSJNBb0022F16.15 [Oryza sativa (japonica
  misc_feature (5)..(101): Homolog of NCBI NO: 18650662 NR Description: ethylene response factor 1 [Lycopersicon
  misc_feature (5)..(101): Homolog of NCBI NO: 15238727 NR Description: ethylene responsive element binding protein,
  misc_feature (1)..(147): Homolog of NCBI NO: 15239413 NR Description: AP2 domain transcription factor, putative
  misc_feature (1)..(197): Homolog of NCBI NO: 30689846 NR Description: AP2 domain transcription factor, putative
  misc_feature (1)..(197): Homolog of NCBI NO: 15238976 NR Description: putative protein; protein id: At5g11190.1
  misc_feature (1)..(199): Homolog of NCBI NO: 21553845 NR Description: putative ethylene responsive element [Arabidopsis
  misc_feature (1)..(199): Homolog of NCBI NO: 15218134 NR Description: ethylene responsive element binding factor 2

SEQ ID NO: 33891 - protein, 147 aa, Arabidopsis thaliana; identical to SEQ ID NO: 30301
  peptide (1)..(147): Ceres Seq. ID no. 13490392
  misc_feature (1)..(43): Homolog of NCBI NO: 38346619 NR Description: OSJNBa0074L08.10 [Oryza sativa (japonica
  misc_feature (1)..(30): Homolog of NCBI NO: 131754 NR Description: PPLZ02 PROTEIN
  misc_feature (1)..(15): Homolog of NCBI NO: 38343976 NR Description: OSJNBb0022F16.15 [Oryza sativa (japonica
  misc_feature (1)..(49): Homolog of NCBI NO: 18650662 NR Description: ethylene response factor 1 [Lycopersicon
  misc_feature (1)..(49): Homolog of NCBI NO: 15238727 NR Description: ethylene responsive element binding protein,
  misc_feature (1)..(95): Homolog of NCBI NO: 15239413 NR Description: AP2 domain transcription factor, putative
  misc_feature (1)..(145): Homolog of NCBI NO: 30689846 NR Description: AP2 domain transcription factor, putative
  misc_feature (1)..(145): Homolog of NCBI NO: 15238976 NR Description: putative protein; protein id: At5g11190.1
  misc_feature (1)..(147): Homolog of NCBI NO: 21553845 NR Description: putative ethylene responsive element [Arabidopsis
  misc_feature (1)..(147): Homolog of NCBI NO: 15218134 NR Description: ethylene responsive element binding factor 2

SEQ ID NO: 33892 - protein, 115 aa, Arabidopsis thaliana; identical to SEQ ID NO: 30302
  peptide (1)..(115): Ceres Seq. ID no. 13490393
  misc_feature (1)..(88): Homolog of NCBI NO: 32140997 NR Description: DRE binding factor 2 [Oryza sativa (japonica
  misc_feature (1)..(88): Homolog of NCBI NO: 27436378 NR Description: dehydration-responsive element binding protein 3
  misc_feature (1)..(11): Homolog of NCBI NO: 38346619 NR Description: OSJNBa0074L08.10 [Oryza sativa (japonica
  misc_feature (1)..(17): Homolog of NCBI NO: 18650662 NR Description: ethylene response factor 1 [Lycopersicon
  misc_feature (1)..(17): Homolog of NCBI NO: 15238727 NR Description: ethylene responsive element binding protein,
  misc_feature (1)..(63): Homolog of NCBI NO: 15239413 NR Description: AP2 domain transcription factor, putative
  misc_feature (1)..(113): Homolog of NCBI NO: 30689846 NR Description: AP2 domain transcription factor, putative
  misc_feature (1)..(113): Homolog of NCBI NO: 15238976 NR Description: putative protein; protein id: At5g11190.1
  misc_feature (1)..(115): Homolog of NCBI NO: 21553845 NR Description: putative ethylene responsive element [Arabidopsis
  misc_feature (1)..(115): Homolog of NCBI NO: 15218134 NR Description: ethylene responsive element binding factor 2

SEQ ID NO: 33893 - DNA, 762 bp, Arabidopsis thaliana; identical to SEQ ID NO: 30303
  misc_feature (1)..(762): Ceres Seq. ID no. 13490575
  misc_feature: MA Experiment ID: 108573 Result: Up-regulated in Transcription
  misc_feature: MA Experiment 108573 PARAMETER Experiment Name: At_Drought_cDNA_P Parameter: Timepoint (hr) Value: 6
  misc_feature: MA Experiment 108573 PARAMETER Experiment Name: At_Drought_cDNA_P Parameter: Tissue Value: Aerial
  misc_feature: MA Experiment 108573 PARAMETER Experiment Name: At_Drought_cDNA_P Parameter: Treatment Value: Drought vs. No Drought
  misc_feature: MA Experiment ID: 108595 Result: Down-regulated in Transcription
  misc_feature: MA Experiment 108595 PARAMETER Experiment Name: At_Ler-pi_Ovule_cDNA_P Parameter: Plant Line Value: null
  misc_feature: MA Experiment ID: 20000224 Result: Down-regulated in Transcription
  misc_feature: MA Experiment ID: 20000794 Result: Down-regulated in Transcription
  misc_feature: MA Experiment 20000794 PARAMETER Experiment Name: At_Petals_P Parameter: Age (day) Value: 23-25 days
  misc_feature: MA Experiment 20000794 PARAMETER Experiment Name: At_Petals_P Parameter: Plant Line Value: WS
  misc_feature: MA Experiment 20000794 PARAMETER Experiment Name: At_Petals_P Parameter: Tissue Value: Petals vs. Whole plant

SEQ ID NO: 33894 - protein, 154 aa, Arabidopsis thaliana; identical to SEQ ID NO: 30304
  peptide (1)..(154): Ceres Seq. ID no. 13490576
  misc_feature (1)..(154): Homolog of NCBI NO: 21554941 NR Description: unknown [Arabidopsis thaliana]
  misc_feature (1)..(154): Homolog of NCBI NO: 15238662 NR Description: expressed protein [Arabidopsis thaliana]

SEQ ID NO: 33895 - protein, 90 aa, Arabidopsis thaliana; identical to SEQ ID NO: 30305
  peptide (1)..(90): Ceres Seq. ID no. 13490577
  misc_feature (1)..(90): Homolog of NCBI NO: 21554941 NR Description: unknown [Arabidopsis thaliana]
  misc_feature (1)..(90): Homolog of NCBI NO: 15238662 NR Description: expressed protein [Arabidopsis thaliana]

SEQ ID NO: 33896 - DNA, 1910 bp, Arabidopsis thaliana; identical to SEQ ID NO: 30306
  misc_feature (1)..(1910): Ceres Seq. ID no. 13509014
  misc_feature: MA Experiment ID: 108461 Result: Down-regulated in Transcription
  misc_feature: MA Experiment 108461 PARAMETER Experiment Name: At_Germinating_Seeds_cDNA_P Parameter: Age (day) Value: 1 vs. 0
  misc_feature: MA Experiment 108461 PARAMETER Experiment Name: At_Germinating_Seeds_cDNA_P Parameter: Tissue Value: Germinating Seeds
  misc_feature: MA Experiment ID: 108462 Result: Down-regulated in Transcription
  misc_feature: MA Experiment 108462 PARAMETER Experiment Name: At_Germinating_Seeds_cDNA_P Parameter: Age (day) Value: 2 vs. 0
  misc_feature: MA Experiment 108462 PARAMETER Experiment Name: At_Germinating_Seeds_cDNA_P Parameter: Tissue Value: Germinating Seeds
  misc_feature: MA Experiment ID: 108464 Result: Down-regulated in Transcription
  misc_feature: MA Experiment 108464 PARAMETER Experiment Name: At_Germinating_Seeds_cDNA_P Parameter: Age (day) Value: 4 vs. 0
  misc_feature: MA Experiment 108464 PARAMETER Experiment Name: At_Germinating_Seeds_cDNA_P Parameter: Tissue Value: Germinating Seeds
  misc_feature: MA Experiment ID: 20000089 Result: Down-regulated in Transcription
  misc_feature: MA Experiment ID: 20000171 Result: Down-regulated in Transcription
  misc_feature: MA Experiment 20000171 PARAMETER Experiment Name: At_42deg_Heat_P Parameter: Age (day) Value: 14
  misc_feature: MA Experiment 20000171 PARAMETER Experiment Name: At_42deg_Heat_P Parameter: Organism Value: A. thaliana
  misc_feature: MA Experiment 20000171 PARAMETER Experiment Name: At_42deg_Heat_P Parameter: Plant Line Value: WS
  misc_feature: MA Experiment 20000171 PARAMETER Experiment Name: At_42deg_Heat_P Parameter: Temperature (deg C) Value: 42 vs. 22
  misc_feature: MA Experiment 20000171 PARAMETER Experiment Name: At_42deg_Heat_P Parameter: Timepoint (hr) Value: 1
  misc_feature: MA Experiment 20000171 PARAMETER Experiment Name: At_42deg_Heat_P Parameter: Tissue Value: Aerial
  misc_feature: MA Experiment ID: 20000179 Result: Up-regulated in Transcription
  misc_feature: MA Experiment 20000179 PARAMETER Experiment Name: At_Germinating_Seeds_P Parameter: Age (hr) Value: 6 vs. 0
  misc_feature: MA Experiment 20000179 PARAMETER Experiment Name: At_Germinating_Seeds_P Parameter: Tissue Value: Germinating Seeds
  misc_feature: MA Experiment ID: 20000185 Result: Down-regulated in Transcription
  misc_feature: MA Experiment 20000185 PARAMETER Experiment Name: At_Roots__P Parameter: Age (day) Value: 7 vs. 21
  misc_feature: MA Experiment 20000185 PARAMETER Experiment Name: At_Roots__P Parameter: Organism Value: A. thaliana
  misc_feature: MA Experiment 20000185 PARAMETER Experiment Name: At_Roots__P Parameter: Tissue Value: Roots vs. Whole Plant
  misc_feature: MA Experiment ID: 20000227 Result: Down-regulated in Transcription
  misc_feature: MA Experiment 20000227 PARAMETER Experiment Name: At_Root-Tips-vs-Tops_P Parameter: Tissue Value: Root Tips vs. Root Tops
  misc_feature: MA Experiment ID: 20000437 Result: Down-regulated in Transcription
  misc_feature: MA Experiment 20000437 PARAMETER Experiment Name: At_Drought_P Parameter: Age (day) Value: 8
  misc_feature: MA Experiment 20000437 PARAMETER Experiment Name: At_Drought_P Parameter: Organism Value: A. thaliana
  misc_feature: MA Experiment 20000437 PARAMETER Experiment Name: At_Drought_P Parameter: Plant Line Value: WS
  misc_feature: MA Experiment 20000437 PARAMETER Experiment Name: At_Drought_P Parameter: Timepoint (hr) Value: 24
  misc_feature: MA Experiment 20000437 PARAMETER Experiment Name: At_Drought_P Parameter: Tissue Value: Whole Plant
  misc_feature: MA Experiment 20000437 PARAMETER Experiment Name: At_Drought_P Parameter: Treatment Value: Drought vs. No Drought
  misc_feature: MA Experiment ID: 20000439 Result: Down-regulated in Transcription
  misc_feature: MA Experiment 20000439 PARAMETER Experiment Name: At_Roots__P Parameter: Age (day) Value: 14 vs. 21
  misc_feature: MA Experiment 20000439 PARAMETER Experiment Name: At_Roots__P Parameter: Organism Value: A. thaliana
  misc_feature: MA Experiment 20000439 PARAMETER Experiment Name: At_Roots__P Parameter: Tissue Value: Roots vs. Whole Plant
  misc_feature: MA Experiment ID: 20000495 Result: Down-regulated in Transcription
  misc_feature: MA Experiment 20000495 PARAMETER Experiment Name: At_Guard_Cells_P Parameter: Harvest Date Value: 8/2/2002
  misc_feature: MA Experiment 20000495 PARAMETER Experiment Name: At_Guard_Cells_P Parameter: Organism Value: A. thaliana
  misc_feature: MA Experiment 20000495 PARAMETER Experiment Name: At_Guard_Cells_P Parameter: Tissue Value: Guard Cells vs. Leaves
  misc_feature: MA Experiment ID: 20000573 Result: Down-regulated in Transcription
  misc_feature: MA Experiment 20000573 PARAMETER Experiment Name: At_100uM_ABA_Mutants__P Parameter: Organism Value: A. thaliana
  misc_feature: MA Experiment 20000573 PARAMETER Experiment Name: At_100uM_ABA_Mutants__P Parameter: Plant Line Value: CS22 vs. Ler wt
  misc_feature: MA Experiment 20000573 PARAMETER Experiment Name: At_100uM_ABA_Mutants__P Parameter: Timepoint (hr) Value: N/A
  misc_feature: MA Experiment 20000573 PARAMETER Experiment Name: At_100uM_ABA_Mutants__P Parameter: Tissue Value: Whole Plant
  misc_feature: MA Experiment 20000573 PARAMETER Experiment Name: At_100uM_ABA_Mutants__P Parameter: Treatment Value: None
  misc_feature: MA Experiment ID: 20000574 Result: Down-regulated in Transcription
  misc_feature: MA Experiment 20000574 PARAMETER Experiment Name: At_100uM_ABA_Mutants__P Parameter: Organism Value: A. thaliana
  misc_feature: MA Experiment 20000574 PARAMETER Experiment Name: At_100uM_ABA_Mutants__P Parameter: Plant Line Value: CS23 vs. Ler wt
  misc_feature: MA Experiment 20000574 PARAMETER Experiment Name: At_100uM_ABA_Mutants__P Parameter: Timepoint (hr) Value: N/A
  misc_feature: MA Experiment 20000574 PARAMETER Experiment Name: At_100uM_ABA_Mutants__P Parameter: Tissue Value: Whole Plant
  misc_feature: MA Experiment 20000574 PARAMETER Experiment Name: At_100uM_ABA_Mutants__P Parameter: Treatment Value: None
  misc_feature: MA Experiment ID: 20001248 Result: Down-regulated in Transcription
  misc_feature: MA Experiment 20001248 PARAMETER Experiment Name: At_Far-red-induction_P Parameter: Age (day) Value: 7
  misc_feature: MA Experiment 20001248 PARAMETER Experiment Name: At_Far-red-induction_P Parameter: Light Value: Far-red vs. White
  misc_feature: MA Experiment 20001248 PARAMETER Experiment Name: At_Far-red-induction_P Parameter: Organism Value: A. thaliana
  misc_feature: MA Experiment 20001248 PARAMETER Experiment Name: At_Far-red-induction_P Parameter: Plant Line Value: Columbia
  misc_feature: MA Experiment 20001248 PARAMETER Experiment Name: At_Far-red-induction_P Parameter: Timepoint (hr) Value: 4
  misc_feature: MA Experiment 20001248 PARAMETER Experiment Name: At_Far-red-induction_P Parameter: Tissue Value: Whole Plant
  misc_feature: MA Experiment ID: 20001560 Result: Down-regulated in Transcription
  misc_feature: MA Experiment 20001560 PARAMETER Experiment Name: At_Drought_Soil_Dry_P Parameter: Age (day) Value: 28
  misc_feature: MA Experiment 20001560 PARAMETER Experiment Name: At_Drought_Soil_Dry_P Parameter: Organism Value: A. thaliana
  misc_feature: MA Experiment 20001560 PARAMETER Experiment Name: At_Drought_Soil_Dry_P Parameter: Plant Line Value: WS
  misc_feature: MA Experiment 20001560 PARAMETER Experiment Name: At_Drought_Soil_Dry_P Parameter: Post Timepoint (hr) Value: None
  misc_feature: MA Experiment 20001560 PARAMETER Experiment Name: At_Drought_Soil_Dry_P Parameter: Post-Treatment Value: None
  misc_feature: MA Experiment 20001560 PARAMETER Experiment Name: At_Drought_Soil_Dry_P Parameter: Timepoint (day) Value: 14
  misc_feature: MA Experiment 20001560 PARAMETER Experiment Name: At_Drought_Soil_Dry_P Parameter: Treatment Value: Drought vs. No Drought
  misc_feature: MA Experiment ID: 20001905 Result: Down-regulated in Transcription
  misc_feature: MA Experiment 20001905 PARAMETER Experiment Name: At_Drought_Reproduction_P Parameter: Age (day) Value: 40
  misc_feature: MA Experiment 20001905 PARAMETER Experiment Name: At_Drought_Reproduction_P Parameter: Organism Value: A. thaliana
  misc_feature: MA Experiment 20001905 PARAMETER Experiment Name: At_Drought_Reproduction_P Parameter: Plant Line Value: WS
  misc_feature: MA Experiment 20001905 PARAMETER Experiment Name: At_Drought_Reproduction_P Parameter: Timepoint (day) Value: 10
  misc_feature: MA Experiment 20001905 PARAMETER Experiment Name: At_Drought_Reproduction_P Parameter: Tissue Value: Rosettes
  misc_feature: MA Experiment 20001905 PARAMETER Experiment Name: At_Drought_Reproduction_P Parameter: Treatment Value: Drought vs. No Drought

SEQ ID NO: 33897 - protein, 510 aa, Arabidopsis thaliana; identical to SEQ ID NO: 30307
  peptide (1)..(510): Ceres Seq. ID no. 13509015
  misc_feature (120)..(508): Pfam Name: Eukaryotic aspartyl protease Pfam Description: Eukaryotic aspartyl protease
  misc_feature (120)..(508): Pfam Name: Eukaryotic aspartyl protease Pfam Description: Eukaryotic aspartyl protease
  misc_feature (120)..(508): Pfam Name: Eukaryotic aspartyl protease Pfam Description: Eukaryotic aspartyl protease
  misc_feature (120)..(508): Pfam Name: Eukaryotic aspartyl protease Pfam Description: Eukaryotic aspartyl protease
  misc_feature (86)..(510): Homolog of NCBI NO: 15290061 NR Description: nucleoid DNA-binding protein cnd41-like protein
  misc_feature (52)..(510): Homolog of NCBI NO: 15228618 NR Description: expressed protein [Arabidopsis thaliana]
  misc_feature (116)..(510): Homolog of NCBI NO: 15231010 NR Description: expressed protein [Arabidopsis thaliana]
  misc_feature (64)..(510): Homolog of NCBI NO: 21594980 NR Description: chloroplast nucleoid DNA binding protein,
  misc_feature (64)..(510): Homolog of NCBI NO: 15223368 NR Description: chloroplast nucleoid DNA binding protein -related
  misc_feature (86)..(510): Homolog of NCBI NO: 15290061 NR Description: nucleoid DNA-binding protein cnd41-like protein
  misc_feature (116)..(510): Homolog of NCBI NO: 15231010 NR Description: expressed protein [Arabidopsis thaliana]
  misc_feature (64)..(510): Homolog of NCBI NO: 15223368 NR Description: chloroplast nucleoid DNA binding protein -related
  misc_feature (64)..(510): Homolog of NCBI NO: 21594980 NR Description: chloroplast nucleoid DNA binding protein,
  misc_feature (116)..(510): Homolog of NCBI NO: 15231010 NR Description: expressed protein [Arabidopsis thaliana]
  misc_feature (52)..(510): Homolog of NCBI NO: 15228618 NR Description: expressed protein [Arabidopsis thaliana]
  misc_feature (86)..(510): Homolog of NCBI NO: 15290061 NR Description: nucleoid DNA-binding protein cnd41-like protein
  misc_feature (11)..(510): Homolog of NCBI NO: 15229656 NR Description: chloroplast nucleoid DNA-binding protein -related
  misc_feature (11)..(510): Homolog of NCBI NO: 19424106 NR Description: putative chloroplast nucleoid DNA-binding protein
  misc_feature (28)..(510): Homolog of NCBI NO: 15222611 NR Description: expressed protein [Arabidopsis thaliana]
  misc_feature (14)..(510): Homolog of NCBI NO: 34895664 NR Description: nucleoid DNA-binding protein cnd41-like protein
  misc_feature (53)..(510): Homolog of NCBI NO: 28392860 NR Description: unknown protein [Arabidopsis thaliana]
  misc_feature (11)..(510): Homolog of NCBI NO: 15229656 NR Description: chloroplast nucleoid DNA-binding protein -related
  misc_feature (11)..(510): Homolog of NCBI NO: 19424106 NR Description: putative chloroplast nucleoid DNA-binding protein
  misc_feature (28)..(510): Homolog of NCBI NO: 15222611 NR Description: expressed protein [Arabidopsis thaliana]
  misc_feature (14)..(510): Homolog of NCBI NO: 34895664 NR Description: nucleoid DNA-binding protein cnd41-like protein
  misc_feature (53)..(510): Homolog of NCBI NO: 28392860 NR Description: unknown protein [Arabidopsis thaliana]
  misc_feature (64)..(510): Homolog of NCBI NO: 15223368 NR Description: chloroplast nucleoid DNA binding protein -related
  misc_feature (64)..(510): Homolog of NCBI NO: 21594980 NR Description: chloroplast nucleoid DNA binding protein,
  misc_feature (116)..(510): Homolog of NCBI NO: 15231010 NR Description: expressed protein [Arabidopsis thaliana]
  misc_feature (52)..(510): Homolog of NCBI NO: 15228618 NR Description: expressed protein [Arabidopsis thaliana]
  misc_feature (86)..(510): Homolog of NCBI NO: 15290061 NR Description: nucleoid DNA-binding protein cnd41-like protein
  misc_feature (11)..(510): Homolog of NCBI NO: 15229656 NR Description: chloroplast nucleoid DNA-binding protein -related
  misc_feature (11)..(510): Homolog of NCBI NO: 19424106 NR Description: putative chloroplast nucleoid DNA-binding protein
  misc_feature (28)..(510): Homolog of NCBI NO: 15222611 NR Description: expressed protein [Arabidopsis thaliana]
  misc_feature (14)..(510): Homolog of NCBI NO: 34895664 NR Description: nucleoid DNA-binding protein cnd41-like protein
  misc_feature (53)..(510): Homolog of NCBI NO: 28392860 NR Description: unknown protein [Arabidopsis thaliana]
  misc_feature (64)..(510): Homolog of NCBI NO: 15223368 NR Description: chloroplast nucleoid DNA binding protein -related
  misc_feature (64)..(510): Homolog of NCBI NO: 21594980 NR Description: chloroplast nucleoid DNA binding protein,
  misc_feature (52)..(510): Homolog of NCBI NO: 15228618 NR Description: expressed protein [Arabidopsis thaliana]
  misc_feature (53)..(510): Homolog of NCBI NO: 28392860 NR Description: unknown protein [Arabidopsis thaliana]
  misc_feature (14)..(510): Homolog of NCBI NO: 34895664 NR Description: nucleoid DNA-binding protein cnd41-like protein
  misc_feature (28)..(510): Homolog of NCBI NO: 15222611 NR Description: expressed protein [Arabidopsis thaliana]
  misc_feature (11)..(510): Homolog of NCBI NO: 19424106 NR Description: putative chloroplast nucleoid DNA-binding protein
  misc_feature (11)..(510): Homolog of NCBI NO: 15229656 NR Description: chloroplast nucleoid DNA-binding protein -related

SEQ ID NO: 33898 - protein, 500 aa, Arabidopsis thaliana [sequence omitted]

SEQ ID NO: 33899 - protein, 326 aa, Arabidopsis thaliana; identical to SEQ ID NO: 30309
  peptide (1)..(326): Ceres Seq. ID no. 13509017
  misc_feature (1)..(324): Pfam Name: Eukaryotic aspartyl protease Pfam Description: Eukaryotic aspartyl protease
  misc_feature (1)..(324): Pfam Name: Eukaryotic aspartyl protease Pfam Description: Eukaryotic aspartyl protease
  misc_feature (1)..(324): Pfam Name: Eukaryotic aspartyl protease Pfam Description: Eukaryotic aspartyl protease
  misc_feature (1)..(324): Pfam Name: Eukaryotic aspartyl protease Pfam Description: Eukaryotic aspartyl protease
  misc_feature (1)..(326): Homolog of NCBI NO: 15290061 NR Description: nucleoid DNA-binding protein cnd41-like protein
  misc_feature (1)..(326): Homolog of NCBI NO: 15228618 NR Description: expressed protein [Arabidopsis thaliana]
  misc_feature (1)..(326): Homolog of NCBI NO: 15231010 NR Description: expressed protein [Arabidopsis thaliana]
  misc_feature (1)..(326): Homolog of NCBI NO: 21594980 NR Description: chloroplast nucleoid DNA binding protein,
  misc_feature (1)..(326): Homolog of NCBI NO: 15223368 NR Description: chloroplast nucleoid DNA binding protein -related
  misc_feature (1)..(326): Homolog of NCBI NO: 15290061 NR Description: nucleoid DNA-binding protein cnd41-like protein
  misc_feature (1)..(326): Homolog of NCBI NO: 15231010 NR Description: expressed protein [Arabidopsis thaliana]
  misc_feature (1)..(326): Homolog of NCBI NO: 15223368 NR Description: chloroplast nucleoid DNA binding protein -related
  misc_feature (1)..(326): Homolog of NCBI NO: 21594980 NR Description: chloroplast nucleoid DNA binding protein,
  misc_feature (1)..(326): Homolog of NCBI NO: 15231010 NR Description: expressed protein [Arabidopsis thaliana]
  misc_feature (1)..(326): Homolog of NCBI NO: 15228618 NR Description: expressed protein [Arabidopsis thaliana]
  misc_feature (1)..(326): Homolog of NCBI NO: 15290061 NR Description: nucleoid DNA-binding protein cnd41-like protein
  misc_feature (1)..(326): Homolog of NCBI NO: 15229656 NR Description: chloroplast nucleoid DNA-binding protein -related
  misc_feature (1)..(326): Homolog of NCBI NO: 19424106 NR Description: putative chloroplast nucleoid DNA-binding protein
  misc_feature (1)..(326): Homolog of NCBI NO: 15222611 NR Description: expressed protein [Arabidopsis thaliana]
  misc_feature (1)..(326): Homolog of NCBI NO: 34895664 NR Description: nucleoid DNA-binding protein cnd41-like protein
  misc_feature (1)..(326): Homolog of NCBI NO: 28392860 NR Description: unknown protein [Arabidopsis thaliana]
  misc_feature (1)..(326): Homolog of NCBI NO: 15229656 NR Description: chloroplast nucleoid DNA-binding protein -related
  misc_feature (1)..(326): Homolog of NCBI NO: 19424106 NR Description: putative chloroplast nucleoid DNA-binding protein
  misc_feature (1)..(326): Homolog of NCBI NO: 15222611 NR Description: expressed protein [Arabidopsis thaliana]
  misc_feature (1)..(326): Homolog of NCBI NO: 34895664 NR Description: nucleoid DNA-binding protein cnd41-like protein
  misc_feature (1)..(326): Homolog of NCBI NO: 28392860 NR Description: unknown protein [Arabidopsis thaliana]
  misc_feature (1)..(326): Homolog of NCBI NO: 15223368 NR Description: chloroplast nucleoid DNA binding protein -related
  misc_feature (1)..(326): Homolog of NCBI NO: 21594980 NR Description: chloroplast nucleoid DNA binding protein,
  misc_feature (1)..(326): Homolog of NCBI NO: 15231010 NR Description: expressed protein [Arabidopsis thaliana]
  misc_feature (1)..(326): Homolog of NCBI NO: 15228618 NR Description: expressed protein [Arabidopsis thaliana]
  misc_feature (1)..(326): Homolog of NCBI NO: 15290061 NR Description: nucleoid DNA-binding protein cnd41-like protein
  misc_feature (1)..(326): Homolog of NCBI NO: 15229656 NR Description: chloroplast nucleoid DNA-binding protein -related
  misc_feature (1)..(326): Homolog of NCBI NO: 19424106 NR Description: putative chloroplast nucleoid DNA-binding protein
  misc_feature (1)..(326): Homolog of NCBI NO: 15222611 NR Description: expressed protein [Arabidopsis thaliana]
  misc_feature (1)..(326): Homolog of NCBI NO: 34895664 NR Description: nucleoid DNA-binding protein cnd41-like protein
  misc_feature (1)..(326): Homolog of NCBI NO: 28392860 NR Description: unknown protein [Arabidopsis thaliana]
  misc_feature (1)..(326): Homolog of NCBI NO: 15223368 NR Description: chloroplast nucleoid DNA binding protein -related
  misc_feature (1)..(326): Homolog of NCBI NO: 21594980 NR Description: chloroplast nucleoid DNA binding protein,
  misc_feature (1)..(326): Homolog of NCBI NO: 15228618 NR Description: expressed protein [Arabidopsis thaliana]
  misc_feature (1)..(326): Homolog of NCBI NO: 28392860 NR Description: unknown protein [Arabidopsis thaliana]
  misc_feature (1)..(326): Homolog of NCBI NO: 34895664 NR Description: nucleoid DNA-binding protein cnd41-like protein
  misc_feature (1)..(326): Homolog of NCBI NO: 15222611 NR Description: expressed protein [Arabidopsis thaliana]
  misc_feature (1)..(326): Homolog of NCBI NO: 19424106 NR Description: putative chloroplast nucleoid DNA-binding protein
  misc_feature (1)..(326): Homolog of NCBI NO: 15229656 NR Description: chloroplast nucleoid DNA-binding protein -related

SEQ ID NO: 33900 - DNA, 1448 bp, Arabidopsis thaliana; identical to SEQ ID NO: 30310
  misc_feature (1)..(1448): Ceres Seq. ID no. 13490608
  misc_feature: MA Experiment ID: 108595 Result: Down-regulated in Transcription
  misc_feature: MA Experiment 108595 PARAMETER Experiment Name: At_Ler-pi_Ovule_cDNA_P Parameter: Plant Line Value: null
  misc_feature: MA Experiment ID: 20000173 Result: Down-regulated in Transcription
  misc_feature: MA Experiment 20000173 PARAMETER Experiment Name: At_42deg_Heat_P Parameter: Age (day) Value: 14
  misc_feature: MA Experiment 20000173 PARAMETER Experiment Name: At_42deg_Heat_P Parameter: Organism Value: A. thaliana
  misc_feature: MA Experiment 20000173 PARAMETER Experiment Name: At_42deg_Heat_P Parameter: Plant Line Value: WS
  misc_feature: MA Experiment 20000173 PARAMETER Experiment Name: At_42deg_Heat_P Parameter: Temperature (deg C) Value: 42 vs. 22
  misc_feature: MA Experiment 20000173 PARAMETER Experiment Name: At_42deg_Heat_P Parameter: Timepoint (hr) Value: 6
  misc_feature: MA Experiment 20000173 PARAMETER Experiment Name: At_42deg_Heat_P Parameter: Tissue Value: Aerial

SEQ ID NO: 33901 - protein, 420 aa, Arabidopsis thaliana; identical to SEQ ID NO: 30311
  peptide (1)..(420): Ceres Seq. ID no. 13490609
  misc_feature (138)..(274): Pfam Name: mce related protein Pfam Description: mce related protein
  misc_feature (131)..(396): Homolog of NCBI NO: 16329641 NR Description: hypothetical protein [Synechocystis sp. PCC 6803]
  misc_feature (323)..(420): Homolog of NCBI NO: 37523684 NR Description: hypothetical protein glr4115 [Gloeobacter
  misc_feature (130)..(352): Homolog of NCBI NO: 37523684 NR Description: hypothetical protein glr4115 [Gloeobacter
  misc_feature (130)..(417): Homolog of NCBI NO: 17227677 NR Description: hypothetical protein [Nostoc sp. PCC 7120]
  misc_feature (131)..(417): Homolog of NCBI NO: 22299950 NR Description: ORF_ID:tll2407~hypothetical protein
  misc_feature (124)..(417): Homolog of NCBI NO: 23128989 NR Description: hypothetical protein [Nostoc punctiforme]
  misc_feature (131)..(407): Homolog of NCBI NO: 23043318 NR Description: hypothetical protein [Trichodesmium erythraeum
  misc_feature (54)..(420): Homolog of NCBI NO: 34906054 NR Description: P0698H10.22 [Oryza sativa (japonica
  misc_feature (58)..(420): Homolog of NCBI NO: 21553847 NR Description: unknown [Arabidopsis thaliana]
  misc_feature (40)..(420): Homolog of NCBI NO: 18402572 NR Description: expressed protein [Arabidopsis thaliana]

SEQ ID NO: 33902 - protein, 381 aa, Arabidopsis thaliana; identical to SEQ ID NO: 30312
  peptide (1)..(381): Ceres Seq. ID no. 13490610
  misc_feature (99)..(235): Pfam Name: mce related protein Pfam Description: mce related protein
  misc_feature (92)..(357): Homolog of NCBI NO: 16329641 NR Description: hypothetical protein [Synechocystis sp. PCC 6803]
  misc_feature (284)..(381): Homolog of NCBI NO: 37523684 NR Description: hypothetical protein glr4115 [Gloeobacter
  misc_feature (91)..(313): Homolog of NCBI NO: 37523684 NR Description: hypothetical protein glr4115 [Gloeobacter
  misc_feature (91)..(378): Homolog of NCBI NO: 17227677 NR Description: hypothetical protein [Nostoc sp. PCC 7120]
  misc_feature (92)..(378): Homolog of NCBI NO: 22299950 NR Description: ORF_ID:tll2407~hypothetical protein
  misc_feature (85)..(378): Homolog of NCBI NO: 23128989 NR Description: hypothetical protein [Nostoc punctiforme]
  misc_feature (92)..(368): Homolog of NCBI NO: 23043318 NR Description: hypothetical protein [Trichodesmium erythraeum
  misc_feature (15)..(381): Homolog of NCBI NO: 34906054 NR Description: P0698H10.22 [Oryza sativa (japonica
  misc_feature (19)..(381): Homolog of NCBI NO: 21553847 NR Description: unknown [Arabidopsis thaliana]
  misc_feature (1)..(381): Homolog of NCBI NO: 18402572 NR Description: expressed protein [Arabidopsis thaliana]

SEQ ID NO: 33903 - protein, 368 aa, Arabidopsis thaliana; identical to SEQ ID NO: 30313
  peptide (1)..(368): Ceres Seq. ID no. 13490611
  misc_feature (86)..(222): Pfam Name: mce related protein Pfam Description: mce related protein
  misc_feature (79)..(344): Homolog of NCBI NO: 16329641 NR Description: hypothetical protein [Synechocystis sp. PCC 6803]
  misc_feature (271)..(368): Homolog of NCBI NO: 37523684 NR Description: hypothetical protein glr4115 [Gloeobacter
  misc_feature (78)..(300): Homolog of NCBI NO: 37523684 NR Description: hypothetical protein glr4115 [Gloeobacter
  misc_feature (78)..(365): Homolog of NCBI NO: 17227677 NR Description: hypothetical protein [Nostoc sp. PCC 7120]
  misc_feature (79)..(365): Homolog of NCBI NO: 22299950 NR Description: ORF_ID:tll2407~hypothetical protein
  misc_feature (72)..(365): Homolog of NCBI NO: 23128989 NR Description: hypothetical protein [Nostoc punctiforme]
  misc_feature (79)..(355): Homolog of NCBI NO: 23043318 NR Description: hypothetical protein [Trichodesmium erythraeum
  misc_feature (2)..(368): Homolog of NCBI NO: 34906054 NR Description: P0698H10.22 [Oryza sativa (japonica
  misc_feature (6)..(368): Homolog of NCBI NO: 21553847 NR Description: unknown [Arabidopsis thaliana]
  misc_feature (1)..(368): Homolog of NCBI NO: 18402572 NR Description: expressed protein [Arabidopsis thaliana]

SEQ ID NO: 33904 - DNA, 1121 bp, Arabidopsis thaliana; identical to SEQ ID NO: 30314
  misc_feature (1)..(1121): Ceres Seq. ID no. 12377558
  misc_feature: MA Experiment ID: 108434 Result: Down-regulated in Transcription
  misc_feature: MA Experiment 108434 PARAMETER Experiment Name: At_Root_Tips_cDNA_P Parameter: Tissue Value: Root Tips
  misc_feature: MA Experiment ID: 108461 Result: Up-regulated in Transcription
  misc_feature: MA Experiment 108461 PARAMETER Experiment Name: At_Germinating_Seeds_cDNA_P Parameter: Age (day) Value: 1 vs. 0
  misc_feature: MA Experiment 108461 PARAMETER Experiment Name: At_Germinating_Seeds_cDNA_P Parameter: Tissue Value: Germinating Seeds
  misc_feature: MA Experiment ID: 108462 Result: Up-regulated in Transcription
  misc_feature: MA Experiment 108462 PARAMETER Experiment Name: At_Germinating_Seeds_cDNA_P Parameter: Age (day) Value: 2 vs. 0
  misc_feature: MA Experiment 108462 PARAMETER Experiment Name: At_Germinating_Seeds_cDNA_P Parameter: Tissue Value: Germinating Seeds
  misc_feature: MA Experiment ID: 108463 Result: Up-regulated in Transcription
  misc_feature: MA Experiment 108463 PARAMETER Experiment Name: At_Germinating_Seeds_cDNA_P Parameter: Age (day) Value: 3 vs. 0
  misc_feature: MA Experiment 108463 PARAMETER Experiment Name: At_Germinating_Seeds_cDNA_P Parameter: Tissue Value: Germinating Seeds
  misc_feature: MA Experiment ID: 108464 Result: Up-regulated in Transcription
  misc_feature: MA Experiment 108464 PARAMETER Experiment Name: At_Germinating_Seeds_cDNA_P Parameter: Age (day) Value: 4 vs. 0
  misc_feature: MA Experiment 108464 PARAMETER Experiment Name: At_Germinating_Seeds_cDNA_P Parameter: Tissue Value: Germinating Seeds
  misc_feature: MA Experiment ID: 108573 Result: Down-regulated in Transcription
  misc_feature: MA Experiment 108573 PARAMETER Experiment Name: At_Drought_cDNA_P Parameter: Timepoint (hr) Value: 6
  misc_feature: MA Experiment 108573 PARAMETER Experiment Name: At_Drought_cDNA_P Parameter: Tissue Value: Aerial
  misc_feature: MA Experiment 108573 PARAMETER Experiment Name: At_Drought_cDNA_P Parameter: Treatment Value: Drought vs. No Drought
  misc_feature: MA Experiment ID: 108577 Result: Down-regulated in Transcription
  misc_feature: MA Experiment 108577 PARAMETER Experiment Name: At_42deg_Heat_cDNA_P Parameter: Temperature (deg C) Value: 42 vs. 22
  misc_feature: MA Experiment 108577 PARAMETER Experiment Name: At_42deg_Heat_cDNA_P Parameter: Timepoint (hr) Value: 6
  misc_feature: MA Experiment 108577 PARAMETER Experiment Name: At_42deg_Heat_cDNA_P Parameter: Tissue Value: Aerial
  misc_feature: MA Experiment ID: 108595 Result: Up-regulated in Transcription
  misc_feature: MA Experiment 108595 PARAMETER Experiment Name: At_Ler-pi_Ovule_cDNA_P Parameter: Plant Line Value: null
  misc_feature: MA Experiment ID: 20000113 Result: Down-regulated in Transcription
  misc_feature: MA Experiment 20000113 PARAMETER Experiment Name: At_42deg_Heat_cDNA_P Parameter: Temperature (deg C) Value: 42 vs. 22
  misc_feature: MA Experiment 20000113 PARAMETER Experiment Name: At_42deg_Heat_cDNA_P Parameter: Timepoint (hr) Value: 8
  misc_feature: MA Experiment 20000113 PARAMETER Experiment Name: At_42deg_Heat_cDNA_P Parameter: Tissue Value: Aerial
  misc_feature: MA Experiment ID: 20000173 Result: Down-regulated in Transcription
  misc_feature: MA Experiment 20000173 PARAMETER Experiment Name: At_42deg_Heat_P Parameter: Age (day) Value: 14
  misc_feature: MA Experiment 20000173 PARAMETER Experiment Name: At_42deg_Heat_P Parameter: Organism Value: A. thaliana
  misc_feature: MA Experiment 20000173 PARAMETER Experiment Name: At_42deg_Heat_P Parameter: Plant Line Value: WS
  misc_feature: MA Experiment 20000173 PARAMETER Experiment Name: At_42deg_Heat_P Parameter: Temperature (deg C) Value: 42 vs. 22
  misc_feature: MA Experiment 20000173 PARAMETER Experiment Name: At_42deg_Heat_P Parameter: Timepoint (hr) Value: 6
  misc_feature: MA Experiment 20000173 PARAMETER Experiment Name: At_42deg_Heat_P Parameter: Tissue Value: Aerial
  misc_feature: MA Experiment ID: 20000185 Result: Down-regulated in Transcription
  misc_feature: MA Experiment 20000185 PARAMETER Experiment Name: At_Roots__P Parameter: Age (day) Value: 7 vs. 21
  misc_feature: MA Experiment 20000185 PARAMETER Experiment Name: At_Roots__P Parameter: Organism Value: A. thaliana
  misc_feature: MA Experiment 20000185 PARAMETER Experiment Name: At_Roots__P Parameter: Tissue Value: Roots vs. Whole Plant
  misc_feature: MA Experiment ID: 20000227 Result: Down-regulated in Transcription
  misc_feature: MA Experiment 20000227 PARAMETER Experiment Name: At_Root-Tips-vs-Tops_P Parameter: Tissue Value: Root Tips vs. Root Tops
  misc_feature: MA Experiment ID: 20000573 Result: Down-regulated in Transcription
  misc_feature: MA Experiment 20000573 PARAMETER Experiment Name: At_100uM_ABA_Mutants__P Parameter: Organism Value: A. thaliana
  misc_feature: MA Experiment 20000573 PARAMETER Experiment Name: At_100uM_ABA_Mutants__P Parameter: Plant Line Value: CS22 vs. Ler wt
  misc_feature: MA Experiment 20000573 PARAMETER Experiment Name: At_100uM_ABA_Mutants__P Parameter: Timepoint (hr) Value: N/A
  misc_feature: MA Experiment 20000573 PARAMETER Experiment Name: At_100uM_ABA_Mutants__P Parameter: Tissue Value: Whole Plant
  misc_feature: MA Experiment 20000573 PARAMETER Experiment Name: At_100uM_ABA_Mutants__P Parameter: Treatment Value: None
  misc_feature: MA Experiment ID: 20000574 Result: Down-regulated in Transcription
  misc_feature: MA Experiment 20000574 PARAMETER Experiment Name: At_100uM_ABA_Mutants__P Parameter: Organism Value: A. thaliana
  misc_feature: MA Experiment 20000574 PARAMETER Experiment Name: At_100uM_ABA_Mutants__P Parameter: Plant Line Value: CS23 vs. Ler wt
  misc_feature: MA Experiment 20000574 PARAMETER Experiment Name: At_100uM_ABA_Mutants__P Parameter: Timepoint (hr) Value: N/A
  misc_feature: MA Experiment 20000574 PARAMETER Experiment Name: At_100uM_ABA_Mutants__P Parameter: Tissue Value: Whole Plant
  misc_feature: MA Experiment 20000574 PARAMETER Experiment Name: At_100uM_ABA_Mutants__P Parameter: Treatment Value: None
  misc_feature: MA Experiment ID: 20000709 Result: Down-regulated in Transcription
  misc_feature: MA Experiment 20000709 PARAMETER Experiment Name: At_15mM_NH4NO3_L-to-H_P Parameter: Age (hr) Value: 14
  misc_feature: MA Experiment 20000709 PARAMETER Experiment Name: At_15mM_NH4NO3_L-to-H_P Parameter: Organism Value: A. thaliana
  misc_feature: MA Experiment 20000709 PARAMETER Experiment Name: At_15mM_NH4NO3_L-to-H_P Parameter: Plant Line Value: WS
  misc_feature: MA Experiment 20000709 PARAMETER Experiment Name: At_15mM_NH4NO3_L-to-H_P Parameter: Timepoint (hr) Value: 4
  misc_feature: MA Experiment 20000709 PARAMETER Experiment Name: At_15mM_NH4NO3_L-to-H_P Parameter: Tissue Value: Aerial
  misc_feature: MA Experiment 20000709 PARAMETER Experiment Name: At_15mM_NH4NO3_L-to-H_P Parameter: Treatment Value: 15mM NH4NO3 vs. 30mM Mannitol
  misc_feature: MA Experiment ID: 20000794 Result: Down-regulated in Transcription
  misc_feature: MA Experiment 20000794 PARAMETER Experiment Name: At_Petals_P Parameter: Age (day) Value: 23-25 days
  misc_feature: MA Experiment 20000794 PARAMETER Experiment Name: At_Petals_P Parameter: Plant Line Value: WS
  misc_feature: MA Experiment 20000794 PARAMETER Experiment Name: At_Petals_P Parameter: Tissue Value: Petals vs. Whole plant
  misc_feature: MA Experiment ID: 20001557 Result: Down-regulated in Transcription
  misc_feature: MA Experiment 20001557 PARAMETER Experiment Name: At_Drought_Soil_Dry_P Parameter: Age (day) Value: 27
  misc_feature: MA Experiment 20001557 PARAMETER Experiment Name: At_Drought_Soil_Dry_P Parameter: Organism Value: A. thaliana
  misc_feature: MA Experiment 20001557 PARAMETER Experiment Name: At_Drought_Soil_Dry_P Parameter: Plant Line Value: WS
  misc_feature: MA Experiment 20001557 PARAMETER Experiment Name: At_Drought_Soil_Dry_P Parameter: Post Timepoint (hr) Value: 3
  misc_feature: MA Experiment 20001557 PARAMETER Experiment Name: At_Drought_Soil_Dry_P Parameter: Post-Treatment Value: Re-Water vs. No Drought
  misc_feature: MA Experiment 20001557 PARAMETER Experiment Name: At_Drought_Soil_Dry_P Parameter: Timepoint (day) Value: 13
  misc_feature: MA Experiment 20001557 PARAMETER Experiment Name: At_Drought_Soil_Dry_P Parameter: Treatment Value: Drought vs. No Drought
  misc_feature: MA Experiment ID: 20001558 Result: Down-regulated in Transcription
  misc_feature: MA Experiment 20001558 PARAMETER Experiment Name: At_Drought_Soil_Dry_P Parameter: Age (day) Value: 27
  misc_feature: MA Experiment 20001558 PARAMETER Experiment Name: At_Drought_Soil_Dry_P Parameter: Organism Value: A. thaliana
  misc_feature: MA Experiment 20001558 PARAMETER Experiment Name: At_Drought_Soil_Dry_P Parameter: Plant Line Value: WS
  misc_feature: MA Experiment 20001558 PARAMETER Experiment Name: At_Drought_Soil_Dry_P Parameter: Post Timepoint (hr) Value: 6
  misc_feature: MA Experiment 20001558 PARAMETER Experiment Name: At_Drought_Soil_Dry_P Parameter: Post-Treatment Value: Re-Water vs. No Drought
  misc_feature: MA Experiment 20001558 PARAMETER Experiment Name: At_Drought_Soil_Dry_P Parameter: Timepoint (day) Value: 13
  misc_feature: MA Experiment 20001558 PARAMETER Experiment Name: At_Drought_Soil_Dry_P Parameter: Treatment Value: Drought vs. No Drought
  misc_feature: MA Experiment ID: 20001560 Result: Down-regulated in Transcription
  misc_feature: MA Experiment 20001560 PARAMETER Experiment Name: At_Drought_Soil_Dry_P Parameter: Age (day) Value: 28
  misc_feature: MA Experiment 20001560 PARAMETER Experiment Name: At_Drought_Soil_Dry_P Parameter: Organism Value: A. thaliana
  misc_feature: MA Experiment 20001560 PARAMETER Experiment Name: At_Drought_Soil_Dry_P Parameter: Plant Line Value: WS
  misc_feature: MA Experiment 20001560 PARAMETER Experiment Name: At_Drought_Soil_Dry_P Parameter: Post Timepoint (hr) Value: None
  misc_feature: MA Experiment 20001560 PARAMETER Experiment Name: At_Drought_Soil_Dry_P Parameter: Post-Treatment Value: None
  misc_feature: MA Experiment 20001560 PARAMETER Experiment Name: At_Drought_Soil_Dry_P Parameter: Timepoint (day) Value: 14
  misc_feature: MA Experiment 20001560 PARAMETER Experiment Name: At_Drought_Soil_Dry_P Parameter: Treatment Value: Drought vs. No Drought
  misc_feature: MA Experiment ID: 20001904 Result: Down-regulated in Transcription
  misc_feature: MA Experiment 20001904 PARAMETER Experiment Name: At_Drought_Reproduction_P Parameter: Age (day) Value: 37
  misc_feature: MA Experiment 20001904 PARAMETER Experiment Name: At_Drought_Reproduction_P Parameter: Organism Value: A. thaliana
  misc_feature: MA Experiment 20001904 PARAMETER Experiment Name: At_Drought_Reproduction_P Parameter: Plant Line Value: WS
  misc_feature: MA Experiment 20001904 PARAMETER Experiment Name: At_Drought_Reproduction_P Parameter: Timepoint (day) Value: 7
  misc_feature: MA Experiment 20001904 PARAMETER Experiment Name: At_Drought_Reproduction_P Parameter: Tissue Value: Rosettes
  misc_feature: MA Experiment 20001904 PARAMETER Experiment Name: At_Drought_Reproduction_P Parameter: Treatment Value: Drought vs. No Drought
  misc_feature: MA Experiment ID: 20001905 Result: Down-regulated in Transcription
  misc_feature: MA Experiment 20001905 PARAMETER Experiment Name: At_Drought_Reproduction_P Parameter: Age (day) Value: 40
  misc_feature: MA Experiment 20001905 PARAMETER Experiment Name: At_Drought_Reproduction_P Parameter: Organism Value: A. thaliana
  misc_feature: MA Experiment 20001905 PARAMETER Experiment Name: At_Drought_Reproduction_P Parameter: Plant Line Value: WS
  misc_feature: MA Experiment 20001905 PARAMETER Experiment Name: At_Drought_Reproduction_P Parameter: Timepoint (day) Value: 10
  misc_feature: MA Experiment 20001905 PARAMETER Experiment Name: At_Drought_Reproduction_P Parameter: Tissue Value: Rosettes
  misc_feature: MA Experiment 20001905 PARAMETER Experiment Name: At_Drought_Reproduction_P Parameter: Treatment Value: Drought vs. No Drought

SEQ ID NO: 33905 - protein, 242 aa, Arabidopsis thaliana; identical to SEQ ID NO: 24833
  peptide (1)..(242): Ceres Seq. ID no. 12377559
  misc_feature (204)..(223): Homolog of NCBI NO: 38567956 NR Description: OSJNBb0115I21.12 [Oryza sativa (japonica
  misc_feature (26)..(98): Homolog of NCBI NO: 38567956 NR Description: OSJNBb0115I21.12 [Oryza sativa (japonica
  misc_feature (26)..(223): Homolog of NCBI NO: 38346468 NR Description: OSJNBa0019G23.16 [Oryza sativa (japonica
  misc_feature (2)..(213): Homolog of NCBI NO: 18767383 NR Description: Hypothetical protein [Oryza sativa]
  misc_feature (1)..(213): Homolog of NCBI NO: 37533376 NR Description: hypothetical protein [Oryza sativa (japonica
  misc_feature (1)..(234): Homolog of NCBI NO: 15222092 NR Description: hypothetical protein; protein id: At1g75060.1
  misc_feature (1)..(242): Homolog of NCBI NO: 18394724 NR Description: expressed protein
  misc_feature (1)..(242): Homolog of NCBI NO: 25372870 NR Description: protein F18O14.5 [imported] - Arabidopsis

SEQ ID NO: 33906 - protein, 130 aa, Arabidopsis thaliana; identical to SEQ ID NO: 24834
  peptide (1)..(130): Ceres Seq. ID no. 12377560
  misc_feature (92)..(111): Homolog of NCBI NO: 38567956 NR Description: OSJNBb0115I21.12 [Oryza sativa (japonica
  misc_feature (1)..(111): Homolog of NCBI NO: 38346468 NR Description: OSJNBa0019G23.16 [Oryza sativa (japonica
  misc_feature (1)..(101): Homolog of NCBI NO: 18767383 NR Description: Hypothetical protein [Oryza sativa]
  misc_feature (1)..(101): Homolog of NCBI NO: 37533376 NR Description: hypothetical protein [Oryza sativa (japonica
  misc_feature (1)..(122): Homolog of NCBI NO: 15222092 NR Description: hypothetical protein; protein id: At1g75060.1
  misc_feature (1)..(130): Homolog of NCBI NO: 18394724 NR Description: expressed protein
  misc_feature (1)..(130): Homolog of NCBI NO: 25372870 NR Description: protein F18O14.5 [imported] - Arabidopsis

SEQ ID NO: 33907 - DNA, 1066 bp, Arabidopsis thaliana; identical to SEQ ID NO: 30317
  misc_feature (1)..(1066): Ceres Seq. ID no. 13488512
  misc_feature: MA Experiment ID: 108569 Result: Up-regulated in Transcription
  misc_feature: MA Experiment 108569 PARAMETER Experiment Name: At_0.001%_MeJA__cDNA_P Parameter: Timepoint (hr) Value: 6
  misc_feature: MA Experiment 108569 PARAMETER Experiment Name: At_0.001%_MeJA__cDNA_P Parameter: Tissue Value: Aerial
  misc_feature: MA Experiment 108569 PARAMETER Experiment Name: At_0.001%_MeJA__cDNA_P Parameter: Treatment Value: 0.001% MeJA vs. No Treatment
  misc_feature: MA Experiment ID: 108573 Result: Up-regulated in Transcription
  misc_feature: MA Experiment 108573 PARAMETER Experiment Name: At_Drought_cDNA_P Parameter: Timepoint (hr) Value: 6
  misc_feature: MA Experiment 108573 PARAMETER Experiment Name: At_Drought_cDNA_P Parameter: Tissue Value: Aerial
  misc_feature: MA Experiment 108573 PARAMETER Experiment Name: At_Drought_cDNA_P Parameter: Treatment Value: Drought vs. No Drought
  misc_feature: MA Experiment ID: 108585 Result: Up-regulated in Transcription
  misc_feature: MA Experiment 108585 PARAMETER Experiment Name: At_5mM_NaNP_cDNA_P Parameter: Timepoint (hr) Value: 6
  misc_feature: MA Experiment 108585 PARAMETER Experiment Name: At_5mM_NaNP_cDNA_P Parameter: Tissue Value: Aerial
  misc_feature: MA Experiment 108585 PARAMETER Experiment Name: At_5mM_NaNP_cDNA_P Parameter: Treatment Value: null
  misc_feature: MA Experiment ID: 108595 Result: Down-regulated in Transcription
  misc_feature: MA Experiment 108595 PARAMETER Experiment Name: At_Ler-pi_Ovule_cDNA_P Parameter: Plant Line Value: null
  misc_feature: MA Experiment ID: 20000112 Result: Up-regulated in Transcription
  misc_feature: MA Experiment 20000112 PARAMETER Experiment Name: At_42deg_Heat_cDNA_P Parameter: Temperature (deg C) Value: 42 vs. 22
  misc_feature: MA Experiment 20000112 PARAMETER Experiment Name: At_42deg_Heat_cDNA_P Parameter: Timepoint (hr) Value: 2
  misc_feature: MA Experiment 20000112 PARAMETER Experiment Name: At_42deg_Heat_cDNA_P Parameter: Tissue Value: Aerial
  misc_feature: MA Experiment ID: 20000171 Result: Up-regulated in Transcription
  misc_feature: MA Experiment 20000171 PARAMETER Experiment Name: At_42deg_Heat_P Parameter: Age (day) Value: 14
  misc_feature: MA Experiment 20000171 PARAMETER Experiment Name: At_42deg_Heat_P Parameter: Organism Value: A. thaliana
  misc_feature: MA Experiment 20000171 PARAMETER Experiment Name: At_42deg_Heat_P Parameter: Plant Line Value: WS
  misc_feature: MA Experiment 20000171 PARAMETER Experiment Name: At_42deg_Heat_P Parameter: Temperature (deg C) Value: 42 vs. 22
  misc_feature: MA Experiment 20000171 PARAMETER Experiment Name: At_42deg_Heat_P Parameter: Timepoint (hr) Value: 1
  misc_feature: MA Experiment 20000171 PARAMETER Experiment Name: At_42deg_Heat_P Parameter: Tissue Value: Aerial
  misc_feature: MA Experiment ID: 20000224 Result: Down-regulated in Transcription
  misc_feature: MA Experiment ID: 20000234 Result: Down-regulated in Transcription
  misc_feature: MA Experiment 20000234 PARAMETER Experiment Name: At_Siliques_P Parameter: Age (day) Value: 21
  misc_feature: MA Experiment 20000234 PARAMETER Experiment Name: At_Siliques_P Parameter: Organism Value: A. thaliana
  misc_feature: MA Experiment 20000234 PARAMETER Experiment Name: At_Siliques_P Parameter: Plant Line Value: WS
  misc_feature: MA Experiment 20000234 PARAMETER Experiment Name: At_Siliques_P Parameter: Tissue Value: Less Than 5mm Siliques vs. Whole Plant

SEQ ID NO: 33908 - protein, 227 aa, Arabidopsis thaliana; identical to SEQ ID NO: 30318
  peptide (1)..(227): Ceres Seq. ID no. 13488513
  misc_feature (28)..(68): Pfam Name: Zinc finger, C3HC4 type (RING finger) Pfam Description: Zinc finger, C3HC4 type (RING finger)
  misc_feature (1)..(151): Homolog of NCBI NO: 15928691 NR Description: RIKEN cDNA 1700022N24 [Mus musculus]
  misc_feature (13)..(165): Homolog of NCBI NO: 29841097 NR Description: similar to GenBank Accession Number AJ428489
  misc_feature (17)..(225): Homolog of NCBI NO: 39581891 NR Description: Hypothetical protein CBG20152 [Caenorhabditis
  misc_feature (6)..(227): Homolog of NCBI NO: 17554742 NR Description: Ring finger protein RNF-5 (24.9 kD) (rnf-5)
  misc_feature (17)..(147): Homolog of NCBI NO: 15222064 NR Description: zinc finger (C3HC4-type RING finger) protein
  misc_feature (4)..(226): Homolog of NCBI NO: 34909840 NR Description: P0403C05.28 [Oryza sativa (japonica
  misc_feature (9)..(226): Homolog of NCBI NO: 29150403 NR Description: unknown protein [Oryza sativa (japonica
  misc_feature (15)..(225): Homolog of NCBI NO: 18394721 NR Description: zinc finger (C3HC4-type RING finger) protein
  misc_feature (1)..(227): Homolog of NCBI NO: 21553849 NR Description: putative RING zinc finger protein [Arabidopsis
  misc_feature (1)..(227): Homolog of NCBI NO: 15224062 NR Description: zinc finger (C3HC4-type RING finger) protein

SEQ ID NO: 33909 - DNA, 934 bp, Arabidopsis thaliana; identical to SEQ ID NO: 30319
  misc_feature (1)..(934): Ceres Seq. ID no. 12340180
  misc_feature: MA Experiment ID: 108434 Result: Up-regulated in Transcription
  misc_feature: MA Experiment 108434 PARAMETER Experiment Name: At_Root_Tips_cDNA_P Parameter: Tissue Value: Root Tips
  misc_feature: MA Experiment ID: 108435 Result: Up-regulated in Transcription
  misc_feature: MA Experiment 108435 PARAMETER Experiment Name: At_stm_Mutants_cDNA_P Parameter: Plant Line Value: wt Landsburg vs stm
  misc_feature: MA Experiment 108435 PARAMETER Experiment Name: At_stm_Mutants_cDNA_P Parameter: Tissue Value: Shoot Apical Meristem Region
  misc_feature: MA Experiment ID: 108462 Result: Down-regulated in Transcription
  misc_feature: MA Experiment 108462 PARAMETER Experiment Name: At_Germinating_Seeds_cDNA_P Parameter: Age (day) Value: 2 vs. 0
  misc_feature: MA Experiment 108462 PARAMETER Experiment Name: At_Germinating_Seeds_cDNA_P Parameter: Tissue Value: Germinating Seeds
  misc_feature: MA Experiment ID: 108463 Result: Down-regulated in Transcription
  misc_feature: MA Experiment 108463 PARAMETER Experiment Name: At_Germinating_Seeds_cDNA_P Parameter: Age (day) Value: 3 vs. 0
  misc_feature: MA Experiment 108463 PARAMETER Experiment Name: At_Germinating_Seeds_cDNA_P Parameter: Tissue Value: Germinating Seeds
  misc_feature: MA Experiment ID: 108464 Result: Down-regulated in Transcription
  misc_feature: MA Experiment 108464 PARAMETER Experiment Name: At_Germinating_Seeds_cDNA_P Parameter: Age (day) Value: 4 vs. 0
  misc_feature: MA Experiment 108464 PARAMETER Experiment Name: At_Germinating_Seeds_cDNA_P Parameter: Tissue Value: Germinating Seeds
  misc_feature: MA Experiment ID: 108488 Result: Up-regulated in Transcription
  misc_feature: MA Experiment ID: 108573 Result: Down-regulated in Transcription
  misc_feature: MA Experiment 108573 PARAMETER Experiment Name: At_Drought_cDNA_P Parameter: Timepoint (hr) Value: 6
  misc_feature: MA Experiment 108573 PARAMETER Experiment Name: At_Drought_cDNA_P Parameter: Tissue Value: Aerial
  misc_feature: MA Experiment 108573 PARAMETER Experiment Name: At_Drought_cDNA_P Parameter: Treatment Value: Drought vs. No Drought
  misc_feature: MA Experiment ID: 108595 Result: Down-regulated in Transcription
  misc_feature: MA Experiment 108595 PARAMETER Experiment Name: At_Ler-pi_Ovule_cDNA_P Parameter: Plant Line Value: null
  misc_feature: MA Experiment ID: 20000234 Result: Up-regulated in Transcription
  misc_feature: MA Experiment 20000234 PARAMETER Experiment Name: At_Siliques_P Parameter: Age (day) Value: 21
  misc_feature: MA Experiment 20000234 PARAMETER Experiment Name: At_Siliques_P Parameter: Organism Value: A. thaliana
  misc_feature: MA Experiment 20000234 PARAMETER Experiment Name: At_Siliques_P Parameter: Plant Line Value: WS
  misc_feature: MA Experiment 20000234 PARAMETER Experiment Name: At_Siliques_P Parameter: Tissue Value: Less Than 5mm Siliques vs. Whole Plant
  misc_feature: MA Experiment ID: 20000495 Result: Up-regulated in Transcription
  misc_feature: MA Experiment 20000495 PARAMETER Experiment Name: At_Guard_Cells_P Parameter: Harvest Date Value: 8/2/2002
  misc_feature: MA Experiment 20000495 PARAMETER Experiment Name: At_Guard_Cells_P Parameter: Organism Value: A. thaliana
  misc_feature: MA Experiment 20000495 PARAMETER Experiment Name: At_Guard_Cells_P Parameter: Tissue Value: Guard Cells vs. Leaves
  misc_feature: MA Experiment ID: 20000794 Result: Down-regulated in Transcription
  misc_feature: MA Experiment 20000794 PARAMETER Experiment Name: At_Petals_P Parameter: Age (day) Value: 23-25 days
  misc_feature: MA Experiment 20000794 PARAMETER Experiment Name: At_Petals_P Parameter: Plant Line Value: WS
  misc_feature: MA Experiment 20000794 PARAMETER Experiment Name: At_Petals_P Parameter: Tissue Value: Petals vs. Whole plant
  misc_feature: MA Experiment ID: 20001557 Result: Up-regulated in Transcription
  misc_feature: MA Experiment 20001557 PARAMETER Experiment Name: At_Drought_Soil_Dry_P Parameter: Age (day) Value: 27
  misc_feature: MA Experiment 20001557 PARAMETER Experiment Name: At_Drought_Soil_Dry_P Parameter: Organism Value: A. thaliana
  misc_feature: MA Experiment 20001557 PARAMETER Experiment Name: At_Drought_Soil_Dry_P Parameter: Plant Line Value: WS
  misc_feature: MA Experiment 20001557 PARAMETER Experiment Name: At_Drought_Soil_Dry_P Parameter: Post Timepoint (hr) Value: 3
  misc_feature: MA Experiment 20001557 PARAMETER Experiment Name: At_Drought_Soil_Dry_P Parameter: Post-Treatment Value: Re-Water vs. No Drought
  misc_feature: MA Experiment 20001557 PARAMETER Experiment Name: At_Drought_Soil_Dry_P Parameter: Timepoint (day) Value: 13
  misc_feature: MA Experiment 20001557 PARAMETER Experiment Name: At_Drought_Soil_Dry_P Parameter: Treatment Value: Drought vs. No Drought
  misc_feature: MA Experiment ID: 20001558 Result: Up-regulated in Transcription
  misc_feature: MA Experiment 20001558 PARAMETER Experiment Name: At_Drought_Soil_Dry_P Parameter: Age (day) Value: 27
  misc_feature: MA Experiment 20001558 PARAMETER Experiment Name: At_Drought_Soil_Dry_P Parameter: Organism Value: A. thaliana
  misc_feature: MA Experiment 20001558 PARAMETER Experiment Name: At_Drought_Soil_Dry_P Parameter: Plant Line Value: WS
  misc_feature: MA Experiment 20001558 PARAMETER Experiment Name: At_Drought_Soil_Dry_P Parameter: Post Timepoint (hr) Value: 6
  misc_feature: MA Experiment 20001558 PARAMETER Experiment Name: At_Drought_Soil_Dry_P Parameter: Post-Treatment Value: Re-Water vs. No Drought
  misc_feature: MA Experiment 20001558 PARAMETER Experiment Name: At_Drought_Soil_Dry_P Parameter: Timepoint (day) Value: 13
  misc_feature: MA Experiment 20001558 PARAMETER Experiment Name: At_Drought_Soil_Dry_P Parameter: Treatment Value: Drought vs. No Drought
  misc_feature: MA Experiment ID: 20001560 Result: Up-regulated in Transcription
  misc_feature: MA Experiment 20001560 PARAMETER Experiment Name: At_Drought_Soil_Dry_P Parameter: Age (day) Value: 28
  misc_feature: MA Experiment 20001560 PARAMETER Experiment Name: At_Drought_Soil_Dry_P Parameter: Organism Value: A. thaliana
  misc_feature: MA Experiment 20001560 PARAMETER Experiment Name: At_Drought_Soil_Dry_P Parameter: Plant Line Value: WS
  misc_feature: MA Experiment 20001560 PARAMETER Experiment Name: At_Drought_Soil_Dry_P Parameter: Post Timepoint (hr) Value: None
  misc_feature: MA Experiment 20001560 PARAMETER Experiment Name: At_Drought_Soil_Dry_P Parameter: Post-Treatment Value: None
  misc_feature: MA Experiment 20001560 PARAMETER Experiment Name: At_Drought_Soil_Dry_P Parameter: Timepoint (day) Value: 14
  misc_feature: MA Experiment 20001560 PARAMETER Experiment Name: At_Drought_Soil_Dry_P Parameter: Treatment Value: Drought vs. No Drought
  misc_feature: MA Experiment ID: 20001757 Result: Up-regulated in Transcription
  misc_feature: MA Experiment 20001757 PARAMETER Experiment Name: At_50mM_NH4NO3_L-to-H_P Parameter: Timepoint (hr) Value: 6
  misc_feature: MA Experiment 20001757 PARAMETER Experiment Name: At_50mM_NH4NO3_L-to-H_P Parameter: Tissue Value: Leaf
  misc_feature: MA Experiment 20001757 PARAMETER Experiment Name: At_50mM_NH4NO3_L-to-H_P Parameter: Treatment Value: 50mM NH4NO3 vs 100mM Mannitol
  misc_feature: Phenotype: ROSETTE LEAVES Curled-Curled 2
  misc_feature: Phenotype: WHOLE PLANT Size-Small
  misc_feature: Phenotype: INFLORESCENCE Flowering Time-Late Flowering
  misc_feature: Phenotype: ROSETTE LEAVES Curled-Curled 1
  misc_feature: Phenotype: ROSETTE LEAVES Curled-Curled 2
  misc_feature: Phenotype: WHOLE PLANT Size-Small
  misc_feature: Phenotype: WHOLE PLANT Other

SEQ ID NO: 33910 - protein, 265 aa, Arabidopsis thaliana; identical to SEQ ID NO: 30320
  peptide (1)..(265): Ceres Seq. ID no. 12340181
  misc_feature (105)..(157): Pfam Name: Ribosomal protein L30p/L7e Pfam Description: Ribosomal protein L30p/L7e
  misc_feature (26)..(265): Homolog of NCBI NO: 32416114 NR Description: hypothetical protein [Neurospora crassa]
  misc_feature (31)..(264): Homolog of NCBI NO: 28630259 NR Description: ribosomal protein L7 [Branchiostoma lanceolatum]
  misc_feature (27)..(265): Homolog of NCBI NO: 38346542 NR Description: OSJNBa0035M09.3 [Oryza sativa (japonica
  misc_feature (20)..(265): Homolog of NCBI NO: 38637548 NR Description: putative 60S ribosomal protein L7
  misc_feature (24)..(265): Homolog of NCBI NO: 445613 NR Description: ribosomal protein L7
  misc_feature (25)..(265): Homolog of NCBI NO: 15231288 NR Description: ribosomal protein, putative
  misc_feature (24)..(265): Homolog of NCBI NO: 15226212 NR Description: putative ribosomal protein L7
  misc_feature (24)..(265): Homolog of NCBI NO: 27311547 NR Description: Unknown protein [Arabidopsis thaliana]
  misc_feature (24)..(265): Homolog of NCBI NO: 30689617 NR Description: 60S ribosomal protein L7 (RPL7C) [Arabidopsis
  misc_feature (23)..(265): Homolog of NCBI NO: 30689623 NR Description: 60S ribosomal protein L7 (RPL7C) [Arabidopsis

SEQ ID NO: 33911 - protein, 242 aa, Arabidopsis thaliana; identical to SEQ ID NO: 23649
  peptide (1)..(242): Ceres Seq. ID no. 12340182
  misc_feature (82)..(134): Pfam Name: Ribosomal protein L30p/L7e Pfam Description: Ribosomal protein L30p/L7e
  misc_feature (3)..(242): Homolog of NCBI NO: 32416114 NR Description: hypothetical protein [Neurospora crassa]
  misc_feature (8)..(241): Homolog of NCBI NO: 28630259 NR Description: ribosomal protein L7 [Branchiostoma lanceolatum]
  misc_feature (4)..(242): Homolog of NCBI NO: 38346542 NR Description: OSJNBa0035M09.3 [Oryza sativa (japonica
  misc_feature (1)..(242): Homolog of NCBI NO: 38637548 NR Description: putative 60S ribosomal protein L7
  misc_feature (1)..(242): Homolog of NCBI NO: 445613 NR Description: ribosomal protein L7
  misc_feature (2)..(242): Homolog of NCBI NO: 15231288 NR Description: ribosomal protein, putative
  misc_feature (1)..(242): Homolog of NCBI NO: 15226212 NR Description: putative ribosomal protein L7
  misc_feature (1)..(242): Homolog of NCBI NO: 27311547 NR Description: Unknown protein [Arabidopsis thaliana]
  misc_feature (1)..(242): Homolog of NCBI NO: 30689617 NR Description: 60S ribosomal protein L7 (RPL7C) [Arabidopsis
  misc_feature (1)..(242): Homolog of NCBI NO: 30689623 NR Description: 60S ribosomal protein L7 (RPL7C) [Arabidopsis

SEQ ID NO: 33912 - DNA, 1512 bp, Arabidopsis thaliana; identical to SEQ ID NO: 30322
  misc_feature (1)..(1512): Ceres Seq. ID no. 13487654
  misc_feature: MA Experiment ID: 108434 Result: Down-regulated in Transcription
  misc_feature: MA Experiment 108434 PARAMETER Experiment Name: At_Root_Tips_cDNA_P Parameter: Tissue Value: Root Tips
  misc_feature: MA Experiment ID: 108461 Result: Up-regulated in Transcription
  misc_feature: MA Experiment 108461 PARAMETER Experiment Name: At_Germinating_Seeds_cDNA_P Parameter: Age (day) Value: 1 vs. 0
  misc_feature: MA Experiment 108461 PARAMETER Experiment Name: At_Germinating_Seeds_cDNA_P Parameter: Tissue Value: Germinating Seeds
  misc_feature: MA Experiment ID: 108463 Result: Up-regulated in Transcription
  misc_feature: MA Experiment 108463 PARAMETER Experiment Name: At_Germinating_Seeds_cDNA_P Parameter: Age (day) Value: 3 vs. 0
  misc_feature: MA Experiment 108463 PARAMETER Experiment Name: At_Germinating_Seeds_cDNA_P Parameter: Tissue Value: Germinating Seeds
  misc_feature: MA Experiment ID: 108464 Result: Up-regulated in Transcription
  misc_feature: MA Experiment 108464 PARAMETER Experiment Name: At_Germinating_Seeds_cDNA_P Parameter: Age (day) Value: 4 vs. 0
  misc_feature: MA Experiment 108464 PARAMETER Experiment Name: At_Germinating_Seeds_cDNA_P Parameter: Tissue Value: Germinating Seeds
  misc_feature: MA Experiment ID: 108474 Result: Down-regulated in Transcription
  misc_feature: MA Experiment 108474 PARAMETER Experiment Name: At_Drought_Flowers_cDNA_P Parameter: Timepoint (hr) Value: null
  misc_feature: MA Experiment 108474 PARAMETER Experiment Name: At_Drought_Flowers_cDNA_P Parameter: Treatment Value: Drought vs. No Drought
  misc_feature: MA Experiment ID: 108594 Result: Up-regulated in Transcription
  misc_feature: MA Experiment 108594 PARAMETER Experiment Name: At_Ler-rhl_Root_cDNA_P Parameter: Plant Line Value: null
  misc_feature: MA Experiment ID: 108668 Result: Down-regulated in Transcription
  misc_feature: MA Experiment 108668 PARAMETER Experiment Name: At_2mM_SA_cDNA_P Parameter: Plant Line Value: WS
  misc_feature: MA Experiment 108668 PARAMETER Experiment Name: At_2mM_SA_cDNA_P Parameter: Timepoint (hr) Value: 6
  misc_feature: MA Experiment 108668 PARAMETER Experiment Name: At_2mM_SA_cDNA_P Parameter: Treatment Value: 2mM SA vs. No Treatment
  misc_feature: MA Experiment ID: 20000184 Result: Up-regulated in Transcription
  misc_feature: MA Experiment 20000184 PARAMETER Experiment Name: At_Shoots__P Parameter: Age (day) Value: 7
  misc_feature: MA Experiment 20000184 PARAMETER Experiment Name: At_Shoots__P Parameter: Tissue Value: Shoots vs. Whole Plant
  misc_feature: MA Experiment ID: 20000185 Result: Up-regulated in Transcription
  misc_feature: MA Experiment 20000185 PARAMETER Experiment Name: At_Roots__P Parameter: Age (day) Value: 7 vs. 21
  misc_feature: MA Experiment 20000185 PARAMETER Experiment Name: At_Roots__P Parameter: Organism Value: A. thaliana
  misc_feature: MA Experiment 20000185 PARAMETER Experiment Name: At_Roots__P Parameter: Tissue Value: Roots vs. Whole Plant
  misc_feature: MA Experiment ID: 20000264 Result: Down-regulated in Transcription
  misc_feature: MA Experiment 20000264 PARAMETER Experiment Name: At_Open_Flower_P Parameter: Age (day) Value: 21
  misc_feature: MA Experiment 20000264 PARAMETER Experiment Name: At_Open_Flower_P Parameter: Plant Line Value: WS
  misc_feature: MA Experiment 20000264 PARAMETER Experiment Name: At_Open_Flower_P Parameter: Tissue Value: Open Flower vs. Whole Plant
  misc_feature: MA Experiment ID: 20000437 Result: Up-regulated in Transcription
  misc_feature: MA Experiment 20000437 PARAMETER Experiment Name: At_Drought_P Parameter: Age (day) Value: 8
  misc_feature: MA Experiment 20000437 PARAMETER Experiment Name: At_Drought_P Parameter: Organism Value: A. thaliana
  misc_feature: MA Experiment 20000437 PARAMETER Experiment Name: At_Drought_P Parameter: Plant Line Value: WS
  misc_feature: MA Experiment 20000437 PARAMETER Experiment Name: At_Drought_P Parameter: Timepoint (hr) Value: 24
  misc_feature: MA Experiment 20000437 PARAMETER Experiment Name: At_Drought_P Parameter: Tissue Value: Whole Plant
  misc_feature: MA Experiment 20000437 PARAMETER Experiment Name: At_Drought_P Parameter: Treatment Value: Drought vs. No Drought
  misc_feature: MA Experiment ID: 20000439 Result: Up-regulated in Transcription
  misc_feature: MA Experiment 20000439 PARAMETER Experiment Name: At_Roots__P Parameter: Age (day) Value: 14 vs. 21
  misc_feature: MA Experiment 20000439 PARAMETER Experiment Name: At_Roots__P Parameter: Organism Value: A. thaliana
  misc_feature: MA Experiment 20000439 PARAMETER Experiment Name: At_Roots__P Parameter: Tissue Value: Roots vs. Whole Plant
  misc_feature: MA Experiment ID: 20000451 Result: Down-regulated in Transcription
  misc_feature: MA Experiment 20000451 PARAMETER Experiment Name: At_CS6879_Shoots-Roots_P Parameter: Age (day) Value: 14
  misc_feature: MA Experiment 20000451 PARAMETER Experiment Name: At_CS6879_Shoots-Roots_P Parameter: Organism Value: A. thaliana
  misc_feature: MA Experiment 20000451 PARAMETER Experiment Name: At_CS6879_Shoots-Roots_P Parameter: Plant Line Value: CS6879 vs. WS
  misc_feature: MA Experiment 20000451 PARAMETER Experiment Name: At_CS6879_Shoots-Roots_P Parameter: Tissue Value: Roots
  misc_feature: MA Experiment ID: 20001910 Result: Down-regulated in Transcription
  misc_feature: MA Experiment 20001910 PARAMETER Experiment Name: At_Drought_Reproduction_P Parameter: Age (day) Value: 37
  misc_feature: MA Experiment 20001910 PARAMETER Experiment Name: At_Drought_Reproduction_P Parameter: Organism Value: A. thaliana
  misc_feature: MA Experiment 20001910 PARAMETER Experiment Name: At_Drought_Reproduction_P Parameter: Plant Line Value: WS
  misc_feature: MA Experiment 20001910 PARAMETER Experiment Name: At_Drought_Reproduction_P Parameter: Timepoint (day) Value: 7
  misc_feature: MA Experiment 20001910 PARAMETER Experiment Name: At_Drought_Reproduction_P Parameter: Tissue Value: Flowers
  misc_feature: MA Experiment 20001910 PARAMETER Experiment Name: At_Drought_Reproduction_P Parameter: Treatment Value: Drought vs. No Drought

SEQ ID NO: 33913 - protein, 457 aa, Arabidopsis thaliana; identical to SEQ ID NO: 30323
  peptide (1)..(457): Ceres Seq. ID no. 13487655
  misc_feature (19)..(455): Pfam Name: Transferase family Pfam Description: Transferase family
  misc_feature (21)..(449): Homolog of NCBI NO: 28558088 NR Description: 3'-N-debenzoyl-2'-deoxytaxol N-benzoyltransferase
  misc_feature (25)..(455): Homolog of NCBI NO: 10798748 NR Description: elicitor inducible gene product EIG-I24
  misc_feature (24)..(450): Homolog of NCBI NO: 25403354 NR Description: protein F1K23.12 [imported] - Arabidopsis
  misc_feature (24)..(450): Homolog of NCBI NO: 15218757 NR Description: transferase family [Arabidopsis thaliana]
  misc_feature (18)..(452): Homolog of NCBI NO: 15224685 NR Description: transferase family [Arabidopsis thaliana]
  misc_feature (13)..(455): Homolog of NCBI NO: 15227845 NR Description: transferase family [Arabidopsis thaliana]
  misc_feature (427)..(453): Homolog of NCBI NO: 15232745 NR Description: acyltransferase family [Arabidopsis thaliana]
  misc_feature (18)..(418): Homolog of NCBI NO: 15232745 NR Description: acyltransferase family [Arabidopsis thaliana]
  misc_feature (8)..(457): Homolog of NCBI NO: 21553850 NR Description: hypersensitivity-related protein-like protein
  misc_feature (8)..(457): Homolog of NCBI NO: 15240694 NR Description: transferase family [Arabidopsis thaliana]

SEQ ID NO: 33914 - protein, 450 aa, Arabidopsis thaliana; identical to SEQ ID NO: 30324
  peptide (1)..(450): Ceres Seq. ID no. 13487656
  misc_feature (12)..(448): Pfam Name: Transferase family Pfam Description: Transferase family
  misc_feature (14)..(442): Homolog of NCBI NO: 28558088 NR Description: 3'-N-debenzoyl-2'-deoxytaxol N-benzoyltransferase
  misc_feature (18)..(448): Homolog of NCBI NO: 10798748 NR Description: elicitor inducible gene product EIG-I24
  misc_feature (17)..(443): Homolog of NCBI NO: 25403354 NR Description: protein F1K23.12 [imported] - Arabidopsis
  misc_feature (17)..(443): Homolog of NCBI NO: 15218757 NR Description: transferase family [Arabidopsis thaliana]
  misc_feature (11)..(445): Homolog of NCBI NO: 15224685 NR Description: transferase family [Arabidopsis thaliana]
  misc_feature (6)..(448): Homolog of NCBI NO: 15227845 NR Description: transferase family [Arabidopsis thaliana]
  misc_feature (420)..(446): Homolog of NCBI NO: 15232745 NR Description: acyltransferase family [Arabidopsis thaliana]
  misc_feature (11)..(411): Homolog of NCBI NO: 15232745 NR Description: acyltransferase family [Arabidopsis thaliana]
  misc_feature (1)..(450): Homolog of NCBI NO: 21553850 NR Description: hypersensitivity-related protein-like protein
  misc_feature (1)..(450): Homolog of NCBI NO: 15240694 NR Description: transferase family [Arabidopsis thaliana]

SEQ ID NO: 33915 - protein, 445 aa, Arabidopsis thaliana; identical to SEQ ID NO: 30325
  peptide (1)..(445): Ceres Seq. ID no. 13487657
  misc_feature (7)..(443): Pfam Name: Transferase family Pfam Description: Transferase family
  misc_feature (9)..(437): Homolog of NCBI NO: 28558088 NR Description: 3'-N-debenzoyl-2'-deoxytaxol N-benzoyltransferase
  misc_feature (13)..(443): Homolog of NCBI NO: 10798748 NR Description: elicitor inducible gene product EIG-I24
  misc_feature (12)..(438): Homolog of NCBI NO: 25403354 NR Description: protein F1K23.12 [imported] - Arabidopsis
  misc_feature (12)..(438): Homolog of NCBI NO: 15218757 NR Description: transferase family [Arabidopsis thaliana]
  misc_feature (6)..(440): Homolog of NCBI NO: 15224685 NR Description: transferase family [Arabidopsis thaliana]
  misc_feature (1)..(443): Homolog of NCBI NO: 15227845 NR Description: transferase family [Arabidopsis thaliana]
  misc_feature (415)..(441): Homolog of NCBI NO: 15232745 NR Description: acyltransferase family [Arabidopsis thaliana]
  misc_feature (6)..(406): Homolog of NCBI NO: 15232745 NR Description: acyltransferase family [Arabidopsis thaliana]
  misc_feature (1)..(445): Homolog of NCBI NO: 21553850 NR Description: hypersensitivity-related protein-like protein
  misc_feature (1)..(445): Homolog of NCBI NO: 15240694 NR Description: transferase family [Arabidopsis thaliana]

SEQ ID NO: 33916 - DNA, 1190 bp, Arabidopsis thaliana; identical to SEQ ID NO: 30326
  misc_feature (1)..(1190): Ceres Seq. ID no. 12385283
  misc_feature: MA Experiment ID: 108463 Result: Down-regulated in Transcription
  misc_feature: MA Experiment 108463 PARAMETER Experiment Name: At_Germinating_Seeds_cDNA_P Parameter: Age (day) Value: 3 vs. 0
  misc_feature: MA Experiment 108463 PARAMETER Experiment Name: At_Germinating_Seeds_cDNA_P Parameter: Tissue Value: Germinating Seeds
  misc_feature: MA Experiment ID: 108464 Result: Down-regulated in Transcription
  misc_feature: MA Experiment 108464 PARAMETER Experiment Name: At_Germinating_Seeds_cDNA_P Parameter: Age (day) Value: 4 vs. 0
  misc_feature: MA Experiment 108464 PARAMETER Experiment Name: At_Germinating_Seeds_cDNA_P Parameter: Tissue Value: Germinating Seeds
  misc_feature: MA Experiment ID: 20000069 Result: Down-regulated in Transcription
  misc_feature: MA Experiment 20000069 PARAMETER Experiment Name: At_100uM_ABA_Mutants_cDNA_P Parameter: Plant Line Value: CS23
  misc_feature: MA Experiment 20000069 PARAMETER Experiment Name: At_100uM_ABA_Mutants_cDNA_P Parameter: Timepoint (hr) Value: 6
  misc_feature: MA Experiment 20000069 PARAMETER Experiment Name: At_100uM_ABA_Mutants_cDNA_P Parameter: Tissue Value: Aerial
  misc_feature: MA Experiment 20000069 PARAMETER Experiment Name: At_100uM_ABA_Mutants_cDNA_P Parameter: Treatment Value: 100uM ABA vs. No Treatment
  misc_feature: MA Experiment ID: 20000117 Result: Down-regulated in Transcription
  misc_feature: MA Experiment 20000117 PARAMETER Experiment Name: At_100uM_ABA_Mutants_cDNA_P Parameter: Plant Line Value: Columbia
  misc_feature: MA Experiment 20000117 PARAMETER Experiment Name: At_100uM_ABA_Mutants_cDNA_P Parameter: Timepoint (hr) Value: 6
  misc_feature: MA Experiment 20000117 PARAMETER Experiment Name: At_100uM_ABA_Mutants_cDNA_P Parameter: Tissue Value: Aerial
  misc_feature: MA Experiment 20000117 PARAMETER Experiment Name: At_100uM_ABA_Mutants_cDNA_P Parameter: Treatment Value: 100uM ABA vs. No Treatment
  misc_feature: MA Experiment ID: 20000184 Result: Up-regulated in Transcription
  misc_feature: MA Experiment 20000184 PARAMETER Experiment Name: At_Shoots__P Parameter: Age (day) Value: 7
  misc_feature: MA Experiment 20000184 PARAMETER Experiment Name: At_Shoots__P Parameter: Tissue Value: Shoots vs. Whole Plant
  misc_feature: MA Experiment ID: 20000224 Result: Down-regulated in Transcription
  misc_feature: MA Experiment ID: 20000794 Result: Down-regulated in Transcription
  misc_feature: MA Experiment 20000794 PARAMETER Experiment Name: At_Petals_P Parameter: Age (day) Value: 23-25 days
  misc_feature: MA Experiment 20000794 PARAMETER Experiment Name: At_Petals_P Parameter: Plant Line Value: WS
  misc_feature: MA Experiment 20000794 PARAMETER Experiment Name: At_Petals_P Parameter: Tissue Value: Petals vs. Whole plant
  misc_feature: MA Experiment ID: 20001558 Result: Up-regulated in Transcription
  misc_feature: MA Experiment 20001558 PARAMETER Experiment Name: At_Drought_Soil_Dry_P Parameter: Age (day) Value: 27
  misc_feature: MA Experiment 20001558 PARAMETER Experiment Name: At_Drought_Soil_Dry_P Parameter: Organism Value: A. thaliana
  misc_feature: MA Experiment 20001558 PARAMETER Experiment Name: At_Drought_Soil_Dry_P Parameter: Plant Line Value: WS
  misc_feature: MA Experiment 20001558 PARAMETER Experiment Name: At_Drought_Soil_Dry_P Parameter: Post Timepoint (hr) Value: 6
  misc_feature: MA Experiment 20001558 PARAMETER Experiment Name: At_Drought_Soil_Dry_P Parameter: Post-Treatment Value: Re-Water vs. No Drought
  misc_feature: MA Experiment 20001558 PARAMETER Experiment Name: At_Drought_Soil_Dry_P Parameter: Timepoint (day) Value: 13
  misc_feature: MA Experiment 20001558 PARAMETER Experiment Name: At_Drought_Soil_Dry_P Parameter: Treatment Value: Drought vs. No Drought
  misc_feature: MA Experiment ID: 20001757 Result: Up-regulated in Transcription
  misc_feature: MA Experiment 20001757 PARAMETER Experiment Name: At_50mM_NH4NO3_L-to-H_P Parameter: Timepoint (hr) Value: 6
  misc_feature: MA Experiment 20001757 PARAMETER Experiment Name: At_50mM_NH4NO3_L-to-H_P Parameter: Tissue Value: Leaf
  misc_feature: MA Experiment 20001757 PARAMETER Experiment Name: At_50mM_NH4NO3_L-to-H_P Parameter: Treatment Value: 50mM NH4NO3 vs 100mM Mannitol

SEQ ID NO: 33917 - protein, 285 aa, Arabidopsis thaliana; identical to SEQ ID NO: 30327
  peptide (1)..(285): Ceres Seq. ID no. 12385284
  misc_feature (178)..(251): Pfam Name: Ribosomal protein S5, C-terminal domain Pfam Description: Ribosomal protein S5, C-terminal domain
  misc_feature (1)..(282): Homolog of NCBI NO: 30103021 NR Description: putative 40S ribosomal protein S2
  misc_feature (1)..(282): Homolog of NCBI NO: 34393314 NR Description: putative 40S ribosomal protein S2
  misc_feature (7)..(267): Homolog of NCBI NO: 15230312 NR Description: 40S ribosomal protein S2 homolog
  misc_feature (3)..(285): Homolog of NCBI NO: 25294520 NR Description: hypothetical protein RF12
  misc_feature (1)..(285): Homolog of NCBI NO: 21539457 NR Description: ribosomal protein S2, putative [Arabidopsis
  misc_feature (1)..(285): Homolog of NCBI NO: 21618011 NR Description: ribosomal protein S2, putative [Arabidopsis
  misc_feature (1)..(285): Homolog of NCBI NO: 15217951 NR Description: ribosomal protein S2, putative; protein id:
  misc_feature (1)..(285): Homolog of NCBI NO: 18406325 NR Description: ribosomal protein S2, putative
  misc_feature (1)..(285): Homolog of NCBI NO: 21553851 NR Description: 40S ribosomal protein S2 [Arabidopsis thaliana]
  misc_feature (1)..(285): Homolog of NCBI NO: 15227443 NR Description: 40S ribosomal protein S2

SEQ ID NO: 33918 - protein, 196 aa, Arabidopsis thaliana; identical to SEQ ID NO: 30328
  peptide (1)..(196): Ceres Seq. ID no. 12385285
  misc_feature (89)..(162): Pfam Name: Ribosomal protein S5, C-terminal domain Pfam Description: Ribosomal protein S5, C-terminal domain
  misc_feature (1)..(193): Homolog of NCBI NO: 30103021 NR Description: putative 40S ribosomal protein S2
  misc_feature (1)..(193): Homolog of NCBI NO: 34393314 NR Description: putative 40S ribosomal protein S2
  misc_feature (1)..(178): Homolog of NCBI NO: 15230312 NR Description: 40S ribosomal protein S2 homolog
  misc_feature (1)..(196): Homolog of NCBI NO: 25294520 NR Description: hypothetical protein RF12
  misc_feature (1)..(196): Homolog of NCBI NO: 21539457 NR Description: ribosomal protein S2, putative [Arabidopsis
  misc_feature (1)..(196): Homolog of NCBI NO: 21618011 NR Description: ribosomal protein S2, putative [Arabidopsis
  misc_feature (1)..(196): Homolog of NCBI NO: 15217951 NR Description: ribosomal protein S2, putative; protein id:
  misc_feature (1)..(196): Homolog of NCBI NO: 18406325 NR Description: ribosomal protein S2, putative
  misc_feature (1)..(196): Homolog of NCBI NO: 21553851 NR Description: 40S ribosomal protein S2 [Arabidopsis thaliana]
  misc_feature (1)..(196): Homolog of NCBI NO: 15227443 NR Description: 40S ribosomal protein S2

SEQ ID NO: 33919 - protein, 185 aa, Arabidopsis thaliana; identical to SEQ ID NO: 30329
  peptide (1)..(185): Ceres Seq. ID no. 12385286
  misc_feature (78)..(151): Pfam Name: Ribosomal protein S5, C-terminal domain Pfam Description: Ribosomal protein S5, C-terminal domain
  misc_feature (1)..(182): Homolog of NCBI NO: 30103021 NR Description: putative 40S ribosomal protein S2
  misc_feature (1)..(182): Homolog of NCBI NO: 34393314 NR Description: putative 40S ribosomal protein S2
  misc_feature (1)..(167): Homolog of NCBI NO: 15230312 NR Description: 40S ribosomal protein S2 homolog
  misc_feature (1)..(185): Homolog of NCBI NO: 25294520 NR Description: hypothetical protein RF12
  misc_feature (1)..(185): Homolog of NCBI NO: 21539457 NR Description: ribosomal protein S2, putative [Arabidopsis
  misc_feature (1)..(185): Homolog of NCBI NO: 21618011 NR Description: ribosomal protein S2, putative [Arabidopsis
  misc_feature (1)..(185): Homolog of NCBI NO: 15217951 NR Description: ribosomal protein S2, putative; protein id:
  misc_feature (1)..(185): Homolog of NCBI NO: 18406325 NR Description: ribosomal protein S2, putative
  misc_feature (1)..(185): Homolog of NCBI NO: 21553851 NR Description: 40S ribosomal protein S2 [Arabidopsis thaliana]
  misc_feature (1)..(185): Homolog of NCBI NO: 15227443 NR Description: 40S ribosomal protein S2

SEQ ID NO: 33920 - DNA, 821 bp, Arabidopsis thaliana; identical to SEQ ID NO: 30330
  misc_feature (1)..(821): Ceres Seq. ID no. 12482404
  misc_feature: MA Experiment ID: 108434 Result: Down-regulated in Transcription
  misc_feature: MA Experiment 108434 PARAMETER Experiment Name: At_Root_Tips_cDNA_P Parameter: Tissue Value: Root Tips
  misc_feature: MA Experiment ID: 108461 Result: Up-regulated in Transcription
  misc_feature: MA Experiment 108461 PARAMETER Experiment Name: At_Germinating_Seeds_cDNA_P Parameter: Age (day) Value: 1 vs. 0
  misc_feature: MA Experiment 108461 PARAMETER Experiment Name: At_Germinating_Seeds_cDNA_P Parameter: Tissue Value: Germinating Seeds
  misc_feature: MA Experiment ID: 108464 Result: Up-regulated in Transcription
  misc_feature: MA Experiment 108464 PARAMETER Experiment Name: At_Germinating_Seeds_cDNA_P Parameter: Age (day) Value: 4 vs. 0
  misc_feature: MA Experiment 108464 PARAMETER Experiment Name: At_Germinating_Seeds_cDNA_P Parameter: Tissue Value: Germinating Seeds
  misc_feature: MA Experiment ID: 108594 Result: Down-regulated in Transcription
  misc_feature: MA Experiment 108594 PARAMETER Experiment Name: At_Ler-rhl_Root_cDNA_P Parameter: Plant Line Value: null
  misc_feature: MA Experiment ID: 108595 Result: Down-regulated in Transcription
  misc_feature: MA Experiment 108595 PARAMETER Experiment Name: At_Ler-pi_Ovule_cDNA_P Parameter: Plant Line Value: null
  misc_feature: MA Experiment ID: 20000185 Result: Up-regulated in Transcription
  misc_feature: MA Experiment 20000185 PARAMETER Experiment Name: At_Roots__P Parameter: Age (day) Value: 7 vs. 21
  misc_feature: MA Experiment 20000185 PARAMETER Experiment Name: At_Roots__P Parameter: Organism Value: A. thaliana
  misc_feature: MA Experiment 20000185 PARAMETER Experiment Name: At_Roots__P Parameter: Tissue Value: Roots vs. Whole Plant
  misc_feature: MA Experiment ID: 20000227 Result: Down-regulated in Transcription
  misc_feature: MA Experiment 20000227 PARAMETER Experiment Name: At_Root-Tips-vs-Tops_P Parameter: Tissue Value: Root Tips vs. Root Tops
  misc_feature: MA Experiment ID: 20000439 Result: Up-regulated in Transcription
  misc_feature: MA Experiment 20000439 PARAMETER Experiment Name: At_Roots__P Parameter: Age (day) Value: 14 vs. 21
  misc_feature: MA Experiment 20000439 PARAMETER Experiment Name: At_Roots__P Parameter: Organism Value: A. thaliana
  misc_feature: MA Experiment 20000439 PARAMETER Experiment Name: At_Roots__P Parameter: Tissue Value: Roots vs. Whole Plant
  misc_feature: MA Experiment ID: 20000495 Result: Down-regulated in Transcription
  misc_feature: MA Experiment 20000495 PARAMETER Experiment Name: At_Guard_Cells_P Parameter: Harvest Date Value: 8/2/2002
  misc_feature: MA Experiment 20000495 PARAMETER Experiment Name: At_Guard_Cells_P Parameter: Organism Value: A. thaliana
  misc_feature: MA Experiment 20000495 PARAMETER Experiment Name: At_Guard_Cells_P Parameter: Tissue Value: Guard Cells vs. Leaves
  misc_feature: MA Experiment ID: 20000496 Result: Down-regulated in Transcription
  misc_feature: MA Experiment 20000496 PARAMETER Experiment Name: At_Guard_Cells_P Parameter: Harvest Date Value: 7/19/2002
  misc_feature: MA Experiment 20000496 PARAMETER Experiment Name: At_Guard_Cells_P Parameter: Organism Value: Canola
  misc_feature: MA Experiment 20000496 PARAMETER Experiment Name: At_Guard_Cells_P Parameter: Tissue Value: Guard Cells vs. Leaves
  misc_feature: MA Experiment ID: 20001451 Result: Down-regulated in Transcription
  misc_feature: MA Experiment 20001451 PARAMETER Experiment Name: At_Far-red-induction_P Parameter: Age (day) Value: 7
  misc_feature: MA Experiment 20001451 PARAMETER Experiment Name: At_Far-red-induction_P Parameter: Light Value: Far-red vs. White
  misc_feature: MA Experiment 20001451 PARAMETER Experiment Name: At_Far-red-induction_P Parameter: Organism Value: A. thaliana
  misc_feature: MA Experiment 20001451 PARAMETER Experiment Name: At_Far-red-induction_P Parameter: Plant Line Value: Columbia
  misc_feature: MA Experiment 20001451 PARAMETER Experiment Name: At_Far-red-induction_P Parameter: Timepoint (hr) Value: 24
  misc_feature: MA Experiment 20001451 PARAMETER Experiment Name: At_Far-red-induction_P Parameter: Tissue Value: Whole Plant

SEQ ID NO: 33921 - protein, 196 aa, Arabidopsis thaliana; identical to SEQ ID NO: 30331
  peptide (1)..(196): Ceres Seq. ID no. 12482405
  misc_feature (11)..(181): Pfam Name: NADPH-dependent FMN reductase Pfam Description: NADPH-dependent FMN reductase
  misc_feature (11)..(194): Homolog of NCBI NO: 26250454 NR Description: Hypothetical protein yieF [Escherichia coli
  misc_feature (11)..(194): Homolog of NCBI NO: 16767134 NR Description: putative oxidoreductase [Salmonella typhimurium
  misc_feature (1)..(194): Homolog of NCBI NO: 16762479 NR Description: conserved hypothetical protein
  misc_feature (11)..(186): Homolog of NCBI NO: 22406524 NR Description: hypothetical protein [Ferroplasma acidarmanus]
  misc_feature (11)..(195): Homolog of NCBI NO: 15596401 NR Description: conserved hypothetical protein [Pseudomonas
  misc_feature (1)..(196): Homolog of NCBI NO: 34906652 NR Description: putative NADPH:quinone oxidoreductase
  misc_feature (1)..(196): Homolog of NCBI NO: 34906648 NR Description: putative NADPH:quinone oxidoreductase
  misc_feature (6)..(196): Homolog of NCBI NO: 24745889 NR Description: NAD(P)H:quinone oxidoreductase [Solanum tuberosum]
  misc_feature (1)..(196): Homolog of NCBI NO: 5002232 NR Description: NADPH:quinone oxidoreductase [Arabidopsis
  misc_feature (1)..(196): Homolog of NCBI NO: 15232856 NR Description: NADPH:quinone oxidoreductase (NQR)

SEQ ID NO: 33922 - DNA, 1033 bp, Arabidopsis thaliana; identical to SEQ ID NO: 30332
  misc_feature (1)..(1033): Ceres Seq. ID no. 12327338
  misc_feature: MA Experiment ID: 108461 Result: Up-regulated in Transcription
  misc_feature: MA Experiment 108461 PARAMETER Experiment Name: At_Germinating_Seeds_cDNA_P Parameter: Age (day) Value: 1 vs. 0
  misc_feature: MA Experiment 108461 PARAMETER Experiment Name: At_Germinating_Seeds_cDNA_P Parameter: Tissue Value: Germinating Seeds
  misc_feature: MA Experiment ID: 108462 Result: Up-regulated in Transcription
  misc_feature: MA Experiment 108462 PARAMETER Experiment Name: At_Germinating_Seeds_cDNA_P Parameter: Age (day) Value: 2 vs. 0
  misc_feature: MA Experiment 108462 PARAMETER Experiment Name: At_Germinating_Seeds_cDNA_P Parameter: Tissue Value: Germinating Seeds
  misc_feature: MA Experiment ID: 108463 Result: Up-regulated in Transcription
  misc_feature: MA Experiment 108463 PARAMETER Experiment Name: At_Germinating_Seeds_cDNA_P Parameter: Age (day) Value: 3 vs. 0
  misc_feature: MA Experiment 108463 PARAMETER Experiment Name: At_Germinating_Seeds_cDNA_P Parameter: Tissue Value: Germinating Seeds
  misc_feature: MA Experiment ID: 108464 Result: Up-regulated in Transcription
  misc_feature: MA Experiment 108464 PARAMETER Experiment Name: At_Germinating_Seeds_cDNA_P Parameter: Age (day) Value: 4 vs. 0
  misc_feature: MA Experiment 108464 PARAMETER Experiment Name: At_Germinating_Seeds_cDNA_P Parameter: Tissue Value: Germinating Seeds
  misc_feature: MA Experiment ID: 108595 Result: Down-regulated in Transcription
  misc_feature: MA Experiment 108595 PARAMETER Experiment Name: At_Ler-pi_Ovule_cDNA_P Parameter: Plant Line Value: null
  misc_feature: MA Experiment ID: 20000090 Result: Down-regulated in Transcription
  misc_feature: MA Experiment ID: 20000180 Result: Up-regulated in Transcription
  misc_feature: MA Experiment 20000180 PARAMETER Experiment Name: At_Germinating_Seeds_P Parameter: Age (hr) Value: 24 vs. 0
  misc_feature: MA Experiment 20000180 PARAMETER Experiment Name: At_Germinating_Seeds_P Parameter: Tissue Value: Germinating Seeds
  misc_feature: MA Experiment ID: 20000227 Result: Down-regulated in Transcription
  misc_feature: MA Experiment 20000227 PARAMETER Experiment Name: At_Root-Tips-vs-Tops_P Parameter: Tissue Value: Root Tips vs. Root Tops
  misc_feature: MA Experiment ID: 20000234 Result: Down-regulated in Transcription
  misc_feature: MA Experiment 20000234 PARAMETER Experiment Name: At_Siliques_P Parameter: Age (day) Value: 21
  misc_feature: MA Experiment 20000234 PARAMETER Experiment Name: At_Siliques_P Parameter: Organism Value: A. thaliana
  misc_feature: MA Experiment 20000234 PARAMETER Experiment Name: At_Siliques_P Parameter: Plant Line Value: WS
  misc_feature: MA Experiment 20000234 PARAMETER Experiment Name: At_Siliques_P Parameter: Tissue Value: Less Than 5mm Siliques vs. Whole Plant
  misc_feature: MA Experiment ID: 20000235 Result: Down-regulated in Transcription
  misc_feature: MA Experiment 20000235 PARAMETER Experiment Name: At_Siliques_P Parameter: Age (day) Value: 21
  misc_feature: MA Experiment 20000235 PARAMETER Experiment Name: At_Siliques_P Parameter: Organism Value: A. thaliana
  misc_feature: MA Experiment 20000235 PARAMETER Experiment Name: At_Siliques_P Parameter: Plant Line Value: WS
  misc_feature: MA Experiment 20000235 PARAMETER Experiment Name: At_Siliques_P Parameter: Tissue Value: 5-10mm Siliques vs. Whole Plant
  misc_feature: MA Experiment ID: 20000264 Result: Down-regulated in Transcription
  misc_feature: MA Experiment 20000264 PARAMETER Experiment Name: At_Open_Flower_P Parameter: Age (day) Value: 21
  misc_feature: MA Experiment 20000264 PARAMETER Experiment Name: At_Open_Flower_P Parameter: Plant Line Value: WS
  misc_feature: MA Experiment 20000264 PARAMETER Experiment Name: At_Open_Flower_P Parameter: Tissue Value: Open Flower vs. Whole Plant
  misc_feature: MA Experiment ID: 20000265 Result: Down-regulated in Transcription
  misc_feature: MA Experiment 20000265 PARAMETER Experiment Name: At_Open_Flower_P Parameter: Age (day) Value: 21
  misc_feature: MA Experiment 20000265 PARAMETER Experiment Name: At_Open_Flower_P Parameter: Plant Line Value: WS
  misc_feature: MA Experiment 20000265 PARAMETER Experiment Name: At_Open_Flower_P Parameter: Tissue Value: Closed Flower vs. Whole Plant
  misc_feature: MA Experiment ID: 20000286 Result: Down-regulated in Transcription
  misc_feature: MA Experiment 20000286 PARAMETER Experiment Name: At_Open_Flower_P Parameter: Age (day) Value: 21
  misc_feature: MA Experiment 20000286 PARAMETER Experiment Name: At_Open_Flower_P Parameter: Plant Line Value: WS
  misc_feature: MA Experiment 20000286 PARAMETER Experiment Name: At_Open_Flower_P Parameter: Tissue Value: Half Open vs. Whole Plant
  misc_feature: MA Experiment ID: 20000437 Result: Up-regulated in Transcription
  misc_feature: MA Experiment 20000437 PARAMETER Experiment Name: At_Drought_P Parameter: Age (day) Value: 8
  misc_feature: MA Experiment 20000437 PARAMETER Experiment Name: At_Drought_P Parameter: Organism Value: A. thaliana
  misc_feature: MA Experiment 20000437 PARAMETER Experiment Name: At_Drought_P Parameter: Plant Line Value: WS
  misc_feature: MA Experiment 20000437 PARAMETER Experiment Name: At_Drought_P Parameter: Timepoint (hr) Value: 24
  misc_feature: MA Experiment 20000437 PARAMETER Experiment Name: At_Drought_P Parameter: Tissue Value: Whole Plant
  misc_feature: MA Experiment 20000437 PARAMETER Experiment Name: At_Drought_P Parameter: Treatment Value: Drought vs. No Drought
  misc_feature: MA Experiment ID: 20000439 Result: Down-regulated in Transcription
  misc_feature: MA Experiment 20000439 PARAMETER Experiment Name: At_Roots__P Parameter: Age (day) Value: 14 vs. 21
  misc_feature: MA Experiment 20000439 PARAMETER Experiment Name: At_Roots__P Parameter: Organism Value: A. thaliana
  misc_feature: MA Experiment 20000439 PARAMETER Experiment Name: At_Roots__P Parameter: Tissue Value: Roots vs. Whole Plant
  misc_feature: MA Experiment ID: 20000496 Result: Down-regulated in Transcription
  misc_feature: MA Experiment 20000496 PARAMETER Experiment Name: At_Guard_Cells_P Parameter: Harvest Date Value: 7/19/2002
  misc_feature: MA Experiment 20000496 PARAMETER Experiment Name: At_Guard_Cells_P Parameter: Organism Value: Canola
  misc_feature: MA Experiment 20000496 PARAMETER Experiment Name: At_Guard_Cells_P Parameter: Tissue Value: Guard Cells vs. Leaves
  misc_feature: MA Experiment ID: 20000794 Result: Down-regulated in Transcription
  misc_feature: MA Experiment 20000794 PARAMETER Experiment Name: At_Petals_P Parameter: Age (day) Value: 23-25 days
  misc_feature: MA Experiment 20000794 PARAMETER Experiment Name: At_Petals_P Parameter: Plant Line Value: WS
  misc_feature: MA Experiment 20000794 PARAMETER Experiment Name: At_Petals_P Parameter: Tissue Value: Petals vs. Whole plant
  misc_feature: MA Experiment ID: 20001451 Result: Up-regulated in Transcription
  misc_feature: MA Experiment 20001451 PARAMETER Experiment Name: At_Far-red-induction_P Parameter: Age (day) Value: 7
  misc_feature: MA Experiment 20001451 PARAMETER Experiment Name: At_Far-red-induction_P Parameter: Light Value: Far-red vs. White
  misc_feature: MA Experiment 20001451 PARAMETER Experiment Name: At_Far-red-induction_P Parameter: Organism Value: A. thaliana
  misc_feature: MA Experiment 20001451 PARAMETER Experiment Name: At_Far-red-induction_P Parameter: Plant Line Value: Columbia
  misc_feature: MA Experiment 20001451 PARAMETER Experiment Name: At_Far-red-induction_P Parameter: Timepoint (hr) Value: 24
  misc_feature: MA Experiment 20001451 PARAMETER Experiment Name: At_Far-red-induction_P Parameter: Tissue Value: Whole Plant
  misc_feature: MA Experiment ID: 20001757 Result: Up-regulated in Transcription
  misc_feature: MA Experiment 20001757 PARAMETER Experiment Name: At_50mM_NH4NO3_L-to-H_P Parameter: Timepoint (hr) Value: 6
  misc_feature: MA Experiment 20001757 PARAMETER Experiment Name: At_50mM_NH4NO3_L-to-H_P Parameter: Tissue Value: Leaf
  misc_feature: MA Experiment 20001757 PARAMETER Experiment Name: At_50mM_NH4NO3_L-to-H_P Parameter: Treatment Value: 50mM NH4NO3 vs 100mM Mannitol

SEQ ID NO: 33923 - protein, 302 aa, Arabidopsis thaliana; identical to SEQ ID NO: 30333
  peptide (1)..(302): Ceres Seq. ID no. 12327339
  misc_feature (79)..(295): Pfam Name: PAP_fibrillin Pfam Description: PAP_fibrillin
  misc_feature (195)..(258): Homolog of NCBI NO: 37535940 NR Description: unknown protein [Oryza sativa (japonica
  misc_feature (19)..(302): Homolog of NCBI NO: 21553852 NR Description: unknown [Arabidopsis thaliana]
  misc_feature (19)..(302): Homolog of NCBI NO: 18407205 NR Description: Expressed protein

SEQ ID NO: 33924 - protein, 284 aa, Arabidopsis thaliana; identical to SEQ ID NO: 30334
  peptide (1)..(284): Ceres Seq. ID no. 12327340
  misc_feature (61)..(277): Pfam Name: PAP_fibrillin Pfam Description: PAP_fibrillin
  misc_feature (177)..(240): Homolog of NCBI NO: 37535940 NR Description: unknown protein [Oryza sativa (japonica
  misc_feature (1)..(284): Homolog of NCBI NO: 21553852 NR Description: unknown [Arabidopsis thaliana]
  misc_feature (1)..(284): Homolog of NCBI NO: 18407205 NR Description: Expressed protein

SEQ ID NO: 33925 - DNA, 1929 bp, Arabidopsis thaliana; identical to SEQ ID NO: 30335
  misc_feature (1)..(1929): Ceres Seq. ID no. 12324454
  misc_feature: MA Experiment ID: 108585 Result: Down-regulated in Transcription
  misc_feature: MA Experiment 108585 PARAMETER Experiment Name: At_5mM_NaNP_cDNA_P Parameter: Timepoint (hr) Value: 6
  misc_feature: MA Experiment 108585 PARAMETER Experiment Name: At_5mM_NaNP_cDNA_P Parameter: Tissue Value: Aerial
  misc_feature: MA Experiment 108585 PARAMETER Experiment Name: At_5mM_NaNP_cDNA_P Parameter: Treatment Value: null
  misc_feature: MA Experiment ID: 108595 Result: Down-regulated in Transcription
  misc_feature: MA Experiment 108595 PARAMETER Experiment Name: At_Ler-pi_Ovule_cDNA_P Parameter: Plant Line Value: null
  misc_feature: MA Experiment ID: 108668 Result: Down-regulated in Transcription
  misc_feature: MA Experiment 108668 PARAMETER Experiment Name: At_2mM_SA_cDNA_P Parameter: Plant Line Value: WS
  misc_feature: MA Experiment 108668 PARAMETER Experiment Name: At_2mM_SA_cDNA_P Parameter: Timepoint (hr) Value: 6
  misc_feature: MA Experiment 108668 PARAMETER Experiment Name: At_2mM_SA_cDNA_P Parameter: Treatment Value: 2mM SA vs. No Treatment
  misc_feature: MA Experiment ID: 20000307 Result: Up-regulated in Transcription
  misc_feature: MA Experiment 20000307 PARAMETER Experiment Name: At_Germinating_Seeds_Sub_P Parameter: Age (hr) Value: 24 vs. 0
  misc_feature: MA Experiment 20000307 PARAMETER Experiment Name: At_Germinating_Seeds_Sub_P Parameter: Organism Value: A. thaliana
  misc_feature: MA Experiment 20000307 PARAMETER Experiment Name: At_Germinating_Seeds_Sub_P Parameter: Plant Line Value: WS
  misc_feature: MA Experiment 20000307 PARAMETER Experiment Name: At_Germinating_Seeds_Sub_P Parameter: Tissue Value: Germinating Seeds

SEQ ID NO: 33926 - protein, 388 aa, Arabidopsis thaliana; identical to SEQ ID NO: 30336
  peptide (1)..(388): Ceres Seq. ID no. 12324455
  misc_feature (187)..(342): Pfam Name: Shikimate kinase Pfam Description: Shikimate kinase
  misc_feature (183)..(287): Homolog of NCBI NO: 37522279 NR Description: shikimate kinase [Gloeobacter violaceus]
  misc_feature (254)..(383): Homolog of NCBI NO: 37537148 NR Description: unknown protein [Oryza sativa (japonica
  misc_feature (82)..(253): Homolog of NCBI NO: 37537148 NR Description: unknown protein [Oryza sativa (japonica
  misc_feature (82)..(355): Homolog of NCBI NO: 25408383 NR Description: hypothetical protein At2g35500 [imported] -
  misc_feature (2)..(388): Homolog of NCBI NO: 18403860 NR Description: expressed protein

SEQ ID NO: 33927 - protein, 387 aa, Arabidopsis thaliana; identical to SEQ ID NO: 30337
  peptide (1)..(387): Ceres Seq. ID no. 12324456
  misc_feature (186)..(341): Pfam Name: Shikimate kinase Pfam Description: Shikimate kinase
  misc_feature (182)..(286): Homolog of NCBI NO: 37522279 NR Description: shikimate kinase [Gloeobacter violaceus]
  misc_feature (253)..(382): Homolog of NCBI NO: 37537148 NR Description: unknown protein [Oryza sativa (japonica
  misc_feature (81)..(252): Homolog of NCBI NO: 37537148 NR Description: unknown protein [Oryza sativa (japonica
  misc_feature (81)..(354): Homolog of NCBI NO: 25408383 NR Description: hypothetical protein At2g35500 [imported] -
  misc_feature (1)..(387): Homolog of NCBI NO: 18403860 NR Description: expressed protein

SEQ ID NO: 33928 - protein, 249 aa, Arabidopsis thaliana; identical to SEQ ID NO: 30338
  peptide (1)..(249): Ceres Seq. ID no. 12324457
  misc_feature (48)..(203): Pfam Name: Shikimate kinase Pfam Description: Shikimate kinase
  misc_feature (44)..(148): Homolog of NCBI NO: 37522279 NR Description: shikimate kinase [Gloeobacter violaceus]
  misc_feature (115)..(244): Homolog of NCBI NO: 37537148 NR Description: unknown protein [Oryza sativa (japonica
  misc_feature (1)..(114): Homolog of NCBI NO: 37537148 NR Description: unknown protein [Oryza sativa (japonica
  misc_feature (1)..(216): Homolog of NCBI NO: 25408383 NR Description: hypothetical protein At2g35500 [imported] -
  misc_feature (1)..(249): Homolog of NCBI NO: 18403860 NR Description: expressed protein

SEQ ID NO: 33929 - DNA, 1267 bp, Arabidopsis thaliana; identical to SEQ ID NO: 30339
  misc_feature (1)..(1267): Ceres Seq. ID no. 13487841
  misc_feature: MA Experiment ID: 20000184 Result: Up-regulated in Transcription
  misc_feature: MA Experiment 20000184 PARAMETER Experiment Name: At_Shoots__P Parameter: Age (day) Value: 7
  misc_feature: MA Experiment 20000184 PARAMETER Experiment Name: At_Shoots__P Parameter: Tissue Value: Shoots vs. Whole Plant
  misc_feature: MA Experiment ID: 20000495 Result: Up-regulated in Transcription
  misc_feature: MA Experiment 20000495 PARAMETER Experiment Name: At_Guard_Cells_P Parameter: Harvest Date Value: 8/2/2002
  misc_feature: MA Experiment 20000495 PARAMETER Experiment Name: At_Guard_Cells_P Parameter: Organism Value: A. thaliana
  misc_feature: MA Experiment 20000495 PARAMETER Experiment Name: At_Guard_Cells_P Parameter: Tissue Value: Guard Cells vs. Leaves
  misc_feature: MA Experiment ID: 20001557 Result: Up-regulated in Transcription
  misc_feature: MA Experiment 20001557 PARAMETER Experiment Name: At_Drought_Soil_Dry_P Parameter: Age (day) Value: 27
  misc_feature: MA Experiment 20001557 PARAMETER Experiment Name: At_Drought_Soil_Dry_P Parameter: Organism Value: A. thaliana
  misc_feature: MA Experiment 20001557 PARAMETER Experiment Name: At_Drought_Soil_Dry_P Parameter: Plant Line Value: WS
  misc_feature: MA Experiment 20001557 PARAMETER Experiment Name: At_Drought_Soil_Dry_P Parameter: Post Timepoint (hr) Value: 3
  misc_feature: MA Experiment 20001557 PARAMETER Experiment Name: At_Drought_Soil_Dry_P Parameter: Post-Treatment Value: Re-Water vs. No Drought
  misc_feature: MA Experiment 20001557 PARAMETER Experiment Name: At_Drought_Soil_Dry_P Parameter: Timepoint (day) Value: 13
  misc_feature: MA Experiment 20001557 PARAMETER Experiment Name: At_Drought_Soil_Dry_P Parameter: Treatment Value: Drought vs. No Drought
  misc_feature: MA Experiment ID: 20001911 Result: Down-regulated in Transcription
  misc_feature: MA Experiment 20001911 PARAMETER Experiment Name: At_Drought_Reproduction_P Parameter: Age (day) Value: 40
  misc_feature: MA Experiment 20001911 PARAMETER Experiment Name: At_Drought_Reproduction_P Parameter: Organism Value: A. thaliana
  misc_feature: MA Experiment 20001911 PARAMETER Experiment Name: At_Drought_Reproduction_P Parameter: Plant Line Value: WS
  misc_feature: MA Experiment 20001911 PARAMETER Experiment Name: At_Drought_Reproduction_P Parameter: Timepoint (day) Value: 10
  misc_feature: MA Experiment 20001911 PARAMETER Experiment Name: At_Drought_Reproduction_P Parameter: Tissue Value: Flowers
  misc_feature: MA Experiment 20001911 PARAMETER Experiment Name: At_Drought_Reproduction_P Parameter: Treatment Value: Drought vs. No Drought

SEQ ID NO: 33930 - protein, 281 aa, Arabidopsis thaliana; identical to SEQ ID NO: 30340
  peptide (1)..(281): Ceres Seq. ID no. 13487842
  misc_feature (153)..(267): Pfam Name: Oxidoreductase NAD-binding domain Pfam Description: Oxidoreductase NAD-binding domain
  misc_feature (38)..(273): Homolog of NCBI NO: 27924030 NR Description: reductase [Fusarium sporotrichioides]
  misc_feature (18)..(273): Homolog of NCBI NO: 19075352 NR Description: putative nadh-cytochrome b5 reductase
  misc_feature (38)..(273): Homolog of NCBI NO: 29126014 NR Description: putative NADH cytb-reductase [Gibberella zeae]
  misc_feature (38)..(273): Homolog of NCBI NO: 28202143 NR Description: reductase [Gibberella zeae]
  misc_feature (13)..(274): Homolog of NCBI NO: 40739560 NR Description: hypothetical protein AN6366.2 [Aspergillus
  misc_feature (21)..(273): Homolog of NCBI NO: 6070342 NR Description: NADH-cytochrome b5 reductase [Mortierella alpina]
  misc_feature (118)..(281): Homolog of NCBI NO: 16648905 NR Description: NADH-cytochrome b5 reductase [Arabidopsis
  misc_feature (4)..(281): Homolog of NCBI NO: 4336205 NR Description: cytochrome b5 reductase [Zea mays]
  misc_feature (4)..(281): Homolog of NCBI NO: 17221690 NR Description: cytochrome b5 reductase isoform II [Zea mays]
  misc_feature (1)..(281): Homolog of NCBI NO: 15238025 NR Description: NADH-cytochrome b5 reductase [Arabidopsis

SEQ ID NO: 33931 - protein, 164 aa, Arabidopsis thaliana; identical to SEQ ID NO: 30341
  peptide (1)..(164): Ceres Seq. ID no. 13487843
  misc_feature (36)..(150): Pfam Name: Oxidoreductase NAD-binding domain Pfam Description: Oxidoreductase NAD-binding domain
  misc_feature (1)..(156): Homolog of NCBI NO: 27924030 NR Description: reductase [Fusarium sporotrichioides]
  misc_feature (1)..(156): Homolog of NCBI NO: 19075352 NR Description: putative nadh-cytochrome b5 reductase
  misc_feature (1)..(156): Homolog of NCBI NO: 29126014 NR Description: putative NADH cytb-reductase [Gibberella zeae]
  misc_feature (1)..(156): Homolog of NCBI NO: 28202143 NR Description: reductase [Gibberella zeae]
  misc_feature (1)..(157): Homolog of NCBI NO: 40739560 NR Description: hypothetical protein AN6366.2 [Aspergillus
  misc_feature (1)..(156): Homolog of NCBI NO: 6070342 NR Description: NADH-cytochrome b5 reductase [Mortierella alpina]
  misc_feature (1)..(164): Homolog of NCBI NO: 16648905 NR Description: NADH-cytochrome b5 reductase [Arabidopsis
  misc_feature (1)..(164): Homolog of NCBI NO: 4336205 NR Description: cytochrome b5 reductase [Zea mays]
  misc_feature (1)..(164): Homolog of NCBI NO: 17221690 NR Description: cytochrome b5 reductase isoform II [Zea mays]
  misc_feature (1)..(164): Homolog of NCBI NO: 15238025 NR Description: NADH-cytochrome b5 reductase [Arabidopsis

SEQ ID NO: 33932 - protein, 158 aa, Arabidopsis thaliana; identical to SEQ ID NO: 30342
  peptide (1)..(158): Ceres Seq. ID no. 13487844
  misc_feature (30)..(144): Pfam Name: Oxidoreductase NAD-binding domain Pfam Description: Oxidoreductase NAD-binding domain
  misc_feature (1)..(150): Homolog of NCBI NO: 27924030 NR Description: reductase [Fusarium sporotrichioides]
  misc_feature (1)..(150): Homolog of NCBI NO: 19075352 NR Description: putative nadh-cytochrome b5 reductase
  misc_feature (1)..(150): Homolog of NCBI NO: 29126014 NR Description: putative NADH cytb-reductase [Gibberella zeae]
  misc_feature (1)..(150): Homolog of NCBI NO: 28202143 NR Description: reductase [Gibberella zeae]
  misc_feature (1)..(151): Homolog of NCBI NO: 40739560 NR Description: hypothetical protein AN6366.2 [Aspergillus
  misc_feature (1)..(150): Homolog of NCBI NO: 6070342 NR Description: NADH-cytochrome b5 reductase [Mortierella alpina]
  misc_feature (1)..(158): Homolog of NCBI NO: 16648905 NR Description: NADH-cytochrome b5 reductase [Arabidopsis
  misc_feature (1)..(158): Homolog of NCBI NO: 4336205 NR Description: cytochrome b5 reductase [Zea mays]
  misc_feature (1)..(158): Homolog of NCBI NO: 17221690 NR Description: cytochrome b5 reductase isoform II [Zea mays]
  misc_feature (1)..(158): Homolog of NCBI NO: 15238025 NR Description: NADH-cytochrome b5 reductase [Arabidopsis

SEQ ID NO: 33933 - DNA, 1139 bp, Arabidopsis thaliana; identical to SEQ ID NO: 30343
  misc_feature (1)..(1139): Ceres Seq. ID no. 12396159
  misc_feature: MA Experiment ID: 108462 Result: Up-regulated in Transcription
  misc_feature: MA Experiment 108462 PARAMETER Experiment Name: At_Germinating_Seeds_cDNA_P Parameter: Age (day) Value: 2 vs. 0
  misc_feature: MA Experiment 108462 PARAMETER Experiment Name: At_Germinating_Seeds_cDNA_P Parameter: Tissue Value: Germinating Seeds
  misc_feature: MA Experiment ID: 108463 Result: Up-regulated in Transcription
  misc_feature: MA Experiment 108463 PARAMETER Experiment Name: At_Germinating_Seeds_cDNA_P Parameter: Age (day) Value: 3 vs. 0
  misc_feature: MA Experiment 108463 PARAMETER Experiment Name: At_Germinating_Seeds_cDNA_P Parameter: Tissue Value: Germinating Seeds
  misc_feature: MA Experiment ID: 108464 Result: Up-regulated in Transcription
  misc_feature: MA Experiment 108464 PARAMETER Experiment Name: At_Germinating_Seeds_cDNA_P Parameter: Age (day) Value: 4 vs. 0
  misc_feature: MA Experiment 108464 PARAMETER Experiment Name: At_Germinating_Seeds_cDNA_P Parameter: Tissue Value: Germinating Seeds
  misc_feature: MA Experiment ID: 108595 Result: Down-regulated in Transcription
  misc_feature: MA Experiment 108595 PARAMETER Experiment Name: At_Ler-pi_Ovule_cDNA_P Parameter: Plant Line Value: null
  misc_feature: MA Experiment ID: 20000113 Result: Up-regulated in Transcription
  misc_feature: MA Experiment 20000113 PARAMETER Experiment Name: At_42deg_Heat_cDNA_P Parameter: Temperature (deg C) Value: 42 vs. 22
  misc_feature: MA Experiment 20000113 PARAMETER Experiment Name: At_42deg_Heat_cDNA_P Parameter: Timepoint (hr) Value: 8
  misc_feature: MA Experiment 20000113 PARAMETER Experiment Name: At_42deg_Heat_cDNA_P Parameter: Tissue Value: Aerial
  misc_feature: MA Experiment ID: 20000179 Result: Up-regulated in Transcription
  misc_feature: MA Experiment 20000179 PARAMETER Experiment Name: At_Germinating_Seeds_P Parameter: Age (hr) Value: 6 vs. 0
  misc_feature: MA Experiment 20000179 PARAMETER Experiment Name: At_Germinating_Seeds_P Parameter: Tissue Value: Germinating Seeds
  misc_feature: MA Experiment ID: 20000180 Result: Up-regulated in Transcription
  misc_feature: MA Experiment 20000180 PARAMETER Experiment Name: At_Germinating_Seeds_P Parameter: Age (hr) Value: 24 vs. 0
  misc_feature: MA Experiment 20000180 PARAMETER Experiment Name: At_Germinating_Seeds_P Parameter: Tissue Value: Germinating Seeds
  misc_feature: MA Experiment ID: 20000185 Result: Down-regulated in Transcription
  misc_feature: MA Experiment 20000185 PARAMETER Experiment Name: At_Roots__P Parameter: Age (day) Value: 7 vs. 21
  misc_feature: MA Experiment 20000185 PARAMETER Experiment Name: At_Roots__P Parameter: Organism Value: A. thaliana
  misc_feature: MA Experiment 20000185 PARAMETER Experiment Name: At_Roots__P Parameter: Tissue Value: Roots vs. Whole Plant
  misc_feature: MA Experiment ID: 20000224 Result: Down-regulated in Transcription
  misc_feature: MA Experiment ID: 20000264 Result: Down-regulated in Transcription
  misc_feature: MA Experiment 20000264 PARAMETER Experiment Name: At_Open_Flower_P Parameter: Age (day) Value: 21
  misc_feature: MA Experiment 20000264 PARAMETER Experiment Name: At_Open_Flower_P Parameter: Plant Line Value: WS
  misc_feature: MA Experiment 20000264 PARAMETER Experiment Name: At_Open_Flower_P Parameter: Tissue Value: Open Flower vs. Whole Plant
  misc_feature: MA Experiment ID: 20000286 Result: Down-regulated in Transcription
  misc_feature: MA Experiment 20000286 PARAMETER Experiment Name: At_Open_Flower_P Parameter: Age (day) Value: 21
  misc_feature: MA Experiment 20000286 PARAMETER Experiment Name: At_Open_Flower_P Parameter: Plant Line Value: WS
  misc_feature: MA Experiment 20000286 PARAMETER Experiment Name: At_Open_Flower_P Parameter: Tissue Value: Half Open vs. Whole Plant
  misc_feature: MA Experiment ID: 20000439 Result: Down-regulated in Transcription
  misc_feature: MA Experiment 20000439 PARAMETER Experiment Name: At_Roots__P Parameter: Age (day) Value: 14 vs. 21
  misc_feature: MA Experiment 20000439 PARAMETER Experiment Name: At_Roots__P Parameter: Organism Value: A. thaliana
  misc_feature: MA Experiment 20000439 PARAMETER Experiment Name: At_Roots__P Parameter: Tissue Value: Roots vs. Whole Plant
  misc_feature: MA Experiment ID: 20000794 Result: Down-regulated in Transcription
  misc_feature: MA Experiment 20000794 PARAMETER Experiment Name: At_Petals_P Parameter: Age (day) Value: 23-25 days
  misc_feature: MA Experiment 20000794 PARAMETER Experiment Name: At_Petals_P Parameter: Plant Line Value: WS
  misc_feature: MA Experiment 20000794 PARAMETER Experiment Name: At_Petals_P Parameter: Tissue Value: Petals vs. Whole plant
  misc_feature: MA Experiment ID: 20001904 Result: Down-regulated in Transcription
  misc_feature: MA Experiment 20001904 PARAMETER Experiment Name: At_Drought_Reproduction_P Parameter: Age (day) Value: 37
  misc_feature: MA Experiment 20001904 PARAMETER Experiment Name: At_Drought_Reproduction_P Parameter: Organism Value: A. thaliana
  misc_feature: MA Experiment 20001904 PARAMETER Experiment Name: At_Drought_Reproduction_P Parameter: Plant Line Value: WS
  misc_feature: MA Experiment 20001904 PARAMETER Experiment Name: At_Drought_Reproduction_P Parameter: Timepoint (day) Value: 7
  misc_feature: MA Experiment 20001904 PARAMETER Experiment Name: At_Drought_Reproduction_P Parameter: Tissue Value: Rosettes
  misc_feature: MA Experiment 20001904 PARAMETER Experiment Name: At_Drought_Reproduction_P Parameter: Treatment Value: Drought vs. No Drought
  misc_feature: MA Experiment ID: 20001905 Result: Down-regulated in Transcription
  misc_feature: MA Experiment 20001905 PARAMETER Experiment Name: At_Drought_Reproduction_P Parameter: Age (day) Value: 40
  misc_feature: MA Experiment 20001905 PARAMETER Experiment Name: At_Drought_Reproduction_P Parameter: Organism Value: A. thaliana
  misc_feature: MA Experiment 20001905 PARAMETER Experiment Name: At_Drought_Reproduction_P Parameter: Plant Line Value: WS
  misc_feature: MA Experiment 20001905 PARAMETER Experiment Name: At_Drought_Reproduction_P Parameter: Timepoint (day) Value: 10
  misc_feature: MA Experiment 20001905 PARAMETER Experiment Name: At_Drought_Reproduction_P Parameter: Tissue Value: Rosettes
  misc_feature: MA Experiment 20001905 PARAMETER Experiment Name: At_Drought_Reproduction_P Parameter: Treatment Value: Drought vs. No Drought
  misc_feature: MA Experiment ID: 20001906 Result: Down-regulated in Transcription
  misc_feature: MA Experiment 20001906 PARAMETER Experiment Name: At_Drought_Reproduction_P Parameter: Age (day) Value: 35
  misc_feature: MA Experiment 20001906 PARAMETER Experiment Name: At_Drought_Reproduction_P Parameter: Organism Value: A. thaliana
  misc_feature: MA Experiment 20001906 PARAMETER Experiment Name: At_Drought_Reproduction_P Parameter: Plant Line Value: WS
  misc_feature: MA Experiment 20001906 PARAMETER Experiment Name: At_Drought_Reproduction_P Parameter: Timepoint (day) Value: 5
  misc_feature: MA Experiment 20001906 PARAMETER Experiment Name: At_Drought_Reproduction_P Parameter: Tissue Value: Siliques
  misc_feature: MA Experiment 20001906 PARAMETER Experiment Name: At_Drought_Reproduction_P Parameter: Treatment Value: Drought vs. No Drought
  misc_feature: MA Experiment ID: 20001911 Result: Down-regulated in Transcription
  misc_feature: MA Experiment 20001911 PARAMETER Experiment Name: At_Drought_Reproduction_P Parameter: Age (day) Value: 40
  misc_feature: MA Experiment 20001911 PARAMETER Experiment Name: At_Drought_Reproduction_P Parameter: Organism Value: A. thaliana
  misc_feature: MA Experiment 20001911 PARAMETER Experiment Name: At_Drought_Reproduction_P Parameter: Plant Line Value: WS
  misc_feature: MA Experiment 20001911 PARAMETER Experiment Name: At_Drought_Reproduction_P Parameter: Timepoint (day) Value: 10
  misc_feature: MA Experiment 20001911 PARAMETER Experiment Name: At_Drought_Reproduction_P Parameter: Tissue Value: Flowers
  misc_feature: MA Experiment 20001911 PARAMETER Experiment Name: At_Drought_Reproduction_P Parameter: Treatment Value: Drought vs. No Drought

SEQ ID NO: 33934 - protein, 294 aa, Arabidopsis thaliana; identical to SEQ ID NO: 30344
  peptide (1)..(294): Ceres Seq. ID no. 12396160
  misc_feature (3)..(50): Pfam Name: B-box zinc finger Pfam Description: B-box zinc finger
  misc_feature (139)..(294): Homolog of NCBI NO: 21594050 NR Description: CONSTANS-like B-box zinc finger protein-like
  misc_feature (3)..(157): Homolog of NCBI NO: 17433047 NR Description: Zinc finger protein constans-like 15
  misc_feature (139)..(294): Homolog of NCBI NO: 17433047 NR Description: Zinc finger protein constans-like 15
  misc_feature (168)..(294): Homolog of NCBI NO: 4091804 NR Description: CONSTANS-like protein 1 [Malus x domestica]
  misc_feature (6)..(185): Homolog of NCBI NO: 4091804 NR Description: CONSTANS-like protein 1 [Malus x domestica]
  misc_feature (168)..(294): Homolog of NCBI NO: 30689668 NR Description: CONSTANS B-box zinc finger family protein
  misc_feature (1)..(176): Homolog of NCBI NO: 30689668 NR Description: CONSTANS B-box zinc finger family protein
  misc_feature (4)..(294): Homolog of NCBI NO: 7488604 NR Description: CONSTANS protein homolog COL1 - radish
  misc_feature (1)..(294): Homolog of NCBI NO: 21553854 NR Description: zinc finger protein constans-like 8 [Arabidopsis
  misc_feature (1)..(294): Homolog of NCBI NO: 15224620 NR Description: CONSTANS B-box zinc finger family protein

SEQ ID NO: 33935 - DNA, 1082 bp, Arabidopsis thaliana; identical to SEQ ID NO: 30345
  misc_feature (1)..(1082): Ceres Seq. ID no. 13500301
  misc_feature: MA Experiment ID: 108569 Result: Up-regulated in Transcription
  misc_feature: MA Experiment 108569 PARAMETER Experiment Name: At_0.001%_MeJA__cDNA_P Parameter: Timepoint (hr) Value: 6
  misc_feature: MA Experiment 108569 PARAMETER Experiment Name: At_0.001%_MeJA__cDNA_P Parameter: Tissue Value: Aerial
  misc_feature: MA Experiment 108569 PARAMETER Experiment Name: At_0.001%_MeJA__cDNA_P Parameter: Treatment Value: 0.001% MeJA vs. No Treatment
  misc_feature: MA Experiment ID: 108573 Result: Up-regulated in Transcription
  misc_feature: MA Experiment 108573 PARAMETER Experiment Name: At_Drought_cDNA_P Parameter: Timepoint (hr) Value: 6
  misc_feature: MA Experiment 108573 PARAMETER Experiment Name: At_Drought_cDNA_P Parameter: Tissue Value: Aerial
  misc_feature: MA Experiment 108573 PARAMETER Experiment Name: At_Drought_cDNA_P Parameter: Treatment Value: Drought vs. No Drought
  misc_feature: MA Experiment ID: 20000071 Result: Up-regulated in Transcription
  misc_feature: MA Experiment 20000071 PARAMETER Experiment Name: At_100uM_ABA_Mutants_cDNA_P Parameter: Plant Line Value: CS8104
  misc_feature: MA Experiment 20000071 PARAMETER Experiment Name: At_100uM_ABA_Mutants_cDNA_P Parameter: Timepoint (hr) Value: 6
  misc_feature: MA Experiment 20000071 PARAMETER Experiment Name: At_100uM_ABA_Mutants_cDNA_P Parameter: Tissue Value: Aerial
  misc_feature: MA Experiment 20000071 PARAMETER Experiment Name: At_100uM_ABA_Mutants_cDNA_P Parameter: Treatment Value: 100uM ABA vs. No Treatment
  misc_feature: MA Experiment ID: 20000086 Result: Up-regulated in Transcription
  misc_feature: MA Experiment 20000086 PARAMETER Experiment Name: At_100uM_ABA_Mutants_cDNA_P Parameter: Plant Line Value: CS22
  misc_feature: MA Experiment 20000086 PARAMETER Experiment Name: At_100uM_ABA_Mutants_cDNA_P Parameter: Timepoint (hr) Value: 6
  misc_feature: MA Experiment 20000086 PARAMETER Experiment Name: At_100uM_ABA_Mutants_cDNA_P Parameter: Tissue Value: Aerial
  misc_feature: MA Experiment 20000086 PARAMETER Experiment Name: At_100uM_ABA_Mutants_cDNA_P Parameter: Treatment Value: 100uM ABA vs. No Treatment
  misc_feature: MA Experiment ID: 20000171 Result: Down-regulated in Transcription
  misc_feature: MA Experiment 20000171 PARAMETER Experiment Name: At_42deg_Heat_P Parameter: Age (day) Value: 14
  misc_feature: MA Experiment 20000171 PARAMETER Experiment Name: At_42deg_Heat_P Parameter: Organism Value: A. thaliana
  misc_feature: MA Experiment 20000171 PARAMETER Experiment Name: At_42deg_Heat_P Parameter: Plant Line Value: WS
  misc_feature: MA Experiment 20000171 PARAMETER Experiment Name: At_42deg_Heat_P Parameter: Temperature (deg C) Value: 42 vs. 22
  misc_feature: MA Experiment 20000171 PARAMETER Experiment Name: At_42deg_Heat_P Parameter: Timepoint (hr) Value: 1
  misc_feature: MA Experiment 20000171 PARAMETER Experiment Name: At_42deg_Heat_P Parameter: Tissue Value: Aerial
  misc_feature: MA Experiment ID: 20000234 Result: Down-regulated in Transcription
  misc_feature: MA Experiment 20000234 PARAMETER Experiment Name: At_Siliques_P Parameter: Age (day) Value: 21
  misc_feature: MA Experiment 20000234 PARAMETER Experiment Name: At_Siliques_P Parameter: Organism Value: A. thaliana
  misc_feature: MA Experiment 20000234 PARAMETER Experiment Name: At_Siliques_P Parameter: Plant Line Value: WS
  misc_feature: MA Experiment 20000234 PARAMETER Experiment Name: At_Siliques_P Parameter: Tissue Value: Less Than 5mm Siliques vs. Whole Plant
  misc_feature: MA Experiment ID: 20000265 Result: Down-regulated in Transcription
  misc_feature: MA Experiment 20000265 PARAMETER Experiment Name: At_Open_Flower_P Parameter: Age (day) Value: 21
  misc_feature: MA Experiment 20000265 PARAMETER Experiment Name: At_Open_Flower_P Parameter: Plant Line Value: WS
  misc_feature: MA Experiment 20000265 PARAMETER Experiment Name: At_Open_Flower_P Parameter: Tissue Value: Closed Flower vs. Whole Plant
  misc_feature: MA Experiment ID: 20000794 Result: Up-regulated in Transcription
  misc_feature: MA Experiment 20000794 PARAMETER Experiment Name: At_Petals_P Parameter: Age (day) Value: 23-25 days
  misc_feature: MA Experiment 20000794 PARAMETER Experiment Name: At_Petals_P Parameter: Plant Line Value: WS
  misc_feature: MA Experiment 20000794 PARAMETER Experiment Name: At_Petals_P Parameter: Tissue Value: Petals vs. Whole plant

SEQ ID NO: 33936 - protein, 278 aa, Arabidopsis thaliana; identical to SEQ ID NO: 30346
  peptide (1)..(278): Ceres Seq. ID no. 13500302
  misc_feature (1)..(128): Pfam Name: Eukaryotic aspartyl protease Pfam Description: Eukaryotic aspartyl protease
  misc_feature (1)..(278): Homolog of NCBI NO: 12231174 NR Description: aspartic proteinase 2 [Nepenthes alata]
  misc_feature (1)..(278): Homolog of NCBI NO: 7435837 NR Description: aspartic proteinase (EC 3.4.23.-) - cowpea
  misc_feature (1)..(278): Homolog of NCBI NO: 20800441 NR Description: aspartic proteinase [Vigna unguiculata]
  misc_feature (1)..(278): Homolog of NCBI NO: 2811025 NR Description: Aspartic proteinase precursor
  misc_feature (3)..(277): Homolog of NCBI NO: 22330379 NR Description: aspartic protease -related [Arabidopsis thaliana]
  misc_feature (1)..(247): Homolog of NCBI NO: 541919 NR Description: aspartic proteinase (EC 3.4.23.-) - wild cabbage
  misc_feature (1)..(278): Homolog of NCBI NO: 7488553 NR Description: aspartic proteinase (EC 3.4.23.-) - wild cabbage
  misc_feature (1)..(278): Homolog of NCBI NO: 7435838 NR Description: probable aspartic proteinase (EC 3.4.23.-) 1 -
  misc_feature (1)..(278): Homolog of NCBI NO: 15221141 NR Description: aspartic proteinase -related [Arabidopsis
  misc_feature (1)..(278): Homolog of NCBI NO: 1354272 NR Description: aspartic proteinase [Arabidopsis thaliana]

SEQ ID NO: 33937 - protein, 242 aa, Arabidopsis thaliana; identical to SEQ ID NO: 30347
  peptide (1)..(242): Ceres Seq. ID no. 13500303
  misc_feature (1)..(92): Pfam Name: Eukaryotic aspartyl protease Pfam Description: Eukaryotic aspartyl protease
  misc_feature (1)..(242): Homolog of NCBI NO: 12231174 NR Description: aspartic proteinase 2 [Nepenthes alata]
  misc_feature (1)..(242): Homolog of NCBI NO: 7435837 NR Description: aspartic proteinase (EC 3.4.23.-) - cowpea
  misc_feature (1)..(242): Homolog of NCBI NO: 20800441 NR Description: aspartic proteinase [Vigna unguiculata]
  misc_feature (1)..(242): Homolog of NCBI NO: 2811025 NR Description: Aspartic proteinase precursor
  misc_feature (1)..(241): Homolog of NCBI NO: 22330379 NR Description: aspartic protease -related [Arabidopsis thaliana]
  misc_feature (1)..(211): Homolog of NCBI NO: 541919 NR Description: aspartic proteinase (EC 3.4.23.-) - wild cabbage
  misc_feature (1)..(242): Homolog of NCBI NO: 7488553 NR Description: aspartic proteinase (EC 3.4.23.-) - wild cabbage
  misc_feature (1)..(242): Homolog of NCBI NO: 7435838 NR Description: probable aspartic proteinase (EC 3.4.23.-) 1 -
  misc_feature (1)..(242): Homolog of NCBI NO: 15221141 NR Description: aspartic proteinase -related [Arabidopsis
  misc_feature (1)..(242): Homolog of NCBI NO: 1354272 NR Description: aspartic proteinase [Arabidopsis thaliana]

SEQ ID NO: 33938 - protein, 205 aa, Arabidopsis thaliana; identical to SEQ ID NO: 30348
  peptide (1)..(205): Ceres Seq. ID no. 13500304
  misc_feature (1)..(55): Pfam Name: Eukaryotic aspartyl protease Pfam Description: Eukaryotic aspartyl protease
  misc_feature (1)..(205): Homolog of NCBI NO: 12231174 NR Description: aspartic proteinase 2 [Nepenthes alata]
  misc_feature (1)..(205): Homolog of NCBI NO: 7435837 NR Description: aspartic proteinase (EC 3.4.23.-) - cowpea
  misc_feature (1)..(205): Homolog of NCBI NO: 20800441 NR Description: aspartic proteinase [Vigna unguiculata]
  misc_feature (1)..(205): Homolog of NCBI NO: 2811025 NR Description: Aspartic proteinase precursor
  misc_feature (1)..(204): Homolog of NCBI NO: 22330379 NR Description: aspartic protease -related [Arabidopsis thaliana]
  misc_feature (1)..(174): Homolog of NCBI NO: 541919 NR Description: aspartic proteinase (EC 3.4.23.-) - wild cabbage
  misc_feature (1)..(205): Homolog of NCBI NO: 7488553 NR Description: aspartic proteinase (EC 3.4.23.-) - wild cabbage
  misc_feature (1)..(205): Homolog of NCBI NO: 7435838 NR Description: probable aspartic proteinase (EC 3.4.23.-) 1 -
  misc_feature (1)..(205): Homolog of NCBI NO: 15221141 NR Description: aspartic proteinase -related [Arabidopsis
  misc_feature (1)..(205): Homolog of NCBI NO: 1354272 NR Description: aspartic proteinase [Arabidopsis thaliana]

SEQ ID NO: 33939 - DNA, 962 bp, Arabidopsis thaliana; identical to SEQ ID NO: 30349
  misc_feature (1)..(962): Ceres Seq. ID no. 12322291
  misc_feature: MA Experiment ID: 108435 Result: Down-regulated in Transcription
  misc_feature: MA Experiment 108435 PARAMETER Experiment Name: At_stm_Mutants_cDNA_P Parameter: Plant Line Value: wt Landsburg vs stm
  misc_feature: MA Experiment 108435 PARAMETER Experiment Name: At_stm_Mutants_cDNA_P Parameter: Tissue Value: Shoot Apical Meristem Region
  misc_feature: MA Experiment ID: 108461 Result: Up-regulated in Transcription
  misc_feature: MA Experiment 108461 PARAMETER Experiment Name: At_Germinating_Seeds_cDNA_P Parameter: Age (day) Value: 1 vs. 0
  misc_feature: MA Experiment 108461 PARAMETER Experiment Name: At_Germinating_Seeds_cDNA_P Parameter: Tissue Value: Germinating Seeds
  misc_feature: MA Experiment ID: 108462 Result: Up-regulated in Transcription
  misc_feature: MA Experiment 108462 PARAMETER Experiment Name: At_Germinating_Seeds_cDNA_P Parameter: Age (day) Value: 2 vs. 0
  misc_feature: MA Experiment 108462 PARAMETER Experiment Name: At_Germinating_Seeds_cDNA_P Parameter: Tissue Value: Germinating Seeds
  misc_feature: MA Experiment ID: 108463 Result: Up-regulated in Transcription
  misc_feature: MA Experiment 108463 PARAMETER Experiment Name: At_Germinating_Seeds_cDNA_P Parameter: Age (day) Value: 3 vs. 0
  misc_feature: MA Experiment 108463 PARAMETER Experiment Name: At_Germinating_Seeds_cDNA_P Parameter: Tissue Value: Germinating Seeds
  misc_feature: MA Experiment ID: 108464 Result: Up-regulated in Transcription
  misc_feature: MA Experiment 108464 PARAMETER Experiment Name: At_Germinating_Seeds_cDNA_P Parameter: Age (day) Value: 4 vs. 0
  misc_feature: MA Experiment 108464 PARAMETER Experiment Name: At_Germinating_Seeds_cDNA_P Parameter: Tissue Value: Germinating Seeds
  misc_feature: MA Experiment ID: 108488 Result: Up-regulated in Transcription
  misc_feature: MA Experiment ID: 108595 Result: Down-regulated in Transcription
  misc_feature: MA Experiment 108595 PARAMETER Experiment Name: At_Ler-pi_Ovule_cDNA_P Parameter: Plant Line Value: null
  misc_feature: MA Experiment ID: 20000069 Result: Down-regulated in Transcription
  misc_feature: MA Experiment 20000069 PARAMETER Experiment Name: At_100uM_ABA_Mutants_cDNA_P Parameter: Plant Line Value: CS23
  misc_feature: MA Experiment 20000069 PARAMETER Experiment Name: At_100uM_ABA_Mutants_cDNA_P Parameter: Timepoint (hr) Value: 6
  misc_feature: MA Experiment 20000069 PARAMETER Experiment Name: At_100uM_ABA_Mutants_cDNA_P Parameter: Tissue Value: Aerial
  misc_feature: MA Experiment 20000069 PARAMETER Experiment Name: At_100uM_ABA_Mutants_cDNA_P Parameter: Treatment Value: 100uM ABA vs. No Treatment
  misc_feature: MA Experiment ID: 20000070 Result: Down-regulated in Transcription
  misc_feature: MA Experiment 20000070 PARAMETER Experiment Name: At_100uM_ABA_Mutants_cDNA_P Parameter: Plant Line Value: CS24
  misc_feature: MA Experiment 20000070 PARAMETER Experiment Name: At_100uM_ABA_Mutants_cDNA_P Parameter: Timepoint (hr) Value: 6
  misc_feature: MA Experiment 20000070 PARAMETER Experiment Name: At_100uM_ABA_Mutants_cDNA_P Parameter: Tissue Value: Aerial
  misc_feature: MA Experiment 20000070 PARAMETER Experiment Name: At_100uM_ABA_Mutants_cDNA_P Parameter: Treatment Value: 100uM ABA vs. No Treatment
  misc_feature: MA Experiment ID: 20000071 Result: Down-regulated in Transcription
  misc_feature: MA Experiment 20000071 PARAMETER Experiment Name: At_100uM_ABA_Mutants_cDNA_P Parameter: Plant Line Value: CS8104
  misc_feature: MA Experiment 20000071 PARAMETER Experiment Name: At_100uM_ABA_Mutants_cDNA_P Parameter: Timepoint (hr) Value: 6
  misc_feature: MA Experiment 20000071 PARAMETER Experiment Name: At_100uM_ABA_Mutants_cDNA_P Parameter: Tissue Value: Aerial
  misc_feature: MA Experiment 20000071 PARAMETER Experiment Name: At_100uM_ABA_Mutants_cDNA_P Parameter: Treatment Value: 100uM ABA vs. No Treatment
  misc_feature: MA Experiment ID: 20000086 Result: Down-regulated in Transcription
  misc_feature: MA Experiment 20000086 PARAMETER Experiment Name: At_100uM_ABA_Mutants_cDNA_P Parameter: Plant Line Value: CS22
  misc_feature: MA Experiment 20000086 PARAMETER Experiment Name: At_100uM_ABA_Mutants_cDNA_P Parameter: Timepoint (hr) Value: 6
  misc_feature: MA Experiment 20000086 PARAMETER Experiment Name: At_100uM_ABA_Mutants_cDNA_P Parameter: Tissue Value: Aerial
  misc_feature: MA Experiment 20000086 PARAMETER Experiment Name: At_100uM_ABA_Mutants_cDNA_P Parameter: Treatment Value: 100uM ABA vs. No Treatment
  misc_feature: MA Experiment ID: 20000087 Result: Down-regulated in Transcription
  misc_feature: MA Experiment 20000087 PARAMETER Experiment Name: At_100uM_ABA_Mutants_cDNA_P Parameter: Plant Line Value: WS
  misc_feature: MA Experiment 20000087 PARAMETER Experiment Name: At_100uM_ABA_Mutants_cDNA_P Parameter: Timepoint (hr) Value: 6
  misc_feature: MA Experiment 20000087 PARAMETER Experiment Name: At_100uM_ABA_Mutants_cDNA_P Parameter: Tissue Value: Aerial
  misc_feature: MA Experiment 20000087 PARAMETER Experiment Name: At_100uM_ABA_Mutants_cDNA_P Parameter: Treatment Value: 100uM ABA vs. No Treatment
  misc_feature: MA Experiment ID: 20000117 Result: Down-regulated in Transcription
  misc_feature: MA Experiment 20000117 PARAMETER Experiment Name: At_100uM_ABA_Mutants_cDNA_P Parameter: Plant Line Value: Columbia
  misc_feature: MA Experiment 20000117 PARAMETER Experiment Name: At_100uM_ABA_Mutants_cDNA_P Parameter: Timepoint (hr) Value: 6
  misc_feature: MA Experiment 20000117 PARAMETER Experiment Name: At_100uM_ABA_Mutants_cDNA_P Parameter: Tissue Value: Aerial
  misc_feature: MA Experiment 20000117 PARAMETER Experiment Name: At_100uM_ABA_Mutants_cDNA_P Parameter: Treatment Value: 100uM ABA vs. No Treatment
  misc_feature: MA Experiment ID: 20000180 Result: Up-regulated in Transcription
  misc_feature: MA Experiment 20000180 PARAMETER Experiment Name: At_Germinating_Seeds_P Parameter: Age (hr) Value: 24 vs. 0
  misc_feature: MA Experiment 20000180 PARAMETER Experiment Name: At_Germinating_Seeds_P Parameter: Tissue Value: Germinating Seeds
  misc_feature: MA Experiment ID: 20000184 Result: Up-regulated in Transcription
  misc_feature: MA Experiment 20000184 PARAMETER Experiment Name: At_Shoots__P Parameter: Age (day) Value: 7
  misc_feature: MA Experiment 20000184 PARAMETER Experiment Name: At_Shoots__P Parameter: Tissue Value: Shoots vs. Whole Plant
  misc_feature: MA Experiment ID: 20000185 Result: Down-regulated in Transcription
  misc_feature: MA Experiment 20000185 PARAMETER Experiment Name: At_Roots__P Parameter: Age (day) Value: 7 vs. 21
  misc_feature: MA Experiment 20000185 PARAMETER Experiment Name: At_Roots__P Parameter: Organism Value: A. thaliana
  misc_feature: MA Experiment 20000185 PARAMETER Experiment Name: At_Roots__P Parameter: Tissue Value: Roots vs. Whole Plant
  misc_feature: MA Experiment ID: 20000438 Result: Up-regulated in Transcription
  misc_feature: MA Experiment 20000438 PARAMETER Experiment Name: At_Shoots__P Parameter: Age (day) Value: 14
  misc_feature: MA Experiment 20000438 PARAMETER Experiment Name: At_Shoots__P Parameter: Tissue Value: Shoots vs. Whole Plant
  misc_feature: MA Experiment ID: 20000439 Result: Down-regulated in Transcription
  misc_feature: MA Experiment 20000439 PARAMETER Experiment Name: At_Roots__P Parameter: Age (day) Value: 14 vs. 21
  misc_feature: MA Experiment 20000439 PARAMETER Experiment Name: At_Roots__P Parameter: Organism Value: A. thaliana
  misc_feature: MA Experiment 20000439 PARAMETER Experiment Name: At_Roots__P Parameter: Tissue Value: Roots vs. Whole Plant
  misc_feature: MA Experiment ID: 20000495 Result: Down-regulated in Transcription
  misc_feature: MA Experiment 20000495 PARAMETER Experiment Name: At_Guard_Cells_P Parameter: Harvest Date Value: 8/2/2002
  misc_feature: MA Experiment 20000495 PARAMETER Experiment Name: At_Guard_Cells_P Parameter: Organism Value: A. thaliana
  misc_feature: MA Experiment 20000495 PARAMETER Experiment Name: At_Guard_Cells_P Parameter: Tissue Value: Guard Cells vs. Leaves
  misc_feature: MA Experiment ID: 20000794 Result: Down-regulated in Transcription
  misc_feature: MA Experiment 20000794 PARAMETER Experiment Name: At_Petals_P Parameter: Age (day) Value: 23-25 days
  misc_feature: MA Experiment 20000794 PARAMETER Experiment Name: At_Petals_P Parameter: Plant Line Value: WS
  misc_feature: MA Experiment 20000794 PARAMETER Experiment Name: At_Petals_P Parameter: Tissue Value: Petals vs. Whole plant
  misc_feature: MA Experiment ID: 20001248 Result: Down-regulated in Transcription
  misc_feature: MA Experiment 20001248 PARAMETER Experiment Name: At_Far-red-induction_P Parameter: Age (day) Value: 7
  misc_feature: MA Experiment 20001248 PARAMETER Experiment Name: At_Far-red-induction_P Parameter: Light Value: Far-red vs. White
  misc_feature: MA Experiment 20001248 PARAMETER Experiment Name: At_Far-red-induction_P Parameter: Organism Value: A. thaliana
  misc_feature: MA Experiment 20001248 PARAMETER Experiment Name: At_Far-red-induction_P Parameter: Plant Line Value: Columbia
  misc_feature: MA Experiment 20001248 PARAMETER Experiment Name: At_Far-red-induction_P Parameter: Timepoint (hr) Value: 4
  misc_feature: MA Experiment 20001248 PARAMETER Experiment Name: At_Far-red-induction_P Parameter: Tissue Value: Whole Plant
  misc_feature: MA Experiment ID: 20001450 Result: Down-regulated in Transcription
  misc_feature: MA Experiment 20001450 PARAMETER Experiment Name: At_Far-red-induction_P Parameter: Age (day) Value: 7
  misc_feature: MA Experiment 20001450 PARAMETER Experiment Name: At_Far-red-induction_P Parameter: Light Value: Far-red vs. White
  misc_feature: MA Experiment 20001450 PARAMETER Experiment Name: At_Far-red-induction_P Parameter: Organism Value: A. thaliana
  misc_feature: MA Experiment 20001450 PARAMETER Experiment Name: At_Far-red-induction_P Parameter: Plant Line Value: Columbia
  misc_feature: MA Experiment 20001450 PARAMETER Experiment Name: At_Far-red-induction_P Parameter: Timepoint (hr) Value: 8
  misc_feature: MA Experiment 20001450 PARAMETER Experiment Name: At_Far-red-induction_P Parameter: Tissue Value: Whole Plant
  misc_feature: MA Experiment ID: 20001451 Result: Down-regulated in Transcription
  misc_feature: MA Experiment 20001451 PARAMETER Experiment Name: At_Far-red-induction_P Parameter: Age (day) Value: 7
  misc_feature: MA Experiment 20001451 PARAMETER Experiment Name: At_Far-red-induction_P Parameter: Light Value: Far-red vs. White
  misc_feature: MA Experiment 20001451 PARAMETER Experiment Name: At_Far-red-induction_P Parameter: Organism Value: A. thaliana
  misc_feature: MA Experiment 20001451 PARAMETER Experiment Name: At_Far-red-induction_P Parameter: Plant Line Value: Columbia
  misc_feature: MA Experiment 20001451 PARAMETER Experiment Name: At_Far-red-induction_P Parameter: Timepoint (hr) Value: 24
  misc_feature: MA Experiment 20001451 PARAMETER Experiment Name: At_Far-red-induction_P Parameter: Tissue Value: Whole Plant
  misc_feature: MA Experiment ID: 20001557 Result: Down-regulated in Transcription
  misc_feature: MA Experiment 20001557 PARAMETER Experiment Name: At_Drought_Soil_Dry_P Parameter: Age (day) Value: 27
  misc_feature: MA Experiment 20001557 PARAMETER Experiment Name: At_Drought_Soil_Dry_P Parameter: Organism Value: A. thaliana
  misc_feature: MA Experiment 20001557 PARAMETER Experiment Name: At_Drought_Soil_Dry_P Parameter: Plant Line Value: WS
  misc_feature: MA Experiment 20001557 PARAMETER Experiment Name: At_Drought_Soil_Dry_P Parameter: Post Timepoint (hr) Value: 3
  misc_feature: MA Experiment 20001557 PARAMETER Experiment Name: At_Drought_Soil_Dry_P Parameter: Post-Treatment Value: Re-Water vs. No Drought
  misc_feature: MA Experiment 20001557 PARAMETER Experiment Name: At_Drought_Soil_Dry_P Parameter: Timepoint (day) Value: 13
  misc_feature: MA Experiment 20001557 PARAMETER Experiment Name: At_Drought_Soil_Dry_P Parameter: Treatment Value: Drought vs. No Drought
  misc_feature: MA Experiment ID: 20001757 Result: Up-regulated in Transcription
  misc_feature: MA Experiment 20001757 PARAMETER Experiment Name: At_50mM_NH4NO3_L-to-H_P Parameter: Timepoint (hr) Value: 6
  misc_feature: MA Experiment 20001757 PARAMETER Experiment Name: At_50mM_NH4NO3_L-to-H_P Parameter: Tissue Value: Leaf
  misc_feature: MA Experiment 20001757 PARAMETER Experiment Name: At_50mM_NH4NO3_L-to-H_P Parameter: Treatment Value: 50mM NH4NO3 vs 100mM Mannitol
  misc_feature: MA Experiment ID: 20001905 Result: Down-regulated in Transcription
  misc_feature: MA Experiment 20001905 PARAMETER Experiment Name: At_Drought_Reproduction_P Parameter: Age (day) Value: 40
  misc_feature: MA Experiment 20001905 PARAMETER Experiment Name: At_Drought_Reproduction_P Parameter: Organism Value: A. thaliana
  misc_feature: MA Experiment 20001905 PARAMETER Experiment Name: At_Drought_Reproduction_P Parameter: Plant Line Value: WS
  misc_feature: MA Experiment 20001905 PARAMETER Experiment Name: At_Drought_Reproduction_P Parameter: Timepoint (day) Value: 10
  misc_feature: MA Experiment 20001905 PARAMETER Experiment Name: At_Drought_Reproduction_P Parameter: Tissue Value: Rosettes
  misc_feature: MA Experiment 20001905 PARAMETER Experiment Name: At_Drought_Reproduction_P Parameter: Treatment Value: Drought vs. No Drought
  misc_feature: Phenotype: WHOLE PLANT Color-Yellow-Green Viable 1
  misc_feature: Phenotype: INFLORESCENCE Flowering Time-Late Flowering
  misc_feature: Phenotype: WHOLE PLANT Color-Yellow-Green Viable 1
  misc_feature: Phenotype: INFLORESCENCE Flowering Time-Late Flowering
  misc_feature: Phenotype: ROSETTE LEAVES Curled-Curled 2
  misc_feature: Phenotype: WHOLE PLANT Color-Yellow-Green Viable 1
  misc_feature: Phenotype: INFLORESCENCE Flowering Time-Late Flowering

SEQ ID NO: 33940 - protein, 235 aa, Arabidopsis thaliana; identical to SEQ ID NO: 30350
  peptide (1)..(235): Ceres Seq. ID no. 12322292
  misc_feature (1)..(235): Homolog of NCBI NO: 21553857 NR Description: unknown [Arabidopsis thaliana]
  misc_feature (1)..(235): Homolog of NCBI NO: 18415378 NR Description: expressed protein

SEQ ID NO: 33941 - protein, 174 aa, Arabidopsis thaliana; identical to SEQ ID NO: 30351
  peptide (1)..(174): Ceres Seq. ID no. 12322293
  misc_feature (1)..(174): Homolog of NCBI NO: 21553857 NR Description: unknown [Arabidopsis thaliana]
  misc_feature (1)..(174): Homolog of NCBI NO: 18415378 NR Description: expressed protein

SEQ ID NO: 33942 - DNA, 1886 bp, Arabidopsis thaliana; identical to SEQ ID NO: 30352
  misc_feature (1)..(1886): Ceres Seq. ID no. 13492392
  misc_feature: MA Experiment ID: 108434 Result: Up-regulated in Transcription
  misc_feature: MA Experiment 108434 PARAMETER Experiment Name: At_Root_Tips_cDNA_P Parameter: Tissue Value: Root Tips
  misc_feature: MA Experiment ID: 20000113 Result: Down-regulated in Transcription
  misc_feature: MA Experiment 20000113 PARAMETER Experiment Name: At_42deg_Heat_cDNA_P Parameter: Temperature (deg C) Value: 42 vs. 22
  misc_feature: MA Experiment 20000113 PARAMETER Experiment Name: At_42deg_Heat_cDNA_P Parameter: Timepoint (hr) Value: 8
  misc_feature: MA Experiment 20000113 PARAMETER Experiment Name: At_42deg_Heat_cDNA_P Parameter: Tissue Value: Aerial

SEQ ID NO: 33943 - protein, 564 aa, Arabidopsis thaliana; identical to SEQ ID NO: 30353
  peptide (1)..(564): Ceres Seq. ID no. 15222883
  misc_feature (158)..(556): Homolog of NCBI NO: 38230508 NR Description: predicted protein [Populus alba x Populus tremula]
  misc_feature (37)..(238): Homolog of NCBI NO: 38347118 NR Description: OSJNBa0009K15.15 [Oryza sativa (japonica
  misc_feature (259)..(560): Homolog of NCBI NO: 38347118 NR Description: OSJNBa0009K15.15 [Oryza sativa (japonica
  misc_feature (42)..(75): Homolog of NCBI NO: 34900946 NR Description: putative PRLI-interacting factor G
  misc_feature (53)..(556): Homolog of NCBI NO: 34900946 NR Description: putative PRLI-interacting factor G
  misc_feature (342)..(564): Homolog of NCBI NO: 11139264 NR Description: PRLI-interacting factor G [Arabidopsis thaliana]
  misc_feature (22)..(564): Homolog of NCBI NO: 25338924 NR Description: hypothetical protein At2g13690 [imported] -
  misc_feature (20)..(564): Homolog of NCBI NO: 39104567 NR Description: putative f13j11 PRLI-interacting factor G
  misc_feature (20)..(564): Homolog of NCBI NO: 18397316 NR Description: f13j11 PRLI-interacting factor G -related
  misc_feature (22)..(564): Homolog of NCBI NO: 21553858 NR Description: unknown [Arabidopsis thaliana]

SEQ ID NO: 33944 - protein, 545 aa, Arabidopsis thaliana; identical to SEQ ID NO: 30354
  peptide (1)..(545): Ceres Seq. ID no. 15222884
  misc_feature (139)..(537): Homolog of NCBI NO: 38230508 NR Description: predicted protein [Populus alba x Populus tremula]
  misc_feature (18)..(219): Homolog of NCBI NO: 38347118 NR Description: OSJNBa0009K15.15 [Oryza sativa (japonica
  misc_feature (240)..(541): Homolog of NCBI NO: 38347118 NR Description: OSJNBa0009K15.15 [Oryza sativa (japonica
  misc_feature (23)..(56): Homolog of NCBI NO: 34900946 NR Description: putative PRLI-interacting factor G
  misc_feature (34)..(537): Homolog of NCBI NO: 34900946 NR Description: putative PRLI-interacting factor G
  misc_feature (323)..(545): Homolog of NCBI NO: 11139264 NR Description: PRLI-interacting factor G [Arabidopsis thaliana]
  misc_feature (3)..(545): Homolog of NCBI NO: 25338924 NR Description: hypothetical protein At2g13690 [imported] -
  misc_feature (1)..(545): Homolog of NCBI NO: 39104567 NR Description: putative f13j11 PRLI-interacting factor G
  misc_feature (1)..(545): Homolog of NCBI NO: 18397316 NR Description: f13j11 PRLI-interacting factor G -related
  misc_feature (3)..(545): Homolog of NCBI NO: 21553858 NR Description: unknown [Arabidopsis thaliana]

SEQ ID NO: 33945 - protein, 543 aa, Arabidopsis thaliana; identical to SEQ ID NO: 30355
  peptide (1)..(543): Ceres Seq. ID no. 15222885
  misc_feature (137)..(535): Homolog of NCBI NO: 38230508 NR Description: predicted protein [Populus alba x Populus tremula]
  misc_feature (16)..(217): Homolog of NCBI NO: 38347118 NR Description: OSJNBa0009K15.15 [Oryza sativa (japonica
  misc_feature (238)..(539): Homolog of NCBI NO: 38347118 NR Description: OSJNBa0009K15.15 [Oryza sativa (japonica
  misc_feature (21)..(54): Homolog of NCBI NO: 34900946 NR Description: putative PRLI-interacting factor G
  misc_feature (32)..(535): Homolog of NCBI NO: 34900946 NR Description: putative PRLI-interacting factor G
  misc_feature (321)..(543): Homolog of NCBI NO: 11139264 NR Description: PRLI-interacting factor G [Arabidopsis thaliana]
  misc_feature (1)..(543): Homolog of NCBI NO: 25338924 NR Description: hypothetical protein At2g13690 [imported] -
  misc_feature (1)..(543): Homolog of NCBI NO: 39104567 NR Description: putative f13j11 PRLI-interacting factor G
  misc_feature (1)..(543): Homolog of NCBI NO: 18397316 NR Description: f13j11 PRLI-interacting factor G -related
  misc_feature (1)..(543): Homolog of NCBI NO: 21553858 NR Description: unknown [Arabidopsis thaliana]

SEQ ID NO: 33946 - DNA, 1999 bp, Arabidopsis thaliana; identical to SEQ ID NO: 26468
  misc_feature (1)..(1999): Ceres Seq. ID no. 12327028
  misc_feature: MA Experiment ID: 108434 Result: Up-regulated in Transcription
  misc_feature: MA Experiment 108434 PARAMETER Experiment Name: At_Root_Tips_cDNA_P Parameter: Tissue Value: Root Tips
  misc_feature: MA Experiment ID: 108463 Result: Down-regulated in Transcription
  misc_feature: MA Experiment 108463 PARAMETER Experiment Name: At_Germinating_Seeds_cDNA_P Parameter: Age (day) Value: 3 vs. 0
  misc_feature: MA Experiment 108463 PARAMETER Experiment Name: At_Germinating_Seeds_cDNA_P Parameter: Tissue Value: Germinating Seeds
  misc_feature: MA Experiment ID: 108572 Result: Down-regulated in Transcription
  misc_feature: MA Experiment 108572 PARAMETER Experiment Name: At_Drought_cDNA_P Parameter: Timepoint (hr) Value: 1
  misc_feature: MA Experiment 108572 PARAMETER Experiment Name: At_Drought_cDNA_P Parameter: Tissue Value: Aerial
  misc_feature: MA Experiment 108572 PARAMETER Experiment Name: At_Drought_cDNA_P Parameter: Treatment Value: Drought vs. No Drought
  misc_feature: MA Experiment ID: 108573 Result: Down-regulated in Transcription
  misc_feature: MA Experiment 108573 PARAMETER Experiment Name: At_Drought_cDNA_P Parameter: Timepoint (hr) Value: 6
  misc_feature: MA Experiment 108573 PARAMETER Experiment Name: At_Drought_cDNA_P Parameter: Tissue Value: Aerial
  misc_feature: MA Experiment 108573 PARAMETER Experiment Name: At_Drought_cDNA_P Parameter: Treatment Value: Drought vs. No Drought
  misc_feature: MA Experiment ID: 20000087 Result: Up-regulated in Transcription
  misc_feature: MA Experiment 20000087 PARAMETER Experiment Name: At_100uM_ABA_Mutants_cDNA_P Parameter: Plant Line Value: WS
  misc_feature: MA Experiment 20000087 PARAMETER Experiment Name: At_100uM_ABA_Mutants_cDNA_P Parameter: Timepoint (hr) Value: 6
  misc_feature: MA Experiment 20000087 PARAMETER Experiment Name: At_100uM_ABA_Mutants_cDNA_P Parameter: Tissue Value: Aerial
  misc_feature: MA Experiment 20000087 PARAMETER Experiment Name: At_100uM_ABA_Mutants_cDNA_P Parameter: Treatment Value: 100uM ABA vs. No Treatment
  misc_feature: MA Experiment ID: 20000089 Result: Up-regulated in Transcription
  misc_feature: MA Experiment ID: 20000090 Result: Up-regulated in Transcription
  misc_feature: MA Experiment ID: 20000093 Result: Up-regulated in Transcription
  misc_feature: MA Experiment 20000093 PARAMETER Experiment Name: At_42deg_Heat_cDNA_P Parameter: Temperature (deg C) Value: 42 vs. 22
  misc_feature: MA Experiment 20000093 PARAMETER Experiment Name: At_42deg_Heat_cDNA_P Parameter: Timepoint (hr) Value: 0.5
  misc_feature: MA Experiment 20000093 PARAMETER Experiment Name: At_42deg_Heat_cDNA_P Parameter: Tissue Value: Aerial
  misc_feature: MA Experiment ID: 20000111 Result: Up-regulated in Transcription
  misc_feature: MA Experiment 20000111 PARAMETER Experiment Name: At_42deg_Heat_cDNA_P Parameter: Temperature (deg C) Value: 42 vs. 22
  misc_feature: MA Experiment 20000111 PARAMETER Experiment Name: At_42deg_Heat_cDNA_P Parameter: Timepoint (hr) Value: 6
  misc_feature: MA Experiment 20000111 PARAMETER Experiment Name: At_42deg_Heat_cDNA_P Parameter: Tissue Value: Aerial
  misc_feature: MA Experiment ID: 20000112 Result: Up-regulated in Transcription
  misc_feature: MA Experiment 20000112 PARAMETER Experiment Name: At_42deg_Heat_cDNA_P Parameter: Temperature (deg C) Value: 42 vs. 22
  misc_feature: MA Experiment 20000112 PARAMETER Experiment Name: At_42deg_Heat_cDNA_P Parameter: Timepoint (hr) Value: 2
  misc_feature: MA Experiment 20000112 PARAMETER Experiment Name: At_42deg_Heat_cDNA_P Parameter: Tissue Value: Aerial
  misc_feature: MA Experiment ID: 20000113 Result: Up-regulated in Transcription
  misc_feature: MA Experiment 20000113 PARAMETER Experiment Name: At_42deg_Heat_cDNA_P Parameter: Temperature (deg C) Value: 42 vs. 22
  misc_feature: MA Experiment 20000113 PARAMETER Experiment Name: At_42deg_Heat_cDNA_P Parameter: Timepoint (hr) Value: 8
  misc_feature: MA Experiment 20000113 PARAMETER Experiment Name: At_42deg_Heat_cDNA_P Parameter: Tissue Value: Aerial
  misc_feature: MA Experiment ID: 20000144 Result: Up-regulated in Transcription
  misc_feature: MA Experiment 20000144 PARAMETER Experiment Name: At_42deg_Heat_cDNA_P Parameter: Temperature (deg C) Value: 42 vs. 22
  misc_feature: MA Experiment 20000144 PARAMETER Experiment Name: At_42deg_Heat_cDNA_P Parameter: Timepoint (hr) Value: 1
  misc_feature: MA Experiment 20000144 PARAMETER Experiment Name: At_42deg_Heat_cDNA_P Parameter: Tissue Value: Aerial
  misc_feature: MA Experiment ID: 20000171 Result: Up-regulated in Transcription
  misc_feature: MA Experiment 20000171 PARAMETER Experiment Name: At_42deg_Heat_P Parameter: Age (day) Value: 14
  misc_feature: MA Experiment 20000171 PARAMETER Experiment Name: At_42deg_Heat_P Parameter: Organism Value: A. thaliana
  misc_feature: MA Experiment 20000171 PARAMETER Experiment Name: At_42deg_Heat_P Parameter: Plant Line Value: WS
  misc_feature: MA Experiment 20000171 PARAMETER Experiment Name: At_42deg_Heat_P Parameter: Temperature (deg C) Value: 42 vs. 22
  misc_feature: MA Experiment 20000171 PARAMETER Experiment Name: At_42deg_Heat_P Parameter: Timepoint (hr) Value: 1
  misc_feature: MA Experiment 20000171 PARAMETER Experiment Name: At_42deg_Heat_P Parameter: Tissue Value: Aerial
  misc_feature: MA Experiment ID: 20000173 Result: Up-regulated in Transcription
  misc_feature: MA Experiment 20000173 PARAMETER Experiment Name: At_42deg_Heat_P Parameter: Age (day) Value: 14
  misc_feature: MA Experiment 20000173 PARAMETER Experiment Name: At_42deg_Heat_P Parameter: Organism Value: A. thaliana
  misc_feature: MA Experiment 20000173 PARAMETER Experiment Name: At_42deg_Heat_P Parameter: Plant Line Value: WS
  misc_feature: MA Experiment 20000173 PARAMETER Experiment Name: At_42deg_Heat_P Parameter: Temperature (deg C) Value: 42 vs. 22
  misc_feature: MA Experiment 20000173 PARAMETER Experiment Name: At_42deg_Heat_P Parameter: Timepoint (hr) Value: 6
  misc_feature: MA Experiment 20000173 PARAMETER Experiment Name: At_42deg_Heat_P Parameter: Tissue Value: Aerial
  misc_feature: MA Experiment ID: 20000179 Result: Up-regulated in Transcription
  misc_feature: MA Experiment 20000179 PARAMETER Experiment Name: At_Germinating_Seeds_P Parameter: Age (hr) Value: 6 vs. 0
  misc_feature: MA Experiment 20000179 PARAMETER Experiment Name: At_Germinating_Seeds_P Parameter: Tissue Value: Germinating Seeds
  misc_feature: MA Experiment ID: 20000224 Result: Up-regulated in Transcription
  misc_feature: MA Experiment ID: 20000227 Result: Up-regulated in Transcription
  misc_feature: MA Experiment 20000227 PARAMETER Experiment Name: At_Root-Tips-vs-Tops_P Parameter: Tissue Value: Root Tips vs. Root Tops
  misc_feature: MA Experiment ID: 20000437 Result: Down-regulated in Transcription
  misc_feature: MA Experiment 20000437 PARAMETER Experiment Name: At_Drought_P Parameter: Age (day) Value: 8
  misc_feature: MA Experiment 20000437 PARAMETER Experiment Name: At_Drought_P Parameter: Organism Value: A. thaliana
  misc_feature: MA Experiment 20000437 PARAMETER Experiment Name: At_Drought_P Parameter: Plant Line Value: WS
  misc_feature: MA Experiment 20000437 PARAMETER Experiment Name: At_Drought_P Parameter: Timepoint (hr) Value: 24
  misc_feature: MA Experiment 20000437 PARAMETER Experiment Name: At_Drought_P Parameter: Tissue Value: Whole Plant
  misc_feature: MA Experiment 20000437 PARAMETER Experiment Name: At_Drought_P Parameter: Treatment Value: Drought vs. No Drought
  misc_feature: MA Experiment ID: 20000495 Result: Up-regulated in Transcription
  misc_feature: MA Experiment 20000495 PARAMETER Experiment Name: At_Guard_Cells_P Parameter: Harvest Date Value: 8/2/2002
  misc_feature: MA Experiment 20000495 PARAMETER Experiment Name: At_Guard_Cells_P Parameter: Organism Value: A. thaliana
  misc_feature: MA Experiment 20000495 PARAMETER Experiment Name: At_Guard_Cells_P Parameter: Tissue Value: Guard Cells vs. Leaves
  misc_feature: MA Experiment ID: 20001450 Result: Down-regulated in Transcription
  misc_feature: MA Experiment 20001450 PARAMETER Experiment Name: At_Far-red-induction_P Parameter: Age (day) Value: 7
  misc_feature: MA Experiment 20001450 PARAMETER Experiment Name: At_Far-red-induction_P Parameter: Light Value: Far-red vs. White
  misc_feature: MA Experiment 20001450 PARAMETER Experiment Name: At_Far-red-induction_P Parameter: Organism Value: A. thaliana
  misc_feature: MA Experiment 20001450 PARAMETER Experiment Name: At_Far-red-induction_P Parameter: Plant Line Value: Columbia
  misc_feature: MA Experiment 20001450 PARAMETER Experiment Name: At_Far-red-induction_P Parameter: Timepoint (hr) Value: 8
  misc_feature: MA Experiment 20001450 PARAMETER Experiment Name: At_Far-red-induction_P Parameter: Tissue Value: Whole Plant
  misc_feature: MA Experiment ID: 20001558 Result: Up-regulated in Transcription
  misc_feature: MA Experiment 20001558 PARAMETER Experiment Name: At_Drought_Soil_Dry_P Parameter: Age (day) Value: 27
  misc_feature: MA Experiment 20001558 PARAMETER Experiment Name: At_Drought_Soil_Dry_P Parameter: Organism Value: A. thaliana
  misc_feature: MA Experiment 20001558 PARAMETER Experiment Name: At_Drought_Soil_Dry_P Parameter: Plant Line Value: WS
  misc_feature: MA Experiment 20001558 PARAMETER Experiment Name: At_Drought_Soil_Dry_P Parameter: Post Timepoint (hr) Value: 6
  misc_feature: MA Experiment 20001558 PARAMETER Experiment Name: At_Drought_Soil_Dry_P Parameter: Post-Treatment Value: Re-Water vs. No Drought
  misc_feature: MA Experiment 20001558 PARAMETER Experiment Name: At_Drought_Soil_Dry_P Parameter: Timepoint (day) Value: 13
  misc_feature: MA Experiment 20001558 PARAMETER Experiment Name: At_Drought_Soil_Dry_P Parameter: Treatment Value: Drought vs. No Drought
  misc_feature: MA Experiment ID: 20001560 Result: Up-regulated in Transcription
  misc_feature: MA Experiment 20001560 PARAMETER Experiment Name: At_Drought_Soil_Dry_P Parameter: Age (day) Value: 28
  misc_feature: MA Experiment 20001560 PARAMETER Experiment Name: At_Drought_Soil_Dry_P Parameter: Organism Value: A. thaliana
  misc_feature: MA Experiment 20001560 PARAMETER Experiment Name: At_Drought_Soil_Dry_P Parameter: Plant Line Value: WS
  misc_feature: MA Experiment 20001560 PARAMETER Experiment Name: At_Drought_Soil_Dry_P Parameter: Post Timepoint (hr) Value: None
  misc_feature: MA Experiment 20001560 PARAMETER Experiment Name: At_Drought_Soil_Dry_P Parameter: Post-Treatment Value: None
  misc_feature: MA Experiment 20001560 PARAMETER Experiment Name: At_Drought_Soil_Dry_P Parameter: Timepoint (day) Value: 14
  misc_feature: MA Experiment 20001560 PARAMETER Experiment Name: At_Drought_Soil_Dry_P Parameter: Treatment Value: Drought vs. No Drought

SEQ ID NO: 33947 - protein, 567 aa, Arabidopsis thaliana; identical to SEQ ID NO: 26469
  peptide (1)..(567): Ceres Seq. ID no. 12327029
  misc_feature (66)..(423): Pfam Name: Calreticulin family Pfam Description: Calreticulin family
  misc_feature (66)..(423): Pfam Name: Calreticulin family Pfam Description: Calreticulin family
  misc_feature (73)..(556): Homolog of NCBI NO: 40740610 NR Description: hypothetical protein AN3592.2 [Aspergillus
  misc_feature (149)..(564): Homolog of NCBI NO: 7441503 NR Description: calnexin - maize (fragment)
  misc_feature (44)..(566): Homolog of NCBI NO: 11131766 NR Description: Calnexin homolog precursor
  misc_feature (43)..(567): Homolog of NCBI NO: 11131469 NR Description: Calnexin homolog precursor
  misc_feature (67)..(564): Homolog of NCBI NO: 21740628 NR Description: OSJNBb0012E08.10 [Oryza sativa (japonica
  misc_feature (73)..(556): Homolog of NCBI NO: 40740610 NR Description: hypothetical protein AN3592.2 [Aspergillus
  misc_feature (44)..(566): Homolog of NCBI NO: 11131766 NR Description: Calnexin homolog precursor
  misc_feature (67)..(564): Homolog of NCBI NO: 21740628 NR Description: OSJNBb0012E08.10 [Oryza sativa (japonica
  misc_feature (38)..(567): Homolog of NCBI NO: 15240353 NR Description: calnexin - like protein
  misc_feature (38)..(567): Homolog of NCBI NO: 31321896 NR Description: putative papillar cell-specific calnexin
  misc_feature (38)..(567): Homolog of NCBI NO: 15240773 NR Description: calnexin homolog; protein id: At5g07340.1
  misc_feature (38)..(567): Homolog of NCBI NO: 473878 NR Description: calnexin homolog
  misc_feature (43)..(566): Homolog of NCBI NO: 3334138 NR Description: CALNEXIN HOMOLOG PRECURSOR
  misc_feature (43)..(567): Homolog of NCBI NO: 11131469 NR Description: Calnexin homolog precursor
  misc_feature (149)..(564): Homolog of NCBI NO: 7441503 NR Description: calnexin - maize (fragment)
  misc_feature (43)..(566): Homolog of NCBI NO: 3334138 NR Description: CALNEXIN HOMOLOG PRECURSOR
  misc_feature (38)..(567): Homolog of NCBI NO: 473878 NR Description: calnexin homolog
  misc_feature (38)..(567): Homolog of NCBI NO: 15240773 NR Description: calnexin homolog; protein id: At5g07340.1
  misc_feature (38)..(567): Homolog of NCBI NO: 31321896 NR Description: putative papillar cell-specific calnexin
  misc_feature (38)..(567): Homolog of NCBI NO: 15240353 NR Description: calnexin - like protein

SEQ ID NO: 33948 - protein, 530 aa, Arabidopsis thaliana; identical to SEQ ID NO: 26470
  peptide (1)..(530): Ceres Seq. ID no. 12327030
  misc_feature (29)..(386): Pfam Name: Calreticulin family Pfam Description: Calreticulin family
  misc_feature (29)..(386): Pfam Name: Calreticulin family Pfam Description: Calreticulin family
  misc_feature (36)..(519): Homolog of NCBI NO: 40740610 NR Description: hypothetical protein AN3592.2 [Aspergillus
  misc_feature (112)..(527): Homolog of NCBI NO: 7441503 NR Description: calnexin - maize (fragment)
  misc_feature (7)..(529): Homolog of NCBI NO: 11131766 NR Description: Calnexin homolog precursor
  misc_feature (6)..(530): Homolog of NCBI NO: 11131469 NR Description: Calnexin homolog precursor
  misc_feature (30)..(527): Homolog of NCBI NO: 21740628 NR Description: OSJNBb0012E08.10 [Oryza sativa (japonica
  misc_feature (6)..(530): Homolog of NCBI NO: 11131469 NR Description: Calnexin homolog precursor
  misc_feature (6)..(529): Homolog of NCBI NO: 3334138 NR Description: CALNEXIN HOMOLOG PRECURSOR
  misc_feature (1)..(530): Homolog of NCBI NO: 15240773 NR Description: calnexin homolog; protein id: At5g07340.1
  misc_feature (36)..(519): Homolog of NCBI NO: 40740610 NR Description: hypothetical protein AN3592.2 [Aspergillus
  misc_feature (7)..(529): Homolog of NCBI NO: 11131766 NR Description: Calnexin homolog precursor
  misc_feature (112)..(527): Homolog of NCBI NO: 7441503 NR Description: calnexin - maize (fragment)
  misc_feature (1)..(530): Homolog of NCBI NO: 15240353 NR Description: calnexin - like protein
  misc_feature (1)..(530): Homolog of NCBI NO: 31321896 NR Description: putative papillar cell-specific calnexin
  misc_feature (1)..(530): Homolog of NCBI NO: 473878 NR Description: calnexin homolog
  misc_feature (30)..(527): Homolog of NCBI NO: 21740628 NR Description: OSJNBb0012E08.10 [Oryza sativa (japonica
  misc_feature (6)..(529): Homolog of NCBI NO: 3334138 NR Description: CALNEXIN HOMOLOG PRECURSOR
  misc_feature (1)..(530): Homolog of NCBI NO: 473878 NR Description: calnexin homolog
  misc_feature (1)..(530): Homolog of NCBI NO: 15240773 NR Description: calnexin homolog; protein id: At5g07340.1
  misc_feature (1)..(530): Homolog of NCBI NO: 31321896 NR Description: putative papillar cell-specific calnexin
  misc_feature (1)..(530): Homolog of NCBI NO: 15240353 NR Description: calnexin - like protein

SEQ ID NO: 33949 - protein, 394 aa, Arabidopsis thaliana; identical to SEQ ID NO: 26471
  peptide (1)..(394): Ceres Seq. ID no. 12327031
  misc_feature (1)..(250): Pfam Name: Calreticulin family Pfam Description: Calreticulin family
  misc_feature (1)..(250): Pfam Name: Calreticulin family Pfam Description: Calreticulin family
  misc_feature (1)..(383): Homolog of NCBI NO: 40740610 NR Description: hypothetical protein AN3592.2 [Aspergillus
  misc_feature (1)..(391): Homolog of NCBI NO: 7441503 NR Description: calnexin - maize (fragment)
  misc_feature (1)..(393): Homolog of NCBI NO: 11131766 NR Description: Calnexin homolog precursor
  misc_feature (1)..(394): Homolog of NCBI NO: 11131469 NR Description: Calnexin homolog precursor
  misc_feature (1)..(391): Homolog of NCBI NO: 21740628 NR Description: OSJNBb0012E08.10 [Oryza sativa (japonica
  misc_feature (1)..(383): Homolog of NCBI NO: 40740610 NR Description: hypothetical protein AN3592.2 [Aspergillus
  misc_feature (1)..(393): Homolog of NCBI NO: 11131766 NR Description: Calnexin homolog precursor
  misc_feature (1)..(391): Homolog of NCBI NO: 21740628 NR Description: OSJNBb0012E08.10 [Oryza sativa (japonica
  misc_feature (1)..(394): Homolog of NCBI NO: 15240353 NR Description: calnexin - like protein
  misc_feature (1)..(394): Homolog of NCBI NO: 31321896 NR Description: putative papillar cell-specific calnexin
  misc_feature (1)..(394): Homolog of NCBI NO: 15240773 NR Description: calnexin homolog; protein id: At5g07340.1
  misc_feature (1)..(394): Homolog of NCBI NO: 473878 NR Description: calnexin homolog
  misc_feature (1)..(393): Homolog of NCBI NO: 3334138 NR Description: CALNEXIN HOMOLOG PRECURSOR
  misc_feature (1)..(394): Homolog of NCBI NO: 11131469 NR Description: Calnexin homolog precursor
  misc_feature (1)..(391): Homolog of NCBI NO: 7441503 NR Description: calnexin - maize (fragment)
  misc_feature (1)..(393): Homolog of NCBI NO: 3334138 NR Description: CALNEXIN HOMOLOG PRECURSOR
  misc_feature (1)..(394): Homolog of NCBI NO: 473878 NR Description: calnexin homolog
  misc_feature (1)..(394): Homolog of NCBI NO: 15240773 NR Description: calnexin homolog; protein id: At5g07340.1
  misc_feature (1)..(394): Homolog of NCBI NO: 31321896 NR Description: putative papillar cell-specific calnexin
  misc_feature (1)..(394): Homolog of NCBI NO: 15240353 NR Description: calnexin - like protein

SEQ ID NO: 33950 - DNA, 613 bp, Arabidopsis thaliana; identical to SEQ ID NO: 30360
  misc_feature (1)..(613): Ceres Seq. ID no. 12579948
  misc_feature: MA Experiment ID: 20000265 Result: Up-regulated in Transcription
  misc_feature: MA Experiment 20000265 PARAMETER Experiment Name: At_Open_Flower_P Parameter: Age (day) Value: 21
  misc_feature: MA Experiment 20000265 PARAMETER Experiment Name: At_Open_Flower_P Parameter: Plant Line Value: WS
  misc_feature: MA Experiment 20000265 PARAMETER Experiment Name: At_Open_Flower_P Parameter: Tissue Value: Closed Flower vs. Whole Plant
  misc_feature: MA Experiment ID: 20000437 Result: Up-regulated in Transcription
  misc_feature: MA Experiment 20000437 PARAMETER Experiment Name: At_Drought_P Parameter: Age (day) Value: 8
  misc_feature: MA Experiment 20000437 PARAMETER Experiment Name: At_Drought_P Parameter: Organism Value: A. thaliana
  misc_feature: MA Experiment 20000437 PARAMETER Experiment Name: At_Drought_P Parameter: Plant Line Value: WS
  misc_feature: MA Experiment 20000437 PARAMETER Experiment Name: At_Drought_P Parameter: Timepoint (hr) Value: 24
  misc_feature: MA Experiment 20000437 PARAMETER Experiment Name: At_Drought_P Parameter: Tissue Value: Whole Plant
  misc_feature: MA Experiment 20000437 PARAMETER Experiment Name: At_Drought_P Parameter: Treatment Value: Drought vs. No Drought
  misc_feature: MA Experiment ID: 20000794 Result: Up-regulated in Transcription
  misc_feature: MA Experiment 20000794 PARAMETER Experiment Name: At_Petals_P Parameter: Age (day) Value: 23-25 days
  misc_feature: MA Experiment 20000794 PARAMETER Experiment Name: At_Petals_P Parameter: Plant Line Value: WS
  misc_feature: MA Experiment 20000794 PARAMETER Experiment Name: At_Petals_P Parameter: Tissue Value: Petals vs. Whole plant
  misc_feature: MA Experiment ID: 20001911 Result: Up-regulated in Transcription
  misc_feature: MA Experiment 20001911 PARAMETER Experiment Name: At_Drought_Reproduction_P Parameter: Age (day) Value: 40
  misc_feature: MA Experiment 20001911 PARAMETER Experiment Name: At_Drought_Reproduction_P Parameter: Organism Value: A. thaliana
  misc_feature: MA Experiment 20001911 PARAMETER Experiment Name: At_Drought_Reproduction_P Parameter: Plant Line Value: WS
  misc_feature: MA Experiment 20001911 PARAMETER Experiment Name: At_Drought_Reproduction_P Parameter: Timepoint (day) Value: 10
  misc_feature: MA Experiment 20001911 PARAMETER Experiment Name: At_Drought_Reproduction_P Parameter: Tissue Value: Flowers
  misc_feature: MA Experiment 20001911 PARAMETER Experiment Name: At_Drought_Reproduction_P Parameter: Treatment Value: Drought vs. No Drought

SEQ ID NO: 33951 - protein, 150 aa, Arabidopsis thaliana; identical to SEQ ID NO: 30361
  peptide (1)..(150): Ceres Seq. ID no. 12579949
  misc_feature (2)..(86): Homolog of NCBI NO: 15234594 NR Description: hypothetical protein; protein id: At4g37030.1
  misc_feature (2)..(125): Homolog of NCBI NO: 38345330 NR Description: OSJNBa0081L15.3 [Oryza sativa (japonica
  misc_feature (1)..(111): Homolog of NCBI NO: 30688768 NR Description: expressed protein [Arabidopsis thaliana]
  misc_feature (1)..(111): Homolog of NCBI NO: 27311557 NR Description: Unknown protein [Arabidopsis thaliana]
  misc_feature (1)..(111): Homolog of NCBI NO: 7939511 NR Description: emb|CAB40985.1~gene_id:K1G2.10~similar to unknown
  misc_feature (1)..(111): Homolog of NCBI NO: 30693640 NR Description: expressed protein [Arabidopsis thaliana]
  misc_feature (1)..(111): Homolog of NCBI NO: 9758091 NR Description: dbj|BAA95714.1~gene_id:MNF13.19~strong similarity
  misc_feature (2)..(121): Homolog of NCBI NO: 38344840 NR Description: OSJNBa0064H22.21 [Oryza sativa (japonica
  misc_feature (1)..(150): Homolog of NCBI NO: 15235450 NR Description: putative protein; protein id: At4g12680.1

SEQ ID NO: 33952 - protein, 119 aa, Arabidopsis thaliana; identical to SEQ ID NO: 30362
  peptide (1)..(119): Ceres Seq. ID no. 12579950
  misc_feature (1)..(55): Homolog of NCBI NO: 15234594 NR Description: hypothetical protein; protein id: At4g37030.1
  misc_feature (1)..(94): Homolog of NCBI NO: 38345330 NR Description: OSJNBa0081L15.3 [Oryza sativa (japonica
  misc_feature (1)..(80): Homolog of NCBI NO: 30688768 NR Description: expressed protein [Arabidopsis thaliana]
  misc_feature (1)..(80): Homolog of NCBI NO: 27311557 NR Description: Unknown protein [Arabidopsis thaliana]
  misc_feature (1)..(80): Homolog of NCBI NO: 7939511 NR Description: emb|CAB40985.1~gene_id:K1G2.10~similar to unknown
  misc_feature (1)..(80): Homolog of NCBI NO: 30693640 NR Description: expressed protein [Arabidopsis thaliana]
  misc_feature (1)..(80): Homolog of NCBI NO: 9758091 NR Description: dbj|BAA95714.1~gene_id:MNF13.19~strong similarity
  misc_feature (1)..(90): Homolog of NCBI NO: 38344840 NR Description: OSJNBa0064H22.21 [Oryza sativa (japonica
  misc_feature (1)..(119): Homolog of NCBI NO: 15235450 NR Description: putative protein; protein id: At4g12680.1

SEQ ID NO: 33953 - protein, 97 aa, Arabidopsis thaliana; identical to SEQ ID NO: 30363
  peptide (1)..(97): Ceres Seq. ID no. 12579951
  misc_feature (1)..(33): Homolog of NCBI NO: 15234594 NR Description: hypothetical protein; protein id: At4g37030.1
  misc_feature (1)..(72): Homolog of NCBI NO: 38345330 NR Description: OSJNBa0081L15.3 [Oryza sativa (japonica
  misc_feature (1)..(58): Homolog of NCBI NO: 30688768 NR Description: expressed protein [Arabidopsis thaliana]
  misc_feature (1)..(58): Homolog of NCBI NO: 27311557 NR Description: Unknown protein [Arabidopsis thaliana]
  misc_feature (1)..(58): Homolog of NCBI NO: 7939511 NR Description: emb|CAB40985.1~gene_id:K1G2.10~similar to unknown
  misc_feature (1)..(58): Homolog of NCBI NO: 30693640 NR Description: expressed protein [Arabidopsis thaliana]
  misc_feature (1)..(58): Homolog of NCBI NO: 9758091 NR Description: dbj|BAA95714.1~gene_id:MNF13.19~strong similarity
  misc_feature (1)..(68): Homolog of NCBI NO: 38344840 NR Description: OSJNBa0064H22.21 [Oryza sativa (japonica
  misc_feature (1)..(97): Homolog of NCBI NO: 15235450 NR Description: putative protein; protein id: At4g12680.1

SEQ ID NO: 33954 - DNA, 720 bp, Arabidopsis thaliana; identical to SEQ ID NO: 30364
  misc_feature (1)..(720): Ceres Seq. ID no. 12389149
  misc_feature: MA Experiment ID: 108434 Result: Down-regulated in Transcription
  misc_feature: MA Experiment 108434 PARAMETER Experiment Name: At_Root_Tips_cDNA_P Parameter: Tissue Value: Root Tips
  misc_feature: MA Experiment ID: 108488 Result: Down-regulated in Transcription
  misc_feature: MA Experiment ID: 108594 Result: Down-regulated in Transcription
  misc_feature: MA Experiment 108594 PARAMETER Experiment Name: At_Ler-rhl_Root_cDNA_P Parameter: Plant Line Value: null
  misc_feature: MA Experiment ID: 108605 Result: Up-regulated in Transcription
  misc_feature: MA Experiment 108605 PARAMETER Experiment Name: At_100uM_ABA_cDNA_P Parameter: Timepoint (hr) Value: 6
  misc_feature: MA Experiment 108605 PARAMETER Experiment Name: At_100uM_ABA_cDNA_P Parameter: Tissue Value: Aerial
  misc_feature: MA Experiment 108605 PARAMETER Experiment Name: At_100uM_ABA_cDNA_P Parameter: Treatment Value: 100uM ABA vs. No Treatment
  misc_feature: MA Experiment ID: 20000069 Result: Up-regulated in Transcription
  misc_feature: MA Experiment 20000069 PARAMETER Experiment Name: At_100uM_ABA_Mutants_cDNA_P Parameter: Plant Line Value: CS23
  misc_feature: MA Experiment 20000069 PARAMETER Experiment Name: At_100uM_ABA_Mutants_cDNA_P Parameter: Timepoint (hr) Value: 6
  misc_feature: MA Experiment 20000069 PARAMETER Experiment Name: At_100uM_ABA_Mutants_cDNA_P Parameter: Tissue Value: Aerial
  misc_feature: MA Experiment 20000069 PARAMETER Experiment Name: At_100uM_ABA_Mutants_cDNA_P Parameter: Treatment Value: 100uM ABA vs. No Treatment
  misc_feature: MA Experiment ID: 20000070 Result: Up-regulated in Transcription
  misc_feature: MA Experiment 20000070 PARAMETER Experiment Name: At_100uM_ABA_Mutants_cDNA_P Parameter: Plant Line Value: CS24
  misc_feature: MA Experiment 20000070 PARAMETER Experiment Name: At_100uM_ABA_Mutants_cDNA_P Parameter: Timepoint (hr) Value: 6
  misc_feature: MA Experiment 20000070 PARAMETER Experiment Name: At_100uM_ABA_Mutants_cDNA_P Parameter: Tissue Value: Aerial
  misc_feature: MA Experiment 20000070 PARAMETER Experiment Name: At_100uM_ABA_Mutants_cDNA_P Parameter: Treatment Value: 100uM ABA vs. No Treatment
  misc_feature: MA Experiment ID: 20000071 Result: Up-regulated in Transcription
  misc_feature: MA Experiment 20000071 PARAMETER Experiment Name: At_100uM_ABA_Mutants_cDNA_P Parameter: Plant Line Value: CS8104
  misc_feature: MA Experiment 20000071 PARAMETER Experiment Name: At_100uM_ABA_Mutants_cDNA_P Parameter: Timepoint (hr) Value: 6
  misc_feature: MA Experiment 20000071 PARAMETER Experiment Name: At_100uM_ABA_Mutants_cDNA_P Parameter: Tissue Value: Aerial
  misc_feature: MA Experiment 20000071 PARAMETER Experiment Name: At_100uM_ABA_Mutants_cDNA_P Parameter: Treatment Value: 100uM ABA vs. No Treatment
  misc_feature: MA Experiment ID: 20000072 Result: Up-regulated in Transcription
  misc_feature: MA Experiment 20000072 PARAMETER Experiment Name: At_100uM_ABA_Mutants_cDNA_P Parameter: Plant Line Value: CS8105
  misc_feature: MA Experiment 20000072 PARAMETER Experiment Name: At_100uM_ABA_Mutants_cDNA_P Parameter: Timepoint (hr) Value: 6
  misc_feature: MA Experiment 20000072 PARAMETER Experiment Name: At_100uM_ABA_Mutants_cDNA_P Parameter: Tissue Value: Aerial
  misc_feature: MA Experiment 20000072 PARAMETER Experiment Name: At_100uM_ABA_Mutants_cDNA_P Parameter: Treatment Value: 100uM ABA vs. No Treatment
  misc_feature: MA Experiment ID: 20000086 Result: Up-regulated in Transcription
  misc_feature: MA Experiment 20000086 PARAMETER Experiment Name: At_100uM_ABA_Mutants_cDNA_P Parameter: Plant Line Value: CS22
  misc_feature: MA Experiment 20000086 PARAMETER Experiment Name: At_100uM_ABA_Mutants_cDNA_P Parameter: Timepoint (hr) Value: 6
  misc_feature: MA Experiment 20000086 PARAMETER Experiment Name: At_100uM_ABA_Mutants_cDNA_P Parameter: Tissue Value: Aerial
  misc_feature: MA Experiment 20000086 PARAMETER Experiment Name: At_100uM_ABA_Mutants_cDNA_P Parameter: Treatment Value: 100uM ABA vs. No Treatment
  misc_feature: MA Experiment ID: 20000087 Result: Up-regulated in Transcription
  misc_feature: MA Experiment 20000087 PARAMETER Experiment Name: At_100uM_ABA_Mutants_cDNA_P Parameter: Plant Line Value: WS
  misc_feature: MA Experiment 20000087 PARAMETER Experiment Name: At_100uM_ABA_Mutants_cDNA_P Parameter: Timepoint (hr) Value: 6
  misc_feature: MA Experiment 20000087 PARAMETER Experiment Name: At_100uM_ABA_Mutants_cDNA_P Parameter: Tissue Value: Aerial
  misc_feature: MA Experiment 20000087 PARAMETER Experiment Name: At_100uM_ABA_Mutants_cDNA_P Parameter: Treatment Value: 100uM ABA vs. No Treatment
  misc_feature: MA Experiment ID: 20000088 Result: Up-regulated in Transcription
  misc_feature: MA Experiment 20000088 PARAMETER Experiment Name: At_100uM_ABA_Mutants_cDNA_P Parameter: Plant Line Value: Landsberg
  misc_feature: MA Experiment 20000088 PARAMETER Experiment Name: At_100uM_ABA_Mutants_cDNA_P Parameter: Timepoint (hr) Value: 6
  misc_feature: MA Experiment 20000088 PARAMETER Experiment Name: At_100uM_ABA_Mutants_cDNA_P Parameter: Tissue Value: Aerial
  misc_feature: MA Experiment 20000088 PARAMETER Experiment Name: At_100uM_ABA_Mutants_cDNA_P Parameter: Treatment Value: 100uM ABA vs. No Treatment
  misc_feature: MA Experiment ID: 20000089 Result: Up-regulated in Transcription
  misc_feature: MA Experiment ID: 20000090 Result: Up-regulated in Transcription
  misc_feature: MA Experiment ID: 20000117 Result: Up-regulated in Transcription
  misc_feature: MA Experiment 20000117 PARAMETER Experiment Name: At_100uM_ABA_Mutants_cDNA_P Parameter: Plant Line Value: Columbia
  misc_feature: MA Experiment 20000117 PARAMETER Experiment Name: At_100uM_ABA_Mutants_cDNA_P Parameter: Timepoint (hr) Value: 6
  misc_feature: MA Experiment 20000117 PARAMETER Experiment Name: At_100uM_ABA_Mutants_cDNA_P Parameter: Tissue Value: Aerial
  misc_feature: MA Experiment 20000117 PARAMETER Experiment Name: At_100uM_ABA_Mutants_cDNA_P Parameter: Treatment Value: 100uM ABA vs. No Treatment
  misc_feature: MA Experiment ID: 20000144 Result: Down-regulated in Transcription
  misc_feature: MA Experiment 20000144 PARAMETER Experiment Name: At_42deg_Heat_cDNA_P Parameter: Temperature (deg C) Value: 42 vs. 22
  misc_feature: MA Experiment 20000144 PARAMETER Experiment Name: At_42deg_Heat_cDNA_P Parameter: Timepoint (hr) Value: 1
  misc_feature: MA Experiment 20000144 PARAMETER Experiment Name: At_42deg_Heat_cDNA_P Parameter: Tissue Value: Aerial
  misc_feature: MA Experiment ID: 20000166 Result: Up-regulated in Transcription
  misc_feature: MA Experiment 20000166 PARAMETER Experiment Name: At_100uM_ABA_P Parameter: Age (day) Value: 14
  misc_feature: MA Experiment 20000166 PARAMETER Experiment Name: At_100uM_ABA_P Parameter: Organism Value: A. thaliana
  misc_feature: MA Experiment 20000166 PARAMETER Experiment Name: At_100uM_ABA_P Parameter: Plant Line Value: WS
  misc_feature: MA Experiment 20000166 PARAMETER Experiment Name: At_100uM_ABA_P Parameter: Timepoint (hr) Value: 1
  misc_feature: MA Experiment 20000166 PARAMETER Experiment Name: At_100uM_ABA_P Parameter: Tissue Value: Aerial
  misc_feature: MA Experiment 20000166 PARAMETER Experiment Name: At_100uM_ABA_P Parameter: Treatment Value: 100uM ABA vs. No Treatment
  misc_feature: MA Experiment ID: 20000171 Result: Down-regulated in Transcription
  misc_feature: MA Experiment 20000171 PARAMETER Experiment Name: At_42deg_Heat_P Parameter: Age (day) Value: 14
  misc_feature: MA Experiment 20000171 PARAMETER Experiment Name: At_42deg_Heat_P Parameter: Organism Value: A. thaliana
  misc_feature: MA Experiment 20000171 PARAMETER Experiment Name: At_42deg_Heat_P Parameter: Plant Line Value: WS
  misc_feature: MA Experiment 20000171 PARAMETER Experiment Name: At_42deg_Heat_P Parameter: Temperature (deg C) Value: 42 vs. 22
  misc_feature: MA Experiment 20000171 PARAMETER Experiment Name: At_42deg_Heat_P Parameter: Timepoint (hr) Value: 1
  misc_feature: MA Experiment 20000171 PARAMETER Experiment Name: At_42deg_Heat_P Parameter: Tissue Value: Aerial
  misc_feature: MA Experiment ID: 20000173 Result: Down-regulated in Transcription
  misc_feature: MA Experiment 20000173 PARAMETER Experiment Name: At_42deg_Heat_P Parameter: Age (day) Value: 14
  misc_feature: MA Experiment 20000173 PARAMETER Experiment Name: At_42deg_Heat_P Parameter: Organism Value: A. thaliana
  misc_feature: MA Experiment 20000173 PARAMETER Experiment Name: At_42deg_Heat_P Parameter: Plant Line Value: WS
  misc_feature: MA Experiment 20000173 PARAMETER Experiment Name: At_42deg_Heat_P Parameter: Temperature (deg C) Value: 42 vs. 22
  misc_feature: MA Experiment 20000173 PARAMETER Experiment Name: At_42deg_Heat_P Parameter: Timepoint (hr) Value: 6
  misc_feature: MA Experiment 20000173 PARAMETER Experiment Name: At_42deg_Heat_P Parameter: Tissue Value: Aerial
  misc_feature: MA Experiment ID: 20000182 Result: Up-regulated in Transcription
  misc_feature: MA Experiment 20000182 PARAMETER Experiment Name: At_2mM_SA_P Parameter: Age (day) Value: 14
  misc_feature: MA Experiment 20000182 PARAMETER Experiment Name: At_2mM_SA_P Parameter: Organism Value: A. thaliana
  misc_feature: MA Experiment 20000182 PARAMETER Experiment Name: At_2mM_SA_P Parameter: Plant Line Value: WS
  misc_feature: MA Experiment 20000182 PARAMETER Experiment Name: At_2mM_SA_P Parameter: Timepoint (hr) Value: 6
  misc_feature: MA Experiment 20000182 PARAMETER Experiment Name: At_2mM_SA_P Parameter: Tissue Value: Aerial
  misc_feature: MA Experiment 20000182 PARAMETER Experiment Name: At_2mM_SA_P Parameter: Treatment Value: 2mM SA vs. No Treatment
  misc_feature: MA Experiment ID: 20000184 Result: Down-regulated in Transcription
  misc_feature: MA Experiment 20000184 PARAMETER Experiment Name: At_Shoots__P Parameter: Age (day) Value: 7
  misc_feature: MA Experiment 20000184 PARAMETER Experiment Name: At_Shoots__P Parameter: Tissue Value: Shoots vs. Whole Plant
  misc_feature: MA Experiment ID: 20000227 Result: Down-regulated in Transcription
  misc_feature: MA Experiment 20000227 PARAMETER Experiment Name: At_Root-Tips-vs-Tops_P Parameter: Tissue Value: Root Tips vs. Root Tops
  misc_feature: MA Experiment ID: 20000234 Result: Down-regulated in Transcription
  misc_feature: MA Experiment 20000234 PARAMETER Experiment Name: At_Siliques_P Parameter: Age (day) Value: 21
  misc_feature: MA Experiment 20000234 PARAMETER Experiment Name: At_Siliques_P Parameter: Organism Value: A. thaliana
  misc_feature: MA Experiment 20000234 PARAMETER Experiment Name: At_Siliques_P Parameter: Plant Line Value: WS
  misc_feature: MA Experiment 20000234 PARAMETER Experiment Name: At_Siliques_P Parameter: Tissue Value: Less Than 5mm Siliques vs. Whole Plant
  misc_feature: MA Experiment ID: 20000235 Result: Down-regulated in Transcription
  misc_feature: MA Experiment 20000235 PARAMETER Experiment Name: At_Siliques_P Parameter: Age (day) Value: 21
  misc_feature: MA Experiment 20000235 PARAMETER Experiment Name: At_Siliques_P Parameter: Organism Value: A. thaliana
  misc_feature: MA Experiment 20000235 PARAMETER Experiment Name: At_Siliques_P Parameter: Plant Line Value: WS
  misc_feature: MA Experiment 20000235 PARAMETER Experiment Name: At_Siliques_P Parameter: Tissue Value: 5-10mm Siliques vs. Whole Plant
  misc_feature: MA Experiment ID: 20000265 Result: Down-regulated in Transcription
  misc_feature: MA Experiment 20000265 PARAMETER Experiment Name: At_Open_Flower_P Parameter: Age (day) Value: 21
  misc_feature: MA Experiment 20000265 PARAMETER Experiment Name: At_Open_Flower_P Parameter: Plant Line Value: WS
  misc_feature: MA Experiment 20000265 PARAMETER Experiment Name: At_Open_Flower_P Parameter: Tissue Value: Closed Flower vs. Whole Plant
  misc_feature: MA Experiment ID: 20000438 Result: Down-regulated in Transcription
  misc_feature: MA Experiment 20000438 PARAMETER Experiment Name: At_Shoots__P Parameter: Age (day) Value: 14
  misc_feature: MA Experiment 20000438 PARAMETER Experiment Name: At_Shoots__P Parameter: Tissue Value: Shoots vs. Whole Plant
  misc_feature: MA Experiment ID: 20001248 Result: Up-regulated in Transcription
  misc_feature: MA Experiment 20001248 PARAMETER Experiment Name: At_Far-red-induction_P Parameter: Age (day) Value: 7
  misc_feature: MA Experiment 20001248 PARAMETER Experiment Name: At_Far-red-induction_P Parameter: Light Value: Far-red vs. White
  misc_feature: MA Experiment 20001248 PARAMETER Experiment Name: At_Far-red-induction_P Parameter: Organism Value: A. thaliana
  misc_feature: MA Experiment 20001248 PARAMETER Experiment Name: At_Far-red-induction_P Parameter: Plant Line Value: Columbia
  misc_feature: MA Experiment 20001248 PARAMETER Experiment Name: At_Far-red-induction_P Parameter: Timepoint (hr) Value: 4
  misc_feature: MA Experiment 20001248 PARAMETER Experiment Name: At_Far-red-induction_P Parameter: Tissue Value: Whole Plant
  misc_feature: MA Experiment ID: 20001558 Result: Down-regulated in Transcription
  misc_feature: MA Experiment 20001558 PARAMETER Experiment Name: At_Drought_Soil_Dry_P Parameter: Age (day) Value: 27
  misc_feature: MA Experiment 20001558 PARAMETER Experiment Name: At_Drought_Soil_Dry_P Parameter: Organism Value: A. thaliana
  misc_feature: MA Experiment 20001558 PARAMETER Experiment Name: At_Drought_Soil_Dry_P Parameter: Plant Line Value: WS
  misc_feature: MA Experiment 20001558 PARAMETER Experiment Name: At_Drought_Soil_Dry_P Parameter: Post Timepoint (hr) Value: 6
  misc_feature: MA Experiment 20001558 PARAMETER Experiment Name: At_Drought_Soil_Dry_P Parameter: Post-Treatment Value: Re-Water vs. No Drought
  misc_feature: MA Experiment 20001558 PARAMETER Experiment Name: At_Drought_Soil_Dry_P Parameter: Timepoint (day) Value: 13
  misc_feature: MA Experiment 20001558 PARAMETER Experiment Name: At_Drought_Soil_Dry_P Parameter: Treatment Value: Drought vs. No Drought

SEQ ID NO: 33955 - protein, 166 aa, Arabidopsis thaliana; identical to SEQ ID NO: 30365
  peptide (1)..(166): Ceres Seq. ID no. 12389150
  misc_feature (10)..(149): Pfam Name: Protein of unknown function, DUF538 Pfam Description: Protein of unknown function, DUF538
  misc_feature (1)..(159): Homolog of NCBI NO: 18420052 NR Description: unknown protein; protein id: At5g19860.1
  misc_feature (3)..(143): Homolog of NCBI NO: 15241137 NR Description: putative protein; protein id: At5g19590.1
  misc_feature (9)..(150): Homolog of NCBI NO: 28273408 NR Description: unknown protein [Oryza sativa (japonica
  misc_feature (1)..(143): Homolog of NCBI NO: 34912320 NR Description: P0451D05.23 [Oryza sativa (japonica
  misc_feature (11)..(149): Homolog of NCBI NO: 21553750 NR Description: unknown [Arabidopsis thaliana]
  misc_feature (11)..(149): Homolog of NCBI NO: 18379012 NR Description: Expressed protein
  misc_feature (8)..(154): Homolog of NCBI NO: 15235335 NR Description: putative protein; protein id: At4g02360.1
  misc_feature (1)..(165): Homolog of NCBI NO: 18379014 NR Description: Expressed protein
  misc_feature (1)..(166): Homolog of NCBI NO: 18411923 NR Description: coded for by A. thaliana cDNA R64991
  misc_feature (1)..(166): Homolog of NCBI NO: 21554037 NR Description: unknown [Arabidopsis thaliana]

SEQ ID NO: 33956 - DNA, 710 bp, Arabidopsis thaliana; identical to SEQ ID NO: 30366
  misc_feature (1)..(710): Ceres Seq. ID no. 12332093
  misc_feature: MA Experiment ID: 108434 Result: Up-regulated in Transcription
  misc_feature: MA Experiment 108434 PARAMETER Experiment Name: At_Root_Tips_cDNA_P Parameter: Tissue Value: Root Tips
  misc_feature: MA Experiment ID: 108462 Result: Down-regulated in Transcription
  misc_feature: MA Experiment 108462 PARAMETER Experiment Name: At_Germinating_Seeds_cDNA_P Parameter: Age (day) Value: 2 vs. 0
  misc_feature: MA Experiment 108462 PARAMETER Experiment Name: At_Germinating_Seeds_cDNA_P Parameter: Tissue Value: Germinating Seeds
  misc_feature: MA Experiment ID: 108463 Result: Down-regulated in Transcription
  misc_feature: MA Experiment 108463 PARAMETER Experiment Name: At_Germinating_Seeds_cDNA_P Parameter: Age (day) Value: 3 vs. 0
  misc_feature: MA Experiment 108463 PARAMETER Experiment Name: At_Germinating_Seeds_cDNA_P Parameter: Tissue Value: Germinating Seeds
  misc_feature: MA Experiment ID: 108573 Result: Down-regulated in Transcription
  misc_feature: MA Experiment 108573 PARAMETER Experiment Name: At_Drought_cDNA_P Parameter: Timepoint (hr) Value: 6
  misc_feature: MA Experiment 108573 PARAMETER Experiment Name: At_Drought_cDNA_P Parameter: Tissue Value: Aerial
  misc_feature: MA Experiment 108573 PARAMETER Experiment Name: At_Drought_cDNA_P Parameter: Treatment Value: Drought vs. No Drought
  misc_feature: MA Experiment ID: 108585 Result: Down-regulated in Transcription
  misc_feature: MA Experiment 108585 PARAMETER Experiment Name: At_5mM_NaNP_cDNA_P Parameter: Timepoint (hr) Value: 6
  misc_feature: MA Experiment 108585 PARAMETER Experiment Name: At_5mM_NaNP_cDNA_P Parameter: Tissue Value: Aerial
  misc_feature: MA Experiment 108585 PARAMETER Experiment Name: At_5mM_NaNP_cDNA_P Parameter: Treatment Value: null
  misc_feature: MA Experiment ID: 108595 Result: Down-regulated in Transcription
  misc_feature: MA Experiment 108595 PARAMETER Experiment Name: At_Ler-pi_Ovule_cDNA_P Parameter: Plant Line Value: null
  misc_feature: MA Experiment ID: 20000182 Result: Down-regulated in Transcription
  misc_feature: MA Experiment 20000182 PARAMETER Experiment Name: At_2mM_SA_P Parameter: Age (day) Value: 14
  misc_feature: MA Experiment 20000182 PARAMETER Experiment Name: At_2mM_SA_P Parameter: Organism Value: A. thaliana
  misc_feature: MA Experiment 20000182 PARAMETER Experiment Name: At_2mM_SA_P Parameter: Plant Line Value: WS
  misc_feature: MA Experiment 20000182 PARAMETER Experiment Name: At_2mM_SA_P Parameter: Timepoint (hr) Value: 6
  misc_feature: MA Experiment 20000182 PARAMETER Experiment Name: At_2mM_SA_P Parameter: Tissue Value: Aerial
  misc_feature: MA Experiment 20000182 PARAMETER Experiment Name: At_2mM_SA_P Parameter: Treatment Value: 2mM SA vs. No Treatment
  misc_feature: MA Experiment ID: 20000185 Result: Down-regulated in Transcription
  misc_feature: MA Experiment 20000185 PARAMETER Experiment Name: At_Roots__P Parameter: Age (day) Value: 7 vs. 21
  misc_feature: MA Experiment 20000185 PARAMETER Experiment Name: At_Roots__P Parameter: Organism Value: A. thaliana
  misc_feature: MA Experiment 20000185 PARAMETER Experiment Name: At_Roots__P Parameter: Tissue Value: Roots vs. Whole Plant
  misc_feature: MA Experiment ID: 20000234 Result: Up-regulated in Transcription
  misc_feature: MA Experiment 20000234 PARAMETER Experiment Name: At_Siliques_P Parameter: Age (day) Value: 21
  misc_feature: MA Experiment 20000234 PARAMETER Experiment Name: At_Siliques_P Parameter: Organism Value: A. thaliana
  misc_feature: MA Experiment 20000234 PARAMETER Experiment Name: At_Siliques_P Parameter: Plant Line Value: WS
  misc_feature: MA Experiment 20000234 PARAMETER Experiment Name: At_Siliques_P Parameter: Tissue Value: Less Than 5mm Siliques vs. Whole Plant
  misc_feature: MA Experiment ID: 20000436 Result: Down-regulated in Transcription
  misc_feature: MA Experiment 20000436 PARAMETER Experiment Name: At_Drought_P Parameter: Age (day) Value: 7
  misc_feature: MA Experiment 20000436 PARAMETER Experiment Name: At_Drought_P Parameter: Organism Value: A. thaliana
  misc_feature: MA Experiment 20000436 PARAMETER Experiment Name: At_Drought_P Parameter: Plant Line Value: WS
  misc_feature: MA Experiment 20000436 PARAMETER Experiment Name: At_Drought_P Parameter: Timepoint (hr) Value: 12
  misc_feature: MA Experiment 20000436 PARAMETER Experiment Name: At_Drought_P Parameter: Tissue Value: Whole Plant
  misc_feature: MA Experiment 20000436 PARAMETER Experiment Name: At_Drought_P Parameter: Treatment Value: Drought vs. No Drought
  misc_feature: MA Experiment ID: 20000437 Result: Down-regulated in Transcription
  misc_feature: MA Experiment 20000437 PARAMETER Experiment Name: At_Drought_P Parameter: Age (day) Value: 8
  misc_feature: MA Experiment 20000437 PARAMETER Experiment Name: At_Drought_P Parameter: Organism Value: A. thaliana
  misc_feature: MA Experiment 20000437 PARAMETER Experiment Name: At_Drought_P Parameter: Plant Line Value: WS
  misc_feature: MA Experiment 20000437 PARAMETER Experiment Name: At_Drought_P Parameter: Timepoint (hr) Value: 24
  misc_feature: MA Experiment 20000437 PARAMETER Experiment Name: At_Drought_P Parameter: Tissue Value: Whole Plant
  misc_feature: MA Experiment 20000437 PARAMETER Experiment Name: At_Drought_P Parameter: Treatment Value: Drought vs. No Drought
  misc_feature: MA Experiment ID: 20000439 Result: Down-regulated in Transcription
  misc_feature: MA Experiment 20000439 PARAMETER Experiment Name: At_Roots__P Parameter: Age (day) Value: 14 vs. 21
  misc_feature: MA Experiment 20000439 PARAMETER Experiment Name: At_Roots__P Parameter: Organism Value: A. thaliana
  misc_feature: MA Experiment 20000439 PARAMETER Experiment Name: At_Roots__P Parameter: Tissue Value: Roots vs. Whole Plant
  misc_feature: MA Experiment ID: 20000794 Result: Down-regulated in Transcription
  misc_feature: MA Experiment 20000794 PARAMETER Experiment Name: At_Petals_P Parameter: Age (day) Value: 23-25 days
  misc_feature: MA Experiment 20000794 PARAMETER Experiment Name: At_Petals_P Parameter: Plant Line Value: WS
  misc_feature: MA Experiment 20000794 PARAMETER Experiment Name: At_Petals_P Parameter: Tissue Value: Petals vs. Whole plant
  misc_feature: MA Experiment ID: 20001558 Result: Up-regulated in Transcription
  misc_feature: MA Experiment 20001558 PARAMETER Experiment Name: At_Drought_Soil_Dry_P Parameter: Age (day) Value: 27
  misc_feature: MA Experiment 20001558 PARAMETER Experiment Name: At_Drought_Soil_Dry_P Parameter: Organism Value: A. thaliana
  misc_feature: MA Experiment 20001558 PARAMETER Experiment Name: At_Drought_Soil_Dry_P Parameter: Plant Line Value: WS
  misc_feature: MA Experiment 20001558 PARAMETER Experiment Name: At_Drought_Soil_Dry_P Parameter: Post Timepoint (hr) Value: 6
  misc_feature: MA Experiment 20001558 PARAMETER Experiment Name: At_Drought_Soil_Dry_P Parameter: Post-Treatment Value: Re-Water vs. No Drought
  misc_feature: MA Experiment 20001558 PARAMETER Experiment Name: At_Drought_Soil_Dry_P Parameter: Timepoint (day) Value: 13
  misc_feature: MA Experiment 20001558 PARAMETER Experiment Name: At_Drought_Soil_Dry_P Parameter: Treatment Value: Drought vs. No Drought
  misc_feature: MA Experiment ID: 20001560 Result: Up-regulated in Transcription
  misc_feature: MA Experiment 20001560 PARAMETER Experiment Name: At_Drought_Soil_Dry_P Parameter: Age (day) Value: 28
  misc_feature: MA Experiment 20001560 PARAMETER Experiment Name: At_Drought_Soil_Dry_P Parameter: Organism Value: A. thaliana
  misc_feature: MA Experiment 20001560 PARAMETER Experiment Name: At_Drought_Soil_Dry_P Parameter: Plant Line Value: WS
  misc_feature: MA Experiment 20001560 PARAMETER Experiment Name: At_Drought_Soil_Dry_P Parameter: Post Timepoint (hr) Value: None
  misc_feature: MA Experiment 20001560 PARAMETER Experiment Name: At_Drought_Soil_Dry_P Parameter: Post-Treatment Value: None
  misc_feature: MA Experiment 20001560 PARAMETER Experiment Name: At_Drought_Soil_Dry_P Parameter: Timepoint (day) Value: 14
  misc_feature: MA Experiment 20001560 PARAMETER Experiment Name: At_Drought_Soil_Dry_P Parameter: Treatment Value: Drought vs. No Drought
  misc_feature: MA Experiment ID: 20001757 Result: Up-regulated in Transcription
  misc_feature: MA Experiment 20001757 PARAMETER Experiment Name: At_50mM_NH4NO3_L-to-H_P Parameter: Timepoint (hr) Value: 6
  misc_feature: MA Experiment 20001757 PARAMETER Experiment Name: At_50mM_NH4NO3_L-to-H_P Parameter: Tissue Value: Leaf
  misc_feature: MA Experiment 20001757 PARAMETER Experiment Name: At_50mM_NH4NO3_L-to-H_P Parameter: Treatment Value: 50mM NH4NO3 vs 100mM Mannitol
  misc_feature: MA Experiment ID: 20001905 Result: Down-regulated in Transcription
  misc_feature: MA Experiment 20001905 PARAMETER Experiment Name: At_Drought_Reproduction_P Parameter: Age (day) Value: 40
  misc_feature: MA Experiment 20001905 PARAMETER Experiment Name: At_Drought_Reproduction_P Parameter: Organism Value: A. thaliana
  misc_feature: MA Experiment 20001905 PARAMETER Experiment Name: At_Drought_Reproduction_P Parameter: Plant Line Value: WS
  misc_feature: MA Experiment 20001905 PARAMETER Experiment Name: At_Drought_Reproduction_P Parameter: Timepoint (day) Value: 10
  misc_feature: MA Experiment 20001905 PARAMETER Experiment Name: At_Drought_Reproduction_P Parameter: Tissue Value: Rosettes
  misc_feature: MA Experiment 20001905 PARAMETER Experiment Name: At_Drought_Reproduction_P Parameter: Treatment Value: Drought vs. No Drought

SEQ ID NO: 33957 - protein, 192 aa, Arabidopsis thaliana; identical to SEQ ID NO: 30367
  peptide (1)..(192): Ceres Seq. ID no. 12332094
  misc_feature (93)..(185): Pfam Name: Uncharacterised BCR, YbaB family COG0718 Pfam Description: Uncharacterised BCR, YbaB family COG0718
  misc_feature (76)..(188): Homolog of NCBI NO: 22298265 NR Description: ORF_ID:tlr0723~hypothetical protein
  misc_feature (71)..(185): Homolog of NCBI NO: 23040346 NR Description: hypothetical protein [Trichodesmium erythraeum
  misc_feature (76)..(185): Homolog of NCBI NO: 23124992 NR Description: hypothetical protein [Nostoc punctiforme]
  misc_feature (76)..(185): Homolog of NCBI NO: 17232559 NR Description: hypothetical protein [Nostoc sp. PCC 7120]
  misc_feature (83)..(188): Homolog of NCBI NO: 24414799 NR Description: hypothetical protein [Synechococcus sp. PCC 7942]
  misc_feature (58)..(187): Homolog of NCBI NO: 28207763 NR Description: CR084 protein [Chlamydomonas reinhardtii]
  misc_feature (17)..(192): Homolog of NCBI NO: 25412184 NR Description: hypothetical protein At2g24020 [imported] -
  misc_feature (13)..(192): Homolog of NCBI NO: 18400436 NR Description: expressed protein
  misc_feature (13)..(192): Homolog of NCBI NO: 21553866 NR Description: unknown [Arabidopsis thaliana]
  misc_feature (13)..(192): Homolog of NCBI NO: 15234797 NR Description: putative protein

SEQ ID NO: 33958 - protein, 180 aa, Arabidopsis thaliana; identical to SEQ ID NO: 30368
  peptide (1)..(180): Ceres Seq. ID no. 12332095
  misc_feature (81)..(173): Pfam Name: Uncharacterised BCR, YbaB family COG0718 Pfam Description: Uncharacterised BCR, YbaB family COG0718
  misc_feature (64)..(176): Homolog of NCBI NO: 22298265 NR Description: ORF_ID:tlr0723~hypothetical protein
  misc_feature (59)..(173): Homolog of NCBI NO: 23040346 NR Description: hypothetical protein [Trichodesmium erythraeum
  misc_feature (64)..(173): Homolog of NCBI NO: 23124992 NR Description: hypothetical protein [Nostoc punctiforme]
  misc_feature (64)..(173): Homolog of NCBI NO: 17232559 NR Description: hypothetical protein [Nostoc sp. PCC 7120]
  misc_feature (71)..(176): Homolog of NCBI NO: 24414799 NR Description: hypothetical protein [Synechococcus sp. PCC 7942]
  misc_feature (46)..(175): Homolog of NCBI NO: 28207763 NR Description: CR084 protein [Chlamydomonas reinhardtii]
  misc_feature (5)..(180): Homolog of NCBI NO: 25412184 NR Description: hypothetical protein At2g24020 [imported] -
  misc_feature (1)..(180): Homolog of NCBI NO: 18400436 NR Description: expressed protein
  misc_feature (1)..(180): Homolog of NCBI NO: 21553866 NR Description: unknown [Arabidopsis thaliana]
  misc_feature (1)..(180): Homolog of NCBI NO: 15234797 NR Description: putative protein

SEQ ID NO: 33959 - protein, 107 aa, Arabidopsis thaliana; identical to SEQ ID NO: 30369
  peptide (1)..(107): Ceres Seq. ID no. 12332096
  misc_feature (8)..(100): Pfam Name: Uncharacterised BCR, YbaB family COG0718 Pfam Description: Uncharacterised BCR, YbaB family COG0718
  misc_feature (1)..(103): Homolog of NCBI NO: 22298265 NR Description: ORF_ID:tlr0723~hypothetical protein
  misc_feature (1)..(100): Homolog of NCBI NO: 23040346 NR Description: hypothetical protein [Trichodesmium erythraeum
  misc_feature (1)..(100): Homolog of NCBI NO: 23124992 NR Description: hypothetical protein [Nostoc punctiforme]
  misc_feature (1)..(100): Homolog of NCBI NO: 17232559 NR Description: hypothetical protein [Nostoc sp. PCC 7120]
  misc_feature (1)..(103): Homolog of NCBI NO: 24414799 NR Description: hypothetical protein [Synechococcus sp. PCC 7942]
  misc_feature (1)..(102): Homolog of NCBI NO: 28207763 NR Description: CR084 protein [Chlamydomonas reinhardtii]
  misc_feature (1)..(107): Homolog of NCBI NO: 25412184 NR Description: hypothetical protein At2g24020 [imported] -
  misc_feature (1)..(107): Homolog of NCBI NO: 18400436 NR Description: expressed protein
  misc_feature (1)..(107): Homolog of NCBI NO: 21553866 NR Description: unknown [Arabidopsis thaliana]
  misc_feature (1)..(107): Homolog of NCBI NO: 15234797 NR Description: putative protein

SEQ ID NO: 33960 - DNA, 958 bp, Arabidopsis thaliana; identical to SEQ ID NO: 30370
  misc_feature (1)..(958): Ceres Seq. ID no. 13489828
  misc_feature: MA Experiment ID: 108434 Result: Up-regulated in Transcription
  misc_feature: MA Experiment 108434 PARAMETER Experiment Name: At_Root_Tips_cDNA_P Parameter: Tissue Value: Root Tips
  misc_feature: MA Experiment ID: 108461 Result: Up-regulated in Transcription
  misc_feature: MA Experiment 108461 PARAMETER Experiment Name: At_Germinating_Seeds_cDNA_P Parameter: Age (day) Value: 1 vs. 0
  misc_feature: MA Experiment 108461 PARAMETER Experiment Name: At_Germinating_Seeds_cDNA_P Parameter: Tissue Value: Germinating Seeds
  misc_feature: MA Experiment ID: 20000112 Result: Down-regulated in Transcription
  misc_feature: MA Experiment 20000112 PARAMETER Experiment Name: At_42deg_Heat_cDNA_P Parameter: Temperature (deg C) Value: 42 vs. 22
  misc_feature: MA Experiment 20000112 PARAMETER Experiment Name: At_42deg_Heat_cDNA_P Parameter: Timepoint (hr) Value: 2
  misc_feature: MA Experiment 20000112 PARAMETER Experiment Name: At_42deg_Heat_cDNA_P Parameter: Tissue Value: Aerial
  misc_feature: MA Experiment ID: 20000113 Result: Down-regulated in Transcription
  misc_feature: MA Experiment 20000113 PARAMETER Experiment Name: At_42deg_Heat_cDNA_P Parameter: Temperature (deg C) Value: 42 vs. 22
  misc_feature: MA Experiment 20000113 PARAMETER Experiment Name: At_42deg_Heat_cDNA_P Parameter: Timepoint (hr) Value: 8
  misc_feature: MA Experiment 20000113 PARAMETER Experiment Name: At_42deg_Heat_cDNA_P Parameter: Tissue Value: Aerial
  misc_feature: MA Experiment ID: 20000144 Result: Down-regulated in Transcription
  misc_feature: MA Experiment 20000144 PARAMETER Experiment Name: At_42deg_Heat_cDNA_P Parameter: Temperature (deg C) Value: 42 vs. 22
  misc_feature: MA Experiment 20000144 PARAMETER Experiment Name: At_42deg_Heat_cDNA_P Parameter: Timepoint (hr) Value: 1
  misc_feature: MA Experiment 20000144 PARAMETER Experiment Name: At_42deg_Heat_cDNA_P Parameter: Tissue Value: Aerial
  misc_feature: MA Experiment ID: 20000180 Result: Up-regulated in Transcription
  misc_feature: MA Experiment 20000180 PARAMETER Experiment Name: At_Germinating_Seeds_P Parameter: Age (hr) Value: 24 vs. 0
  misc_feature: MA Experiment 20000180 PARAMETER Experiment Name: At_Germinating_Seeds_P Parameter: Tissue Value: Germinating Seeds
  misc_feature: MA Experiment ID: 20001911 Result: Down-regulated in Transcription
  misc_feature: MA Experiment 20001911 PARAMETER Experiment Name: At_Drought_Reproduction_P Parameter: Age (day) Value: 40
  misc_feature: MA Experiment 20001911 PARAMETER Experiment Name: At_Drought_Reproduction_P Parameter: Organism Value: A. thaliana
  misc_feature: MA Experiment 20001911 PARAMETER Experiment Name: At_Drought_Reproduction_P Parameter: Plant Line Value: WS
  misc_feature: MA Experiment 20001911 PARAMETER Experiment Name: At_Drought_Reproduction_P Parameter: Timepoint (day) Value: 10
  misc_feature: MA Experiment 20001911 PARAMETER Experiment Name: At_Drought_Reproduction_P Parameter: Tissue Value: Flowers
  misc_feature: MA Experiment 20001911 PARAMETER Experiment Name: At_Drought_Reproduction_P Parameter: Treatment Value: Drought vs. No Drought

SEQ ID NO: 33961 - protein, 212 aa, Arabidopsis thaliana; identical to SEQ ID NO: 30371
  peptide (1)..(212): Ceres Seq. ID no. 13489829
  misc_feature (10)..(212): Pfam Name: emp24/gp25L/p24 family Pfam Description: emp24/gp25L/p24 family
  misc_feature (9)..(212): Homolog of NCBI NO: 22330523 NR Description: emp24/gp25L/p24 family [Arabidopsis thaliana]
  misc_feature (15)..(212): Homolog of NCBI NO: 15223027 NR Description: emp24/gp25L/p24 family [Arabidopsis thaliana]
  misc_feature (9)..(212): Homolog of NCBI NO: 18396016 NR Description: emp24/gp25L/p24 family [Arabidopsis thaliana]
  misc_feature (9)..(212): Homolog of NCBI NO: 21618241 NR Description: unknown [Arabidopsis thaliana]
  misc_feature (7)..(212): Homolog of NCBI NO: 33146897 NR Description: putative transmembrane protein
  misc_feature (63)..(189): Homolog of NCBI NO: 40641597 NR Description: putative transmembrane protein-like protein
  misc_feature (18)..(212): Homolog of NCBI NO: 15228372 NR Description: emp24/gp25L/p24 family [Arabidopsis thaliana]
  misc_feature (9)..(212): Homolog of NCBI NO: 15219136 NR Description: emp24/gp25L/p24 family [Arabidopsis thaliana]
  misc_feature (1)..(212): Homolog of NCBI NO: 15217563 NR Description: emp24/gp25L/p24 family [Arabidopsis thaliana]
  misc_feature (1)..(212): Homolog of NCBI NO: 15223626 NR Description: emp24/gp25L/p24 family [Arabidopsis thaliana]

SEQ ID NO: 33962 - protein, 208 aa, Arabidopsis thaliana; identical to SEQ ID NO: 30372
  peptide (1)..(208): Ceres Seq. ID no. 13489830
  misc_feature (6)..(208): Pfam Name: emp24/gp25L/p24 family Pfam Description: emp24/gp25L/p24 family
  misc_feature (5)..(208): Homolog of NCBI NO: 22330523 NR Description: emp24/gp25L/p24 family [Arabidopsis thaliana]
  misc_feature (11)..(208): Homolog of NCBI NO: 15223027 NR Description: emp24/gp25L/p24 family [Arabidopsis thaliana]
  misc_feature (5)..(208): Homolog of NCBI NO: 18396016 NR Description: emp24/gp25L/p24 family [Arabidopsis thaliana]
  misc_feature (5)..(208): Homolog of NCBI NO: 21618241 NR Description: unknown [Arabidopsis thaliana]
  misc_feature (3)..(208): Homolog of NCBI NO: 33146897 NR Description: putative transmembrane protein
  misc_feature (59)..(185): Homolog of NCBI NO: 40641597 NR Description: putative transmembrane protein-like protein
  misc_feature (14)..(208): Homolog of NCBI NO: 15228372 NR Description: emp24/gp25L/p24 family [Arabidopsis thaliana]
  misc_feature (5)..(208): Homolog of NCBI NO: 15219136 NR Description: emp24/gp25L/p24 family [Arabidopsis thaliana]
  misc_feature (1)..(208): Homolog of NCBI NO: 15217563 NR Description: emp24/gp25L/p24 family [Arabidopsis thaliana]
  misc_feature (1)..(208): Homolog of NCBI NO: 15223626 NR Description: emp24/gp25L/p24 family [Arabidopsis thaliana]

SEQ ID NO: 33963 - DNA, 644 bp, Arabidopsis thaliana; identical to SEQ ID NO: 30373
  misc_feature (1)..(644): Ceres Seq. ID no. 12369950
  misc_feature: MA Experiment ID: 108434 Result: Up-regulated in Transcription
  misc_feature: MA Experiment 108434 PARAMETER Experiment Name: At_Root_Tips_cDNA_P Parameter: Tissue Value: Root Tips
  misc_feature: MA Experiment ID: 108461 Result: Up-regulated in Transcription
  misc_feature: MA Experiment 108461 PARAMETER Experiment Name: At_Germinating_Seeds_cDNA_P Parameter: Age (day) Value: 1 vs. 0
  misc_feature: MA Experiment 108461 PARAMETER Experiment Name: At_Germinating_Seeds_cDNA_P Parameter: Tissue Value: Germinating Seeds
  misc_feature: MA Experiment ID: 108462 Result: Up-regulated in Transcription
  misc_feature: MA Experiment 108462 PARAMETER Experiment Name: At_Germinating_Seeds_cDNA_P Parameter: Age (day) Value: 2 vs. 0
  misc_feature: MA Experiment 108462 PARAMETER Experiment Name: At_Germinating_Seeds_cDNA_P Parameter: Tissue Value: Germinating Seeds
  misc_feature: MA Experiment ID: 108569 Result: Down-regulated in Transcription
  misc_feature: MA Experiment 108569 PARAMETER Experiment Name: At_0.001%_MeJA__cDNA_P Parameter: Timepoint (hr) Value: 6
  misc_feature: MA Experiment 108569 PARAMETER Experiment Name: At_0.001%_MeJA__cDNA_P Parameter: Tissue Value: Aerial
  misc_feature: MA Experiment 108569 PARAMETER Experiment Name: At_0.001%_MeJA__cDNA_P Parameter: Treatment Value: 0.001% MeJA vs. No Treatment
  misc_feature: MA Experiment ID: 108573 Result: Down-regulated in Transcription
  misc_feature: MA Experiment 108573 PARAMETER Experiment Name: At_Drought_cDNA_P Parameter: Timepoint (hr) Value: 6
  misc_feature: MA Experiment 108573 PARAMETER Experiment Name: At_Drought_cDNA_P Parameter: Tissue Value: Aerial
  misc_feature: MA Experiment 108573 PARAMETER Experiment Name: At_Drought_cDNA_P Parameter: Treatment Value: Drought vs. No Drought
  misc_feature: MA Experiment ID: 108595 Result: Up-regulated in Transcription
  misc_feature: MA Experiment 108595 PARAMETER Experiment Name: At_Ler-pi_Ovule_cDNA_P Parameter: Plant Line Value: null
  misc_feature: MA Experiment ID: 20000111 Result: Down-regulated in Transcription
  misc_feature: MA Experiment 20000111 PARAMETER Experiment Name: At_42deg_Heat_cDNA_P Parameter: Temperature (deg C) Value: 42 vs. 22
  misc_feature: MA Experiment 20000111 PARAMETER Experiment Name: At_42deg_Heat_cDNA_P Parameter: Timepoint (hr) Value: 6
  misc_feature: MA Experiment 20000111 PARAMETER Experiment Name: At_42deg_Heat_cDNA_P Parameter: Tissue Value: Aerial
  misc_feature: MA Experiment ID: 20000112 Result: Down-regulated in Transcription
  misc_feature: MA Experiment 20000112 PARAMETER Experiment Name: At_42deg_Heat_cDNA_P Parameter: Temperature (deg C) Value: 42 vs. 22
  misc_feature: MA Experiment 20000112 PARAMETER Experiment Name: At_42deg_Heat_cDNA_P Parameter: Timepoint (hr) Value: 2
  misc_feature: MA Experiment 20000112 PARAMETER Experiment Name: At_42deg_Heat_cDNA_P Parameter: Tissue Value: Aerial
  misc_feature: MA Experiment ID: 20000113 Result: Down-regulated in Transcription
  misc_feature: MA Experiment 20000113 PARAMETER Experiment Name: At_42deg_Heat_cDNA_P Parameter: Temperature (deg C) Value: 42 vs. 22
  misc_feature: MA Experiment 20000113 PARAMETER Experiment Name: At_42deg_Heat_cDNA_P Parameter: Timepoint (hr) Value: 8
  misc_feature: MA Experiment 20000113 PARAMETER Experiment Name: At_42deg_Heat_cDNA_P Parameter: Tissue Value: Aerial
  misc_feature: MA Experiment ID: 20000117 Result: Down-regulated in Transcription
  misc_feature: MA Experiment 20000117 PARAMETER Experiment Name: At_100uM_ABA_Mutants_cDNA_P Parameter: Plant Line Value: Columbia
  misc_feature: MA Experiment 20000117 PARAMETER Experiment Name: At_100uM_ABA_Mutants_cDNA_P Parameter: Timepoint (hr) Value: 6
  misc_feature: MA Experiment 20000117 PARAMETER Experiment Name: At_100uM_ABA_Mutants_cDNA_P Parameter: Tissue Value: Aerial
  misc_feature: MA Experiment 20000117 PARAMETER Experiment Name: At_100uM_ABA_Mutants_cDNA_P Parameter: Treatment Value: 100uM ABA vs. No Treatment
  misc_feature: MA Experiment ID: 20000144 Result: Down-regulated in Transcription
  misc_feature: MA Experiment 20000144 PARAMETER Experiment Name: At_42deg_Heat_cDNA_P Parameter: Temperature (deg C) Value: 42 vs. 22
  misc_feature: MA Experiment 20000144 PARAMETER Experiment Name: At_42deg_Heat_cDNA_P Parameter: Timepoint (hr) Value: 1
  misc_feature: MA Experiment 20000144 PARAMETER Experiment Name: At_42deg_Heat_cDNA_P Parameter: Tissue Value: Aerial
  misc_feature: MA Experiment ID: 20000224 Result: Up-regulated in Transcription
  misc_feature: MA Experiment ID: 20000306 Result: Up-regulated in Transcription
  misc_feature: MA Experiment 20000306 PARAMETER Experiment Name: At_Germinating_Seeds_Sub_P Parameter: Age (hr) Value: 6 vs. 0
  misc_feature: MA Experiment 20000306 PARAMETER Experiment Name: At_Germinating_Seeds_Sub_P Parameter: Organism Value: A. thaliana
  misc_feature: MA Experiment 20000306 PARAMETER Experiment Name: At_Germinating_Seeds_Sub_P Parameter: Plant Line Value: WS
  misc_feature: MA Experiment 20000306 PARAMETER Experiment Name: At_Germinating_Seeds_Sub_P Parameter: Tissue Value: Germinating Seeds
  misc_feature: MA Experiment ID: 20000307 Result: Up-regulated in Transcription
  misc_feature: MA Experiment 20000307 PARAMETER Experiment Name: At_Germinating_Seeds_Sub_P Parameter: Age (hr) Value: 24 vs. 0
  misc_feature: MA Experiment 20000307 PARAMETER Experiment Name: At_Germinating_Seeds_Sub_P Parameter: Organism Value: A. thaliana
  misc_feature: MA Experiment 20000307 PARAMETER Experiment Name: At_Germinating_Seeds_Sub_P Parameter: Plant Line Value: WS
  misc_feature: MA Experiment 20000307 PARAMETER Experiment Name: At_Germinating_Seeds_Sub_P Parameter: Tissue Value: Germinating Seeds
  misc_feature: MA Experiment ID: 20000328 Result: Down-regulated in Transcription
  misc_feature: MA Experiment 20000328 PARAMETER Experiment Name: At_42deg_Heat_Sub_P Parameter: Age (day) Value: 14
  misc_feature: MA Experiment 20000328 PARAMETER Experiment Name: At_42deg_Heat_Sub_P Parameter: Organism Value: A. thaliana
  misc_feature: MA Experiment 20000328 PARAMETER Experiment Name: At_42deg_Heat_Sub_P Parameter: Plant Line Value: WS
  misc_feature: MA Experiment 20000328 PARAMETER Experiment Name: At_42deg_Heat_Sub_P Parameter: Temperature (deg C) Value: 42 vs. 22
  misc_feature: MA Experiment 20000328 PARAMETER Experiment Name: At_42deg_Heat_Sub_P Parameter: Timepoint (hr) Value: 6
  misc_feature: MA Experiment 20000328 PARAMETER Experiment Name: At_42deg_Heat_Sub_P Parameter: Tissue Value: Aerial

SEQ ID NO: 33964 - protein, 136 aa, Arabidopsis thaliana; identical to SEQ ID NO: 8709
  peptide (1)..(136): Ceres Seq. ID no. 12369951
  misc_feature (17)..(135): Pfam Name: Core histone H2A/H2B/H3/H4 Pfam Description: Core histone H2A/H2B/H3/H4
  misc_feature (1)..(136): Homolog of NCBI NO: 37546835 NR Description: similar to histone protein Hist2h3c1 [Homo
  misc_feature (1)..(136): Homolog of NCBI NO: 7305139 NR Description: histone 1, H3f; histone gene complex 1 [Mus
  misc_feature (1)..(136): Homolog of NCBI NO: 34876364 NR Description: similar to CG31613-PA [Rattus norvegicus]
  misc_feature (1)..(136): Homolog of NCBI NO: 122070 NR Description: Histone H3
  misc_feature (2)..(136): Homolog of NCBI NO: 122083 NR Description: Histone H3
  misc_feature (2)..(136): Homolog of NCBI NO: 70753 NR Description: histone H3 - garden pea (tentative sequence)
  misc_feature (1)..(136): Homolog of NCBI NO: 166384 NR Description: histone H3 (H3-1.1)
  misc_feature (1)..(136): Homolog of NCBI NO: 1362108 NR Description: histone H3 homolog - common tobacco
  misc_feature (1)..(136): Homolog of NCBI NO: 122087 NR Description: Histone H3
  misc_feature (1)..(136): Homolog of NCBI NO: 15232146 NR Description: histone H3, putative

SEQ ID NO: 33965 - DNA, 1071 bp, Arabidopsis thaliana; identical to SEQ ID NO: 30375
  misc_feature (1)..(1071): Ceres Seq. ID no. 12385474
  misc_feature: MA Experiment ID: 108464 Result: Up-regulated in Transcription
  misc_feature: MA Experiment 108464 PARAMETER Experiment Name: At_Germinating_Seeds_cDNA_P Parameter: Age (day) Value: 4 vs. 0
  misc_feature: MA Experiment 108464 PARAMETER Experiment Name: At_Germinating_Seeds_cDNA_P Parameter: Tissue Value: Germinating Seeds
  misc_feature: MA Experiment ID: 108488 Result: Down-regulated in Transcription
  misc_feature: MA Experiment ID: 108572 Result: Up-regulated in Transcription
  misc_feature: MA Experiment 108572 PARAMETER Experiment Name: At_Drought_cDNA_P Parameter: Timepoint (hr) Value: 1
  misc_feature: MA Experiment 108572 PARAMETER Experiment Name: At_Drought_cDNA_P Parameter: Tissue Value: Aerial
  misc_feature: MA Experiment 108572 PARAMETER Experiment Name: At_Drought_cDNA_P Parameter: Treatment Value: Drought vs. No Drought
  misc_feature: MA Experiment ID: 108577 Result: Up-regulated in Transcription
  misc_feature: MA Experiment 108577 PARAMETER Experiment Name: At_42deg_Heat_cDNA_P Parameter: Temperature (deg C) Value: 42 vs. 22
  misc_feature: MA Experiment 108577 PARAMETER Experiment Name: At_42deg_Heat_cDNA_P Parameter: Timepoint (hr) Value: 6
  misc_feature: MA Experiment 108577 PARAMETER Experiment Name: At_42deg_Heat_cDNA_P Parameter: Tissue Value: Aerial
  misc_feature: MA Experiment ID: 108608 Result: Up-regulated in Transcription
  misc_feature: MA Experiment 108608 PARAMETER Experiment Name: At_100uM_ABA_cDNA_P Parameter: Timepoint (hr) Value: 1
  misc_feature: MA Experiment 108608 PARAMETER Experiment Name: At_100uM_ABA_cDNA_P Parameter: Tissue Value: Aerial
  misc_feature: MA Experiment 108608 PARAMETER Experiment Name: At_100uM_ABA_cDNA_P Parameter: Treatment Value: 100uM ABA vs. No Treatment
  misc_feature: MA Experiment ID: 20000166 Result: Up-regulated in Transcription
  misc_feature: MA Experiment 20000166 PARAMETER Experiment Name: At_100uM_ABA_P Parameter: Age (day) Value: 14
  misc_feature: MA Experiment 20000166 PARAMETER Experiment Name: At_100uM_ABA_P Parameter: Organism Value: A. thaliana
  misc_feature: MA Experiment 20000166 PARAMETER Experiment Name: At_100uM_ABA_P Parameter: Plant Line Value: WS
  misc_feature: MA Experiment 20000166 PARAMETER Experiment Name: At_100uM_ABA_P Parameter: Timepoint (hr) Value: 1
  misc_feature: MA Experiment 20000166 PARAMETER Experiment Name: At_100uM_ABA_P Parameter: Tissue Value: Aerial
  misc_feature: MA Experiment 20000166 PARAMETER Experiment Name: At_100uM_ABA_P Parameter: Treatment Value: 100uM ABA vs. No Treatment
  misc_feature: MA Experiment ID: 20000173 Result: Up-regulated in Transcription
  misc_feature: MA Experiment 20000173 PARAMETER Experiment Name: At_42deg_Heat_P Parameter: Age (day) Value: 14
  misc_feature: MA Experiment 20000173 PARAMETER Experiment Name: At_42deg_Heat_P Parameter: Organism Value: A. thaliana
  misc_feature: MA Experiment 20000173 PARAMETER Experiment Name: At_42deg_Heat_P Parameter: Plant Line Value: WS
  misc_feature: MA Experiment 20000173 PARAMETER Experiment Name: At_42deg_Heat_P Parameter: Temperature (deg C) Value: 42 vs. 22
  misc_feature: MA Experiment 20000173 PARAMETER Experiment Name: At_42deg_Heat_P Parameter: Timepoint (hr) Value: 6
  misc_feature: MA Experiment 20000173 PARAMETER Experiment Name: At_42deg_Heat_P Parameter: Tissue Value: Aerial
  misc_feature: MA Experiment ID: 20000184 Result: Down-regulated in Transcription
  misc_feature: MA Experiment 20000184 PARAMETER Experiment Name: At_Shoots__P Parameter: Age (day) Value: 7
  misc_feature: MA Experiment 20000184 PARAMETER Experiment Name: At_Shoots__P Parameter: Tissue Value: Shoots vs. Whole Plant
  misc_feature: MA Experiment ID: 20000234 Result: Down-regulated in Transcription
  misc_feature: MA Experiment 20000234 PARAMETER Experiment Name: At_Siliques_P Parameter: Age (day) Value: 21
  misc_feature: MA Experiment 20000234 PARAMETER Experiment Name: At_Siliques_P Parameter: Organism Value: A. thaliana
  misc_feature: MA Experiment 20000234 PARAMETER Experiment Name: At_Siliques_P Parameter: Plant Line Value: WS
  misc_feature: MA Experiment 20000234 PARAMETER Experiment Name: At_Siliques_P Parameter: Tissue Value: Less Than 5mm Siliques vs. Whole Plant
  misc_feature: MA Experiment ID: 20000437 Result: Up-regulated in Transcription
  misc_feature: MA Experiment 20000437 PARAMETER Experiment Name: At_Drought_P Parameter: Age (day) Value: 8
  misc_feature: MA Experiment 20000437 PARAMETER Experiment Name: At_Drought_P Parameter: Organism Value: A. thaliana
  misc_feature: MA Experiment 20000437 PARAMETER Experiment Name: At_Drought_P Parameter: Plant Line Value: WS
  misc_feature: MA Experiment 20000437 PARAMETER Experiment Name: At_Drought_P Parameter: Timepoint (hr) Value: 24
  misc_feature: MA Experiment 20000437 PARAMETER Experiment Name: At_Drought_P Parameter: Tissue Value: Whole Plant
  misc_feature: MA Experiment 20000437 PARAMETER Experiment Name: At_Drought_P Parameter: Treatment Value: Drought vs. No Drought
  misc_feature: MA Experiment ID: 20001557 Result: Down-regulated in Transcription
  misc_feature: MA Experiment 20001557 PARAMETER Experiment Name: At_Drought_Soil_Dry_P Parameter: Age (day) Value: 27
  misc_feature: MA Experiment 20001557 PARAMETER Experiment Name: At_Drought_Soil_Dry_P Parameter: Organism Value: A. thaliana
  misc_feature: MA Experiment 20001557 PARAMETER Experiment Name: At_Drought_Soil_Dry_P Parameter: Plant Line Value: WS
  misc_feature: MA Experiment 20001557 PARAMETER Experiment Name: At_Drought_Soil_Dry_P Parameter: Post Timepoint (hr) Value: 3
  misc_feature: MA Experiment 20001557 PARAMETER Experiment Name: At_Drought_Soil_Dry_P Parameter: Post-Treatment Value: Re-Water vs. No Drought
  misc_feature: MA Experiment 20001557 PARAMETER Experiment Name: At_Drought_Soil_Dry_P Parameter: Timepoint (day) Value: 13
  misc_feature: MA Experiment 20001557 PARAMETER Experiment Name: At_Drought_Soil_Dry_P Parameter: Treatment Value: Drought vs. No Drought
  misc_feature: MA Experiment ID: 20001558 Result: Down-regulated in Transcription
  misc_feature: MA Experiment 20001558 PARAMETER Experiment Name: At_Drought_Soil_Dry_P Parameter: Age (day) Value: 27
  misc_feature: MA Experiment 20001558 PARAMETER Experiment Name: At_Drought_Soil_Dry_P Parameter: Organism Value: A. thaliana
  misc_feature: MA Experiment 20001558 PARAMETER Experiment Name: At_Drought_Soil_Dry_P Parameter: Plant Line Value: WS
  misc_feature: MA Experiment 20001558 PARAMETER Experiment Name: At_Drought_Soil_Dry_P Parameter: Post Timepoint (hr) Value: 6
  misc_feature: MA Experiment 20001558 PARAMETER Experiment Name: At_Drought_Soil_Dry_P Parameter: Post-Treatment Value: Re-Water vs. No Drought
  misc_feature: MA Experiment 20001558 PARAMETER Experiment Name: At_Drought_Soil_Dry_P Parameter: Timepoint (day) Value: 13
  misc_feature: MA Experiment 20001558 PARAMETER Experiment Name: At_Drought_Soil_Dry_P Parameter: Treatment Value: Drought vs. No Drought
  misc_feature: MA Experiment ID: 20001560 Result: Down-regulated in Transcription
  misc_feature: MA Experiment 20001560 PARAMETER Experiment Name: At_Drought_Soil_Dry_P Parameter: Age (day) Value: 28
  misc_feature: MA Experiment 20001560 PARAMETER Experiment Name: At_Drought_Soil_Dry_P Parameter: Organism Value: A. thaliana
  misc_feature: MA Experiment 20001560 PARAMETER Experiment Name: At_Drought_Soil_Dry_P Parameter: Plant Line Value: WS
  misc_feature: MA Experiment 20001560 PARAMETER Experiment Name: At_Drought_Soil_Dry_P Parameter: Post Timepoint (hr) Value: None
  misc_feature: MA Experiment 20001560 PARAMETER Experiment Name: At_Drought_Soil_Dry_P Parameter: Post-Treatment Value: None
  misc_feature: MA Experiment 20001560 PARAMETER Experiment Name: At_Drought_Soil_Dry_P Parameter: Timepoint (day) Value: 14
  misc_feature: MA Experiment 20001560 PARAMETER Experiment Name: At_Drought_Soil_Dry_P Parameter: Treatment Value: Drought vs. No Drought

SEQ ID NO: 33966 - protein, 187 aa, Arabidopsis thaliana; identical to SEQ ID NO: 26831
  peptide (1)..(187): Ceres Seq. ID no. 12385475
  misc_feature (32)..(171): Pfam Name: Pathogenesis-related protein Bet v I family Pfam Description: Pathogenesis-related protein Bet v I family
  misc_feature (25)..(183): Homolog of NCBI NO: 18404709 NR Description: expressed protein
  misc_feature (19)..(185): Homolog of NCBI NO: 7486961 NR Description: hypothetical protein T13J8.30 - Arabidopsis
  misc_feature (19)..(185): Homolog of NCBI NO: 30687786 NR Description: expressed protein [Arabidopsis thaliana]
  misc_feature (19)..(187): Homolog of NCBI NO: 15238661 NR Description: putative protein; protein id: At5g53160.1
  misc_feature (49)..(186): Homolog of NCBI NO: 7486358 NR Description: hypothetical protein F3I3.40 - Arabidopsis
  misc_feature (1)..(186): Homolog of NCBI NO: 21593105 NR Description: unknown [Arabidopsis thaliana]
  misc_feature (1)..(186): Homolog of NCBI NO: 18411513 NR Description: Expressed protein
  misc_feature (2)..(187): Homolog of NCBI NO: 25348264 NR Description: hypothetical protein F6F3.16 - Arabidopsis
  misc_feature (1)..(187): Homolog of NCBI NO: 18378830 NR Description: expressed protein
  misc_feature (2)..(187): Homolog of NCBI NO: 21593547 NR Description: unknown [Arabidopsis thaliana]

SEQ ID NO: 33967 - protein, 186 aa, Arabidopsis thaliana; identical to SEQ ID NO: 26832
  peptide (1)..(186): Ceres Seq. ID no. 12385476
  misc_feature (31)..(170): Pfam Name: Pathogenesis-related protein Bet v I family Pfam Description: Pathogenesis-related protein Bet v I family
  misc_feature (24)..(182): Homolog of NCBI NO: 18404709 NR Description: expressed protein
  misc_feature (18)..(184): Homolog of NCBI NO: 7486961 NR Description: hypothetical protein T13J8.30 - Arabidopsis
  misc_feature (18)..(184): Homolog of NCBI NO: 30687786 NR Description: expressed protein [Arabidopsis thaliana]
  misc_feature (18)..(186): Homolog of NCBI NO: 15238661 NR Description: putative protein; protein id: At5g53160.1
  misc_feature (48)..(185): Homolog of NCBI NO: 7486358 NR Description: hypothetical protein F3I3.40 - Arabidopsis
  misc_feature (1)..(185): Homolog of NCBI NO: 21593105 NR Description: unknown [Arabidopsis thaliana]
  misc_feature (1)..(185): Homolog of NCBI NO: 18411513 NR Description: Expressed protein
  misc_feature (1)..(186): Homolog of NCBI NO: 25348264 NR Description: hypothetical protein F6F3.16 - Arabidopsis
  misc_feature (1)..(186): Homolog of NCBI NO: 18378830 NR Description: expressed protein
  misc_feature (1)..(186): Homolog of NCBI NO: 21593547 NR Description: unknown [Arabidopsis thaliana]

SEQ ID NO: 33968 - protein, 177 aa, Arabidopsis thaliana; identical to SEQ ID NO: 26833
  peptide (1)..(177): Ceres Seq. ID no. 12385477
  misc_feature (22)..(161): Pfam Name: Pathogenesis-related protein Bet v I family Pfam Description: Pathogenesis-related protein Bet v I family
  misc_feature (15)..(173): Homolog of NCBI NO: 18404709 NR Description: expressed protein
  misc_feature (9)..(175): Homolog of NCBI NO: 7486961 NR Description: hypothetical protein T13J8.30 - Arabidopsis
  misc_feature (9)..(175): Homolog of NCBI NO: 30687786 NR Description: expressed protein [Arabidopsis thaliana]
  misc_feature (9)..(177): Homolog of NCBI NO: 15238661 NR Description: putative protein; protein id: At5g53160.1
  misc_feature (39)..(176): Homolog of NCBI NO: 7486358 NR Description: hypothetical protein F3I3.40 - Arabidopsis
  misc_feature (1)..(176): Homolog of NCBI NO: 21593105 NR Description: unknown [Arabidopsis thaliana]
  misc_feature (1)..(176): Homolog of NCBI NO: 18411513 NR Description: Expressed protein
  misc_feature (1)..(177): Homolog of NCBI NO: 25348264 NR Description: hypothetical protein F6F3.16 - Arabidopsis
  misc_feature (1)..(177): Homolog of NCBI NO: 18378830 NR Description: expressed protein
  misc_feature (1)..(177): Homolog of NCBI NO: 21593547 NR Description: unknown [Arabidopsis thaliana]

SEQ ID NO: 33969 - DNA, 1266 bp, Arabidopsis thaliana; identical to SEQ ID NO: 30379
  misc_feature (1)..(1266): Ceres Seq. ID no. 12357583
  misc_feature: MA Experiment ID: 108461 Result: Down-regulated in Transcription
  misc_feature: MA Experiment 108461 PARAMETER Experiment Name: At_Germinating_Seeds_cDNA_P Parameter: Age (day) Value: 1 vs. 0
  misc_feature: MA Experiment 108461 PARAMETER Experiment Name: At_Germinating_Seeds_cDNA_P Parameter: Tissue Value: Germinating Seeds
  misc_feature: MA Experiment ID: 108462 Result: Down-regulated in Transcription
  misc_feature: MA Experiment 108462 PARAMETER Experiment Name: At_Germinating_Seeds_cDNA_P Parameter: Age (day) Value: 2 vs. 0
  misc_feature: MA Experiment 108462 PARAMETER Experiment Name: At_Germinating_Seeds_cDNA_P Parameter: Tissue Value: Germinating Seeds
  misc_feature: MA Experiment ID: 108463 Result: Down-regulated in Transcription
  misc_feature: MA Experiment 108463 PARAMETER Experiment Name: At_Germinating_Seeds_cDNA_P Parameter: Age (day) Value: 3 vs. 0
  misc_feature: MA Experiment 108463 PARAMETER Experiment Name: At_Germinating_Seeds_cDNA_P Parameter: Tissue Value: Germinating Seeds
  misc_feature: MA Experiment ID: 108464 Result: Down-regulated in Transcription
  misc_feature: MA Experiment 108464 PARAMETER Experiment Name: At_Germinating_Seeds_cDNA_P Parameter: Age (day) Value: 4 vs. 0
  misc_feature: MA Experiment 108464 PARAMETER Experiment Name: At_Germinating_Seeds_cDNA_P Parameter: Tissue Value: Germinating Seeds
  misc_feature: MA Experiment ID: 20000224 Result: Down-regulated in Transcription
  misc_feature: MA Experiment ID: 20001557 Result: Up-regulated in Transcription
  misc_feature: MA Experiment 20001557 PARAMETER Experiment Name: At_Drought_Soil_Dry_P Parameter: Age (day) Value: 27
  misc_feature: MA Experiment 20001557 PARAMETER Experiment Name: At_Drought_Soil_Dry_P Parameter: Organism Value: A. thaliana
  misc_feature: MA Experiment 20001557 PARAMETER Experiment Name: At_Drought_Soil_Dry_P Parameter: Plant Line Value: WS
  misc_feature: MA Experiment 20001557 PARAMETER Experiment Name: At_Drought_Soil_Dry_P Parameter: Post Timepoint (hr) Value: 3
  misc_feature: MA Experiment 20001557 PARAMETER Experiment Name: At_Drought_Soil_Dry_P Parameter: Post-Treatment Value: Re-Water vs. No Drought
  misc_feature: MA Experiment 20001557 PARAMETER Experiment Name: At_Drought_Soil_Dry_P Parameter: Timepoint (day) Value: 13
  misc_feature: MA Experiment 20001557 PARAMETER Experiment Name: At_Drought_Soil_Dry_P Parameter: Treatment Value: Drought vs. No Drought
  misc_feature: Phenotype: ROSETTE LEAVES Shape-Oval
  misc_feature: Phenotype: WHOLE PLANT Size-Small
  misc_feature: Phenotype: INFLORESCENCE Flowering Time-Late Flowering
  misc_feature: Phenotype: ROSETTE LEAVES Shape-Oval
  misc_feature: Phenotype: WHOLE PLANT Size-Small
  misc_feature: Phenotype: INFLORESCENCE Flowering Time-Late Flowering
  misc_feature: Phenotype: ROSETTE LEAVES Shape-Oval
  misc_feature: Phenotype: WHOLE PLANT Color-Dark Green
  misc_feature: Phenotype: ROSETTE LEAVES Shape-Oval
  misc_feature: Phenotype: WHOLE PLANT Color-Dark Green

SEQ ID NO: 33970 - protein, 309 aa, Arabidopsis thaliana; identical to SEQ ID NO: 30380
  peptide (1)..(309): Ceres Seq. ID no. 12357584
  misc_feature (178)..(228): Pfam Name: KH domain Pfam Description: KH domain
  misc_feature (257)..(307): Homolog of NCBI NO: 18398397 NR Description: putative MYB family transcription factor
  misc_feature (257)..(307): Homolog of NCBI NO: 15912259 NR Description: At1g32359/F27G20.10 [Arabidopsis thaliana]
  misc_feature (94)..(170): Homolog of NCBI NO: 18398397 NR Description: putative MYB family transcription factor
  misc_feature (94)..(170): Homolog of NCBI NO: 15912259 NR Description: At1g32359/F27G20.10 [Arabidopsis thaliana]
  misc_feature (65)..(140): Homolog of NCBI NO: 5441893 NR Description: ESTs C99174(E10437),D22295(C10709) correspond to region of the predicted gene.~Similar to Arabidopsis thaliana BAC
  misc_feature (99)..(306): Homolog of NCBI NO: 5441893 NR Description: ESTs C99174(E10437),D22295(C10709) correspond to region of the predicted gene.~Similar to Arabidopsis thaliana BAC
  misc_feature (62)..(308): Homolog of NCBI NO: 21555233 NR Description: unknown [Arabidopsis thaliana]
  misc_feature (62)..(308): Homolog of NCBI NO: 15240145 NR Description: KH domain/zinc finger protein
  misc_feature (84)..(309): Homolog of NCBI NO: 9294110 NR Description: contains similarity to unknown
  misc_feature (62)..(309): Homolog of NCBI NO: 18399496 NR Description: KH domain/zinc finger protein; protein id:

SEQ ID NO: 33971 - protein, 248 aa, Arabidopsis thaliana; identical to SEQ ID NO: 30381
  peptide (1)..(248): Ceres Seq. ID no. 12357585
  misc_feature (117)..(167): Pfam Name: KH domain Pfam Description: KH domain
  misc_feature (196)..(246): Homolog of NCBI NO: 18398397 NR Description: putative MYB family transcription factor
  misc_feature (196)..(246): Homolog of NCBI NO: 15912259 NR Description: At1g32359/F27G20.10 [Arabidopsis thaliana]
  misc_feature (33)..(109): Homolog of NCBI NO: 18398397 NR Description: putative MYB family transcription factor
  misc_feature (33)..(109): Homolog of NCBI NO: 15912259 NR Description: At1g32359/F27G20.10 [Arabidopsis thaliana]
  misc_feature (4)..(79): Homolog of NCBI NO: 5441893 NR Description: ESTs C99174(E10437),D22295(C10709) correspond to region of the predicted gene.~Similar to Arabidopsis thaliana BAC
  misc_feature (38)..(245): Homolog of NCBI NO: 5441893 NR Description: ESTs C99174(E10437),D22295(C10709) correspond to region of the predicted gene.~Similar to Arabidopsis thaliana BAC
  misc_feature (1)..(247): Homolog of NCBI NO: 21555233 NR Description: unknown [Arabidopsis thaliana]
  misc_feature (1)..(247): Homolog of NCBI NO: 15240145 NR Description: KH domain/zinc finger protein
  misc_feature (23)..(248): Homolog of NCBI NO: 9294110 NR Description: contains similarity to unknown
  misc_feature (1)..(248): Homolog of NCBI NO: 18399496 NR Description: KH domain/zinc finger protein; protein id:

SEQ ID NO: 33972 - protein, 221 aa, Arabidopsis thaliana; identical to SEQ ID NO: 30382
  peptide (1)..(221): Ceres Seq. ID no. 12357586
  misc_feature (90)..(140): Pfam Name: KH domain Pfam Description: KH domain
  misc_feature (169)..(219): Homolog of NCBI NO: 18398397 NR Description: putative MYB family transcription factor
  misc_feature (169)..(219): Homolog of NCBI NO: 15912259 NR Description: At1g32359/F27G20.10 [Arabidopsis thaliana]
  misc_feature (6)..(82): Homolog of NCBI NO: 18398397 NR Description: putative MYB family transcription factor
  misc_feature (6)..(82): Homolog of NCBI NO: 15912259 NR Description: At1g32359/F27G20.10 [Arabidopsis thaliana]
  misc_feature (1)..(52): Homolog of NCBI NO: 5441893 NR Description: ESTs C99174(E10437),D22295(C10709) correspond to region of the predicted gene.~Similar to Arabidopsis thaliana BAC
  misc_feature (11)..(218): Homolog of NCBI NO: 5441893 NR Description: ESTs C99174(E10437),D22295(C10709) correspond to region of the predicted gene.~Similar to Arabidopsis thaliana BAC
  misc_feature (1)..(220): Homolog of NCBI NO: 21555233 NR Description: unknown [Arabidopsis thaliana]
  misc_feature (1)..(220): Homolog of NCBI NO: 15240145 NR Description: KH domain/zinc finger protein
  misc_feature (1)..(221): Homolog of NCBI NO: 9294110 NR Description: contains similarity to unknown
  misc_feature (1)..(221): Homolog of NCBI NO: 18399496 NR Description: KH domain/zinc finger protein; protein id:

SEQ ID NO: 33973 - DNA, 764 bp, Arabidopsis thaliana; identical to SEQ ID NO: 30383
  misc_feature (1)..(764): Ceres Seq. ID no. 12385516
  misc_feature: MA Experiment ID: 108434 Result: Up-regulated in Transcription
  misc_feature: MA Experiment 108434 PARAMETER Experiment Name: At_Root_Tips_cDNA_P Parameter: Tissue Value: Root Tips

SEQ ID NO: 33974 - protein, 194 aa, Arabidopsis thaliana; identical to SEQ ID NO: 30384
  peptide (1)..(194): Ceres Seq. ID no. 12385517
  misc_feature (23)..(194): Homolog of NCBI NO: 29124975 NR Description: cyclophilin [Populus tremuloides]
  misc_feature (23)..(194): Homolog of NCBI NO: 1076510 NR Description: peptidylprolyl isomerase (EC 5.2.1.8) Cyp -
  misc_feature (23)..(193): Homolog of NCBI NO: 11270318 NR Description: peptidylprolyl isomerase (EC 5.2.1.8) CYP18
  misc_feature (23)..(194): Homolog of NCBI NO: 18146786 NR Description: CYP1 [Vigna radiata]
  misc_feature (24)..(194): Homolog of NCBI NO: 21886603 NR Description: peptidylprolyl isomerase (cyclophilin) [Betula
  misc_feature (23)..(193): Homolog of NCBI NO: 11270322 NR Description: peptidylprolyl isomerase (EC 5.2.1.8)
  misc_feature (24)..(194): Homolog of NCBI NO: 18076088 NR Description: cyclophilin [Ricinus communis]
  misc_feature (23)..(193): Homolog of NCBI NO: 11270316 NR Description: peptidylprolyl isomerase (EC 5.2.1.8)
  misc_feature (23)..(194): Homolog of NCBI NO: 3334157 NR Description: Peptidyl-prolyl cis-trans isomerase (PPIase)
  misc_feature (23)..(194): Homolog of NCBI NO: 15236211 NR Description: peptidylprolyl isomerase (cyclophilin)

SEQ ID NO: 33975 - protein, 172 aa, Arabidopsis thaliana; identical to SEQ ID NO: 25632
  peptide (1)..(172): Ceres Seq. ID no. 12385518
  misc_feature (1)..(172): Homolog of NCBI NO: 29124975 NR Description: cyclophilin [Populus tremuloides]
  misc_feature (1)..(172): Homolog of NCBI NO: 1076510 NR Description: peptidylprolyl isomerase (EC 5.2.1.8) Cyp -
  misc_feature (1)..(171): Homolog of NCBI NO: 11270318 NR Description: peptidylprolyl isomerase (EC 5.2.1.8) CYP18
  misc_feature (1)..(172): Homolog of NCBI NO: 18146786 NR Description: CYP1 [Vigna radiata]
  misc_feature (2)..(172): Homolog of NCBI NO: 21886603 NR Description: peptidylprolyl isomerase (cyclophilin) [Betula
  misc_feature (1)..(171): Homolog of NCBI NO: 11270322 NR Description: peptidylprolyl isomerase (EC 5.2.1.8)
  misc_feature (2)..(172): Homolog of NCBI NO: 18076088 NR Description: cyclophilin [Ricinus communis]
  misc_feature (1)..(171): Homolog of NCBI NO: 11270316 NR Description: peptidylprolyl isomerase (EC 5.2.1.8)
  misc_feature (1)..(172): Homolog of NCBI NO: 3334157 NR Description: Peptidyl-prolyl cis-trans isomerase (PPIase)
  misc_feature (1)..(172): Homolog of NCBI NO: 15236211 NR Description: peptidylprolyl isomerase (cyclophilin)

SEQ ID NO: 33976 - protein, 163 aa, Arabidopsis thaliana; identical to SEQ ID NO: 25633
  peptide (1)..(163): Ceres Seq. ID no. 12385519
  misc_feature (1)..(163): Homolog of NCBI NO: 29124975 NR Description: cyclophilin [Populus tremuloides]
  misc_feature (1)..(163): Homolog of NCBI NO: 1076510 NR Description: peptidylprolyl isomerase (EC 5.2.1.8) Cyp -
  misc_feature (1)..(162): Homolog of NCBI NO: 11270318 NR Description: peptidylprolyl isomerase (EC 5.2.1.8) CYP18
  misc_feature (1)..(163): Homolog of NCBI NO: 18146786 NR Description: CYP1 [Vigna radiata]
  misc_feature (1)..(163): Homolog of NCBI NO: 21886603 NR Description: peptidylprolyl isomerase (cyclophilin) [Betula
  misc_feature (1)..(162): Homolog of NCBI NO: 11270322 NR Description: peptidylprolyl isomerase (EC 5.2.1.8)
  misc_feature (1)..(163): Homolog of NCBI NO: 18076088 NR Description: cyclophilin [Ricinus communis]
  misc_feature (1)..(162): Homolog of NCBI NO: 11270316 NR Description: peptidylprolyl isomerase (EC 5.2.1.8)
  misc_feature (1)..(163): Homolog of NCBI NO: 3334157 NR Description: Peptidyl-prolyl cis-trans isomerase (PPIase)
  misc_feature (1)..(163): Homolog of NCBI NO: 15236211 NR Description: peptidylprolyl isomerase (cyclophilin)

SEQ ID NO: 33977 - DNA, 1281 bp, Arabidopsis thaliana; identical to SEQ ID NO: 30387
  misc_feature (1)..(1281): Ceres Seq. ID no. 12321331
  misc_feature: MA Experiment ID: 108462 Result: Up-regulated in Transcription
  misc_feature: MA Experiment 108462 PARAMETER Experiment Name: At_Germinating_Seeds_cDNA_P Parameter: Age (day) Value: 2 vs. 0
  misc_feature: MA Experiment 108462 PARAMETER Experiment Name: At_Germinating_Seeds_cDNA_P Parameter: Tissue Value: Germinating Seeds
  misc_feature: MA Experiment ID: 108463 Result: Up-regulated in Transcription
  misc_feature: MA Experiment 108463 PARAMETER Experiment Name: At_Germinating_Seeds_cDNA_P Parameter: Age (day) Value: 3 vs. 0
  misc_feature: MA Experiment 108463 PARAMETER Experiment Name: At_Germinating_Seeds_cDNA_P Parameter: Tissue Value: Germinating Seeds
  misc_feature: MA Experiment ID: 108469 Result: Up-regulated in Transcription
  misc_feature: MA Experiment ID: 108569 Result: Up-regulated in Transcription
  misc_feature: MA Experiment 108569 PARAMETER Experiment Name: At_0.001%_MeJA__cDNA_P Parameter: Timepoint (hr) Value: 6
  misc_feature: MA Experiment 108569 PARAMETER Experiment Name: At_0.001%_MeJA__cDNA_P Parameter: Tissue Value: Aerial
  misc_feature: MA Experiment 108569 PARAMETER Experiment Name: At_0.001%_MeJA__cDNA_P Parameter: Treatment Value: 0.001% MeJA vs. No Treatment
  misc_feature: MA Experiment ID: 108573 Result: Up-regulated in Transcription
  misc_feature: MA Experiment 108573 PARAMETER Experiment Name: At_Drought_cDNA_P Parameter: Timepoint (hr) Value: 6
  misc_feature: MA Experiment 108573 PARAMETER Experiment Name: At_Drought_cDNA_P Parameter: Tissue Value: Aerial
  misc_feature: MA Experiment 108573 PARAMETER Experiment Name: At_Drought_cDNA_P Parameter: Treatment Value: Drought vs. No Drought
  misc_feature: MA Experiment ID: 108585 Result: Up-regulated in Transcription
  misc_feature: MA Experiment 108585 PARAMETER Experiment Name: At_5mM_NaNP_cDNA_P Parameter: Timepoint (hr) Value: 6
  misc_feature: MA Experiment 108585 PARAMETER Experiment Name: At_5mM_NaNP_cDNA_P Parameter: Tissue Value: Aerial
  misc_feature: MA Experiment 108585 PARAMETER Experiment Name: At_5mM_NaNP_cDNA_P Parameter: Treatment Value: null
  misc_feature: MA Experiment ID: 108668 Result: Up-regulated in Transcription
  misc_feature: MA Experiment 108668 PARAMETER Experiment Name: At_2mM_SA_cDNA_P Parameter: Plant Line Value: WS
  misc_feature: MA Experiment 108668 PARAMETER Experiment Name: At_2mM_SA_cDNA_P Parameter: Timepoint (hr) Value: 6
  misc_feature: MA Experiment 108668 PARAMETER Experiment Name: At_2mM_SA_cDNA_P Parameter: Treatment Value: 2mM SA vs. No Treatment
  misc_feature: MA Experiment ID: 20000113 Result: Down-regulated in Transcription
  misc_feature: MA Experiment 20000113 PARAMETER Experiment Name: At_42deg_Heat_cDNA_P Parameter: Temperature (deg C) Value: 42 vs. 22
  misc_feature: MA Experiment 20000113 PARAMETER Experiment Name: At_42deg_Heat_cDNA_P Parameter: Timepoint (hr) Value: 8
  misc_feature: MA Experiment 20000113 PARAMETER Experiment Name: At_42deg_Heat_cDNA_P Parameter: Tissue Value: Aerial
  misc_feature: MA Experiment ID: 20000182 Result: Up-regulated in Transcription
  misc_feature: MA Experiment 20000182 PARAMETER Experiment Name: At_2mM_SA_P Parameter: Age (day) Value: 14
  misc_feature: MA Experiment 20000182 PARAMETER Experiment Name: At_2mM_SA_P Parameter: Organism Value: A. thaliana
  misc_feature: MA Experiment 20000182 PARAMETER Experiment Name: At_2mM_SA_P Parameter: Plant Line Value: WS
  misc_feature: MA Experiment 20000182 PARAMETER Experiment Name: At_2mM_SA_P Parameter: Timepoint (hr) Value: 6
  misc_feature: MA Experiment 20000182 PARAMETER Experiment Name: At_2mM_SA_P Parameter: Tissue Value: Aerial
  misc_feature: MA Experiment 20000182 PARAMETER Experiment Name: At_2mM_SA_P Parameter: Treatment Value: 2mM SA vs. No Treatment
  misc_feature: MA Experiment ID: 20000185 Result: Up-regulated in Transcription
  misc_feature: MA Experiment 20000185 PARAMETER Experiment Name: At_Roots__P Parameter: Age (day) Value: 7 vs. 21
  misc_feature: MA Experiment 20000185 PARAMETER Experiment Name: At_Roots__P Parameter: Organism Value: A. thaliana
  misc_feature: MA Experiment 20000185 PARAMETER Experiment Name: At_Roots__P Parameter: Tissue Value: Roots vs. Whole Plant
  misc_feature: MA Experiment ID: 20000439 Result: Up-regulated in Transcription
  misc_feature: MA Experiment 20000439 PARAMETER Experiment Name: At_Roots__P Parameter: Age (day) Value: 14 vs. 21
  misc_feature: MA Experiment 20000439 PARAMETER Experiment Name: At_Roots__P Parameter: Organism Value: A. thaliana
  misc_feature: MA Experiment 20000439 PARAMETER Experiment Name: At_Roots__P Parameter: Tissue Value: Roots vs. Whole Plant
  misc_feature: MA Experiment ID: 20000527 Result: Down-regulated in Transcription
  misc_feature: MA Experiment 20000527 PARAMETER Experiment Name: At_10percent_PEG_P Parameter: Age (day) Value: 20
  misc_feature: MA Experiment 20000527 PARAMETER Experiment Name: At_10percent_PEG_P Parameter: Organism Value: A. thaliana
  misc_feature: MA Experiment 20000527 PARAMETER Experiment Name: At_10percent_PEG_P Parameter: Plant Line Value: WS
  misc_feature: MA Experiment 20000527 PARAMETER Experiment Name: At_10percent_PEG_P Parameter: Timepoint (day) Value: 20
  misc_feature: MA Experiment 20000527 PARAMETER Experiment Name: At_10percent_PEG_P Parameter: Tissue Value: Whole Plant
  misc_feature: MA Experiment 20000527 PARAMETER Experiment Name: At_10percent_PEG_P Parameter: Treatment Value: 10percent PEG vs. No Treatment

SEQ ID NO: 33978 - protein, 325 aa, Arabidopsis thaliana; identical to SEQ ID NO: 30388
  peptide (1)..(325): Ceres Seq. ID no. 12321332
  misc_feature (7)..(315): Pfam Name: pfkB family carbohydrate kinase Pfam Description: pfkB family carbohydrate kinase
  misc_feature (1)..(323): Homolog of NCBI NO: 585973 NR Description: FRUCTOKINASE
  misc_feature (3)..(324): Homolog of NCBI NO: 7434223 NR Description: fructokinase (EC 2.7.1.4) - beet
  misc_feature (1)..(323): Homolog of NCBI NO: 32765547 NR Description: fructokinase 2 [Lycopersicon hirsutum]
  misc_feature (1)..(323): Homolog of NCBI NO: 1915974 NR Description: fructokinase [Lycopersicon esculentum]
  misc_feature (2)..(323): Homolog of NCBI NO: 21592495 NR Description: fructokinase-like protein [Arabidopsis thaliana]
  misc_feature (2)..(323): Homolog of NCBI NO: 15231692 NR Description: fructokinase-like protein
  misc_feature (2)..(325): Homolog of NCBI NO: 15221364 NR Description: fructokinase, putative; protein id: At1g06020.1
  misc_feature (2)..(323): Homolog of NCBI NO: 15221365 NR Description: fructokinase, putative
  misc_feature (1)..(325): Homolog of NCBI NO: 14423528 NR Description: putative fructokinase [Arabidopsis thaliana]
  misc_feature (1)..(325): Homolog of NCBI NO: 15224669 NR Description: putative fructokinase

SEQ ID NO: 33979 - protein, 310 aa, Arabidopsis thaliana; identical to SEQ ID NO: 30389
  peptide (1)..(310): Ceres Seq. ID no. 12321333
  misc_feature (1)..(300): Pfam Name: pfkB family carbohydrate kinase Pfam Description: pfkB family carbohydrate kinase
  misc_feature (1)..(308): Homolog of NCBI NO: 585973 NR Description: FRUCTOKINASE
  misc_feature (1)..(309): Homolog of NCBI NO: 7434223 NR Description: fructokinase (EC 2.7.1.4) - beet
  misc_feature (1)..(308): Homolog of NCBI NO: 32765547 NR Description: fructokinase 2 [Lycopersicon hirsutum]
  misc_feature (1)..(308): Homolog of NCBI NO: 1915974 NR Description: fructokinase [Lycopersicon esculentum]
  misc_feature (1)..(308): Homolog of NCBI NO: 21592495 NR Description: fructokinase-like protein [Arabidopsis thaliana]
  misc_feature (1)..(308): Homolog of NCBI NO: 15231692 NR Description: fructokinase-like protein
  misc_feature (1)..(310): Homolog of NCBI NO: 15221364 NR Description: fructokinase, putative; protein id: At1g06020.1
  misc_feature (1)..(308): Homolog of NCBI NO: 15221365 NR Description: fructokinase, putative
  misc_feature (1)..(310): Homolog of NCBI NO: 14423528 NR Description: putative fructokinase [Arabidopsis thaliana]
  misc_feature (1)..(310): Homolog of NCBI NO: 15224669 NR Description: putative fructokinase

SEQ ID NO: 33980 - protein, 255 aa, Arabidopsis thaliana; identical to SEQ ID NO: 30390
  peptide (1)..(255): Ceres Seq. ID no. 12321334
  misc_feature (1)..(245): Pfam Name: pfkB family carbohydrate kinase Pfam Description: pfkB family carbohydrate kinase
  misc_feature (1)..(253): Homolog of NCBI NO: 585973 NR Description: FRUCTOKINASE
  misc_feature (1)..(254): Homolog of NCBI NO: 7434223 NR Description: fructokinase (EC 2.7.1.4) - beet
  misc_feature (1)..(253): Homolog of NCBI NO: 32765547 NR Description: fructokinase 2 [Lycopersicon hirsutum]
  misc_feature (1)..(253): Homolog of NCBI NO: 1915974 NR Description: fructokinase [Lycopersicon esculentum]
  misc_feature (1)..(253): Homolog of NCBI NO: 21592495 NR Description: fructokinase-like protein [Arabidopsis thaliana]
  misc_feature (1)..(253): Homolog of NCBI NO: 15231692 NR Description: fructokinase-like protein
  misc_feature (1)..(255): Homolog of NCBI NO: 15221364 NR Description: fructokinase, putative; protein id: At1g06020.1
  misc_feature (1)..(253): Homolog of NCBI NO: 15221365 NR Description: fructokinase, putative
  misc_feature (1)..(255): Homolog of NCBI NO: 14423528 NR Description: putative fructokinase [Arabidopsis thaliana]
  misc_feature (1)..(255): Homolog of NCBI NO: 15224669 NR Description: putative fructokinase

SEQ ID NO: 33981 - DNA, 1231 bp, Arabidopsis thaliana; identical to SEQ ID NO: 30391
  misc_feature (1)..(1231): Ceres Seq. ID no. 13500315
  misc_feature: MA Experiment ID: 108473 Result: Down-regulated in Transcription
  misc_feature: MA Experiment 108473 PARAMETER Experiment Name: At_Drought_Flowers_cDNA_P Parameter: Timepoint (hr) Value: 7 d
  misc_feature: MA Experiment 108473 PARAMETER Experiment Name: At_Drought_Flowers_cDNA_P Parameter: Tissue Value: Flower
  misc_feature: MA Experiment 108473 PARAMETER Experiment Name: At_Drought_Flowers_cDNA_P Parameter: Treatment Value: Drought vs. No Drought
  misc_feature: MA Experiment ID: 108474 Result: Down-regulated in Transcription
  misc_feature: MA Experiment 108474 PARAMETER Experiment Name: At_Drought_Flowers_cDNA_P Parameter: Timepoint (hr) Value: null
  misc_feature: MA Experiment 108474 PARAMETER Experiment Name: At_Drought_Flowers_cDNA_P Parameter: Treatment Value: Drought vs. No Drought
  misc_feature: MA Experiment ID: 108501 Result: Up-regulated in Transcription
  misc_feature: MA Experiment 108501 PARAMETER Experiment Name: At_ap2_floral_buds_cDNA_P Parameter: Plant Line Value: ap2 (Ler.)
  misc_feature: MA Experiment 108501 PARAMETER Experiment Name: At_ap2_floral_buds_cDNA_P Parameter: Tissue Value: Closed Flower

SEQ ID NO: 33982 - protein, 358 aa, Arabidopsis thaliana; identical to SEQ ID NO: 30392
  peptide (1)..(358): Ceres Seq. ID no. 13500316
  misc_feature (122)..(274): Pfam Name: Eukaryotic-type carbonic anhydrase Pfam Description: Eukaryotic-type carbonic anhydrase
  misc_feature (103)..(307): Homolog of NCBI NO: 30683808 NR Description: carbonic anhydrase -related [Arabidopsis thaliana]
  misc_feature (98)..(339): Homolog of NCBI NO: 29468280 NR Description: nectarin III [Nicotiana langsdorffii x Nicotiana
  misc_feature (101)..(346): Homolog of NCBI NO: 25407021 NR Description: protein T6D22.16 [imported] - Arabidopsis
  misc_feature (250)..(344): Homolog of NCBI NO: 25407019 NR Description: protein T6D22.14 [imported] - Arabidopsis
  misc_feature (103)..(227): Homolog of NCBI NO: 25407019 NR Description: protein T6D22.14 [imported] - Arabidopsis
  misc_feature (103)..(345): Homolog of NCBI NO: 25291473 NR Description: probable carbonic anhydrase [imported] -
  misc_feature (101)..(346): Homolog of NCBI NO: 15223122 NR Description: storage protein -related [Arabidopsis thaliana]
  misc_feature (103)..(344): Homolog of NCBI NO: 15223097 NR Description: carbonic anhydrase -related [Arabidopsis thaliana]
  misc_feature (303)..(358): Homolog of NCBI NO: 15241186 NR Description: proline-rich protein family [Arabidopsis
  misc_feature (1)..(274): Homolog of NCBI NO: 15241186 NR Description: proline-rich protein family [Arabidopsis

SEQ ID NO: 33983 - protein, 228 aa, Arabidopsis thaliana; identical to SEQ ID NO: 30393
  peptide (1)..(228): Ceres Seq. ID no. 13500317
  misc_feature (1)..(144): Pfam Name: Eukaryotic-type carbonic anhydrase Pfam Description: Eukaryotic-type carbonic anhydrase
  misc_feature (1)..(177): Homolog of NCBI NO: 30683808 NR Description: carbonic anhydrase -related [Arabidopsis thaliana]
  misc_feature (1)..(209): Homolog of NCBI NO: 29468280 NR Description: nectarin III [Nicotiana langsdorffii x Nicotiana
  misc_feature (1)..(216): Homolog of NCBI NO: 25407021 NR Description: protein T6D22.16 [imported] - Arabidopsis
  misc_feature (120)..(214): Homolog of NCBI NO: 25407019 NR Description: protein T6D22.14 [imported] - Arabidopsis
  misc_feature (1)..(97): Homolog of NCBI NO: 25407019 NR Description: protein T6D22.14 [imported] - Arabidopsis
  misc_feature (1)..(215): Homolog of NCBI NO: 25291473 NR Description: probable carbonic anhydrase [imported] -
  misc_feature (1)..(216): Homolog of NCBI NO: 15223122 NR Description: storage protein -related [Arabidopsis thaliana]
  misc_feature (1)..(214): Homolog of NCBI NO: 15223097 NR Description: carbonic anhydrase -related [Arabidopsis thaliana]
  misc_feature (173)..(228): Homolog of NCBI NO: 15241186 NR Description: proline-rich protein family [Arabidopsis
  misc_feature (1)..(144): Homolog of NCBI NO: 15241186 NR Description: proline-rich protein family [Arabidopsis

SEQ ID NO: 33984 - protein, 222 aa, Arabidopsis thaliana; identical to SEQ ID NO: 30394
  peptide (1)..(222): Ceres Seq. ID no. 13500318
  misc_feature (1)..(138): Pfam Name: Eukaryotic-type carbonic anhydrase Pfam Description: Eukaryotic-type carbonic anhydrase
  misc_feature (1)..(171): Homolog of NCBI NO: 30683808 NR Description: carbonic anhydrase -related [Arabidopsis thaliana]
  misc_feature (1)..(203): Homolog of NCBI NO: 29468280 NR Description: nectarin III [Nicotiana langsdorffii x Nicotiana
  misc_feature (1)..(210): Homolog of NCBI NO: 25407021 NR Description: protein T6D22.16 [imported] - Arabidopsis
  misc_feature (114)..(208): Homolog of NCBI NO: 25407019 NR Description: protein T6D22.14 [imported] - Arabidopsis
  misc_feature (1)..(91): Homolog of NCBI NO: 25407019 NR Description: protein T6D22.14 [imported] - Arabidopsis
  misc_feature (1)..(209): Homolog of NCBI NO: 25291473 NR Description: probable carbonic anhydrase [imported] -
  misc_feature (1)..(210): Homolog of NCBI NO: 15223122 NR Description: storage protein -related [Arabidopsis thaliana]
  misc_feature (1)..(208): Homolog of NCBI NO: 15223097 NR Description: carbonic anhydrase -related [Arabidopsis thaliana]
  misc_feature (167)..(222): Homolog of NCBI NO: 15241186 NR Description: proline-rich protein family [Arabidopsis
  misc_feature (1)..(138): Homolog of NCBI NO: 15241186 NR Description: proline-rich protein family [Arabidopsis

SEQ ID NO: 33985 - DNA, 997 bp, Arabidopsis thaliana; identical to SEQ ID NO: 30395
  misc_feature (1)..(997): Ceres Seq. ID no. 12336034
  misc_feature: MA Experiment ID: 108488 Result: Down-regulated in Transcription
  misc_feature: MA Experiment ID: 108561 Result: Up-regulated in Transcription
  misc_feature: MA Experiment 108561 PARAMETER Experiment Name: At_100uM_ABA_cDNA_P Parameter: Timepoint (hr) Value: 6
  misc_feature: MA Experiment 108561 PARAMETER Experiment Name: At_100uM_ABA_cDNA_P Parameter: Tissue Value: Aerial
  misc_feature: MA Experiment 108561 PARAMETER Experiment Name: At_100uM_ABA_cDNA_P Parameter: Treatment Value: 100uM ABA vs. No Treatment
  misc_feature: MA Experiment ID: 108572 Result: Up-regulated in Transcription
  misc_feature: MA Experiment 108572 PARAMETER Experiment Name: At_Drought_cDNA_P Parameter: Timepoint (hr) Value: 1
  misc_feature: MA Experiment 108572 PARAMETER Experiment Name: At_Drought_cDNA_P Parameter: Tissue Value: Aerial
  misc_feature: MA Experiment 108572 PARAMETER Experiment Name: At_Drought_cDNA_P Parameter: Treatment Value: Drought vs. No Drought
  misc_feature: MA Experiment ID: 108573 Result: Up-regulated in Transcription
  misc_feature: MA Experiment 108573 PARAMETER Experiment Name: At_Drought_cDNA_P Parameter: Timepoint (hr) Value: 6
  misc_feature: MA Experiment 108573 PARAMETER Experiment Name: At_Drought_cDNA_P Parameter: Tissue Value: Aerial
  misc_feature: MA Experiment 108573 PARAMETER Experiment Name: At_Drought_cDNA_P Parameter: Treatment Value: Drought vs. No Drought
  misc_feature: MA Experiment ID: 108585 Result: Up-regulated in Transcription
  misc_feature: MA Experiment 108585 PARAMETER Experiment Name: At_5mM_NaNP_cDNA_P Parameter: Timepoint (hr) Value: 6
  misc_feature: MA Experiment 108585 PARAMETER Experiment Name: At_5mM_NaNP_cDNA_P Parameter: Tissue Value: Aerial
  misc_feature: MA Experiment 108585 PARAMETER Experiment Name: At_5mM_NaNP_cDNA_P Parameter: Treatment Value: null
  misc_feature: MA Experiment ID: 108668 Result: Up-regulated in Transcription
  misc_feature: MA Experiment 108668 PARAMETER Experiment Name: At_2mM_SA_cDNA_P Parameter: Plant Line Value: WS
  misc_feature: MA Experiment 108668 PARAMETER Experiment Name: At_2mM_SA_cDNA_P Parameter: Timepoint (hr) Value: 6
  misc_feature: MA Experiment 108668 PARAMETER Experiment Name: At_2mM_SA_cDNA_P Parameter: Treatment Value: 2mM SA vs. No Treatment
  misc_feature: MA Experiment ID: 20000071 Result: Up-regulated in Transcription
  misc_feature: MA Experiment 20000071 PARAMETER Experiment Name: At_100uM_ABA_Mutants_cDNA_P Parameter: Plant Line Value: CS8104
  misc_feature: MA Experiment 20000071 PARAMETER Experiment Name: At_100uM_ABA_Mutants_cDNA_P Parameter: Timepoint (hr) Value: 6
  misc_feature: MA Experiment 20000071 PARAMETER Experiment Name: At_100uM_ABA_Mutants_cDNA_P Parameter: Tissue Value: Aerial
  misc_feature: MA Experiment 20000071 PARAMETER Experiment Name: At_100uM_ABA_Mutants_cDNA_P Parameter: Treatment Value: 100uM ABA vs. No Treatment
  misc_feature: MA Experiment ID: 20000111 Result: Up-regulated in Transcription
  misc_feature: MA Experiment 20000111 PARAMETER Experiment Name: At_42deg_Heat_cDNA_P Parameter: Temperature (deg C) Value: 42 vs. 22
  misc_feature: MA Experiment 20000111 PARAMETER Experiment Name: At_42deg_Heat_cDNA_P Parameter: Timepoint (hr) Value: 6
  misc_feature: MA Experiment 20000111 PARAMETER Experiment Name: At_42deg_Heat_cDNA_P Parameter: Tissue Value: Aerial
  misc_feature: MA Experiment ID: 20000113 Result: Up-regulated in Transcription
  misc_feature: MA Experiment 20000113 PARAMETER Experiment Name: At_42deg_Heat_cDNA_P Parameter: Temperature (deg C) Value: 42 vs. 22
  misc_feature: MA Experiment 20000113 PARAMETER Experiment Name: At_42deg_Heat_cDNA_P Parameter: Timepoint (hr) Value: 8
  misc_feature: MA Experiment 20000113 PARAMETER Experiment Name: At_42deg_Heat_cDNA_P Parameter: Tissue Value: Aerial
  misc_feature: MA Experiment ID: 20000144 Result: Up-regulated in Transcription
  misc_feature: MA Experiment 20000144 PARAMETER Experiment Name: At_42deg_Heat_cDNA_P Parameter: Temperature (deg C) Value: 42 vs. 22
  misc_feature: MA Experiment 20000144 PARAMETER Experiment Name: At_42deg_Heat_cDNA_P Parameter: Timepoint (hr) Value: 1
  misc_feature: MA Experiment 20000144 PARAMETER Experiment Name: At_42deg_Heat_cDNA_P Parameter: Tissue Value: Aerial
  misc_feature: MA Experiment ID: 20000171 Result: Up-regulated in Transcription
  misc_feature: MA Experiment 20000171 PARAMETER Experiment Name: At_42deg_Heat_P Parameter: Age (day) Value: 14
  misc_feature: MA Experiment 20000171 PARAMETER Experiment Name: At_42deg_Heat_P Parameter: Organism Value: A. thaliana
  misc_feature: MA Experiment 20000171 PARAMETER Experiment Name: At_42deg_Heat_P Parameter: Plant Line Value: WS
  misc_feature: MA Experiment 20000171 PARAMETER Experiment Name: At_42deg_Heat_P Parameter: Temperature (deg C) Value: 42 vs. 22
  misc_feature: MA Experiment 20000171 PARAMETER Experiment Name: At_42deg_Heat_P Parameter: Timepoint (hr) Value: 1
  misc_feature: MA Experiment 20000171 PARAMETER Experiment Name: At_42deg_Heat_P Parameter: Tissue Value: Aerial
  misc_feature: MA Experiment ID: 20000173 Result: Up-regulated in Transcription
  misc_feature: MA Experiment 20000173 PARAMETER Experiment Name: At_42deg_Heat_P Parameter: Age (day) Value: 14
  misc_feature: MA Experiment 20000173 PARAMETER Experiment Name: At_42deg_Heat_P Parameter: Organism Value: A. thaliana
  misc_feature: MA Experiment 20000173 PARAMETER Experiment Name: At_42deg_Heat_P Parameter: Plant Line Value: WS
  misc_feature: MA Experiment 20000173 PARAMETER Experiment Name: At_42deg_Heat_P Parameter: Temperature (deg C) Value: 42 vs. 22
  misc_feature: MA Experiment 20000173 PARAMETER Experiment Name: At_42deg_Heat_P Parameter: Timepoint (hr) Value: 6
  misc_feature: MA Experiment 20000173 PARAMETER Experiment Name: At_42deg_Heat_P Parameter: Tissue Value: Aerial
  misc_feature: MA Experiment ID: 20000179 Result: Down-regulated in Transcription
  misc_feature: MA Experiment 20000179 PARAMETER Experiment Name: At_Germinating_Seeds_P Parameter: Age (hr) Value: 6 vs. 0
  misc_feature: MA Experiment 20000179 PARAMETER Experiment Name: At_Germinating_Seeds_P Parameter: Tissue Value: Germinating Seeds
  misc_feature: MA Experiment ID: 20000182 Result: Up-regulated in Transcription
  misc_feature: MA Experiment 20000182 PARAMETER Experiment Name: At_2mM_SA_P Parameter: Age (day) Value: 14
  misc_feature: MA Experiment 20000182 PARAMETER Experiment Name: At_2mM_SA_P Parameter: Organism Value: A. thaliana
  misc_feature: MA Experiment 20000182 PARAMETER Experiment Name: At_2mM_SA_P Parameter: Plant Line Value: WS
  misc_feature: MA Experiment 20000182 PARAMETER Experiment Name: At_2mM_SA_P Parameter: Timepoint (hr) Value: 6
  misc_feature: MA Experiment 20000182 PARAMETER Experiment Name: At_2mM_SA_P Parameter: Tissue Value: Aerial
  misc_feature: MA Experiment 20000182 PARAMETER Experiment Name: At_2mM_SA_P Parameter: Treatment Value: 2mM SA vs. No Treatment
  misc_feature: MA Experiment ID: 20000437 Result: Up-regulated in Transcription
  misc_feature: MA Experiment 20000437 PARAMETER Experiment Name: At_Drought_P Parameter: Age (day) Value: 8
  misc_feature: MA Experiment 20000437 PARAMETER Experiment Name: At_Drought_P Parameter: Organism Value: A. thaliana
  misc_feature: MA Experiment 20000437 PARAMETER Experiment Name: At_Drought_P Parameter: Plant Line Value: WS
  misc_feature: MA Experiment 20000437 PARAMETER Experiment Name: At_Drought_P Parameter: Timepoint (hr) Value: 24
  misc_feature: MA Experiment 20000437 PARAMETER Experiment Name: At_Drought_P Parameter: Tissue Value: Whole Plant
  misc_feature: MA Experiment 20000437 PARAMETER Experiment Name: At_Drought_P Parameter: Treatment Value: Drought vs. No Drought
  misc_feature: MA Experiment ID: 20000794 Result: Up-regulated in Transcription
  misc_feature: MA Experiment 20000794 PARAMETER Experiment Name: At_Petals_P Parameter: Age (day) Value: 23-25 days
  misc_feature: MA Experiment 20000794 PARAMETER Experiment Name: At_Petals_P Parameter: Plant Line Value: WS
  misc_feature: MA Experiment 20000794 PARAMETER Experiment Name: At_Petals_P Parameter: Tissue Value: Petals vs. Whole plant
  misc_feature: MA Experiment ID: 20001905 Result: Up-regulated in Transcription
  misc_feature: MA Experiment 20001905 PARAMETER Experiment Name: At_Drought_Reproduction_P Parameter: Age (day) Value: 40
  misc_feature: MA Experiment 20001905 PARAMETER Experiment Name: At_Drought_Reproduction_P Parameter: Organism Value: A. thaliana
  misc_feature: MA Experiment 20001905 PARAMETER Experiment Name: At_Drought_Reproduction_P Parameter: Plant Line Value: WS
  misc_feature: MA Experiment 20001905 PARAMETER Experiment Name: At_Drought_Reproduction_P Parameter: Timepoint (day) Value: 10
  misc_feature: MA Experiment 20001905 PARAMETER Experiment Name: At_Drought_Reproduction_P Parameter: Tissue Value: Rosettes
  misc_feature: MA Experiment 20001905 PARAMETER Experiment Name: At_Drought_Reproduction_P Parameter: Treatment Value: Drought vs. No Drought
  misc_feature: MA Experiment ID: 20001911 Result: Up-regulated in Transcription
  misc_feature: MA Experiment 20001911 PARAMETER Experiment Name: At_Drought_Reproduction_P Parameter: Age (day) Value: 40
  misc_feature: MA Experiment 20001911 PARAMETER Experiment Name: At_Drought_Reproduction_P Parameter: Organism Value: A. thaliana
  misc_feature: MA Experiment 20001911 PARAMETER Experiment Name: At_Drought_Reproduction_P Parameter: Plant Line Value: WS
  misc_feature: MA Experiment 20001911 PARAMETER Experiment Name: At_Drought_Reproduction_P Parameter: Timepoint (day) Value: 10
  misc_feature: MA Experiment 20001911 PARAMETER Experiment Name: At_Drought_Reproduction_P Parameter: Tissue Value: Flowers
  misc_feature: MA Experiment 20001911 PARAMETER Experiment Name: At_Drought_Reproduction_P Parameter: Treatment Value: Drought vs. No Drought

SEQ ID NO: 33986 - protein, 256 aa, Arabidopsis thaliana; identical to SEQ ID NO: 30396
  peptide (1)..(256): Ceres Seq. ID no. 12336035
  misc_feature (53)..(214): Pfam Name: Ras family Pfam Description: Ras family
  misc_feature (46)..(253): Homolog of NCBI NO: 7438379 NR Description: GTP-binding protein RAB2A - Arabidopsis thaliana
  misc_feature (46)..(255): Homolog of NCBI NO: 1370176 NR Description: RAB2A [Lotus japonicus]
  misc_feature (46)..(255): Homolog of NCBI NO: 16755592 NR Description: small GTPase Rab2 [Nicotiana tabacum]
  misc_feature (46)..(256): Homolog of NCBI NO: 15235981 NR Description: GTP-binding protein (At-RAB2); protein id:
  misc_feature (46)..(256): Homolog of NCBI NO: 6624302 NR Description: small GTP-binding protein [Carica papaya]
  misc_feature (46)..(256): Homolog of NCBI NO: 15233367 NR Description: Rab2-like GTP-binding protein, putative

SEQ ID NO: 33987 - protein, 211 aa, Arabidopsis thaliana; identical to SEQ ID NO: 30397
  peptide (1)..(211): Ceres Seq. ID no. 12336036
  misc_feature (8)..(169): Pfam Name: Ras family Pfam Description: Ras family
  misc_feature (1)..(208): Homolog of NCBI NO: 7438379 NR Description: GTP-binding protein RAB2A - Arabidopsis thaliana
  misc_feature (1)..(210): Homolog of NCBI NO: 1370176 NR Description: RAB2A [Lotus japonicus]
  misc_feature (1)..(210): Homolog of NCBI NO: 16755592 NR Description: small GTPase Rab2 [Nicotiana tabacum]
  misc_feature (1)..(211): Homolog of NCBI NO: 15235981 NR Description: GTP-binding protein (At-RAB2); protein id:
  misc_feature (1)..(211): Homolog of NCBI NO: 6624302 NR Description: small GTP-binding protein [Carica papaya]
  misc_feature (1)..(211): Homolog of NCBI NO: 15233367 NR Description: Rab2-like GTP-binding protein, putative

SEQ ID NO: 33988 - protein, 165 aa, Arabidopsis thaliana; identical to SEQ ID NO: 30398
  peptide (1)..(165): Ceres Seq. ID no. 12336037
  misc_feature (1)..(123): Pfam Name: Ras family Pfam Description: Ras family
  misc_feature (1)..(162): Homolog of NCBI NO: 7438379 NR Description: GTP-binding protein RAB2A - Arabidopsis thaliana
  misc_feature (1)..(164): Homolog of NCBI NO: 1370176 NR Description: RAB2A [Lotus japonicus]
  misc_feature (1)..(164): Homolog of NCBI NO: 16755592 NR Description: small GTPase Rab2 [Nicotiana tabacum]
  misc_feature (1)..(165): Homolog of NCBI NO: 15235981 NR Description: GTP-binding protein (At-RAB2); protein id:
  misc_feature (1)..(165): Homolog of NCBI NO: 6624302 NR Description: small GTP-binding protein [Carica papaya]
  misc_feature (1)..(165): Homolog of NCBI NO: 15233367 NR Description: Rab2-like GTP-binding protein, putative

SEQ ID NO: 33989 - DNA, 1718 bp, Arabidopsis thaliana; identical to SEQ ID NO: 30399
  misc_feature (1)..(1718): Ceres Seq. ID no. 12324349
  misc_feature: MA Experiment ID: 108462 Result: Up-regulated in Transcription
  misc_feature: MA Experiment 108462 PARAMETER Experiment Name: At_Germinating_Seeds_cDNA_P Parameter: Age (day) Value: 2 vs. 0
  misc_feature: MA Experiment 108462 PARAMETER Experiment Name: At_Germinating_Seeds_cDNA_P Parameter: Tissue Value: Germinating Seeds
  misc_feature: MA Experiment ID: 108464 Result: Up-regulated in Transcription
  misc_feature: MA Experiment 108464 PARAMETER Experiment Name: At_Germinating_Seeds_cDNA_P Parameter: Age (day) Value: 4 vs. 0
  misc_feature: MA Experiment 108464 PARAMETER Experiment Name: At_Germinating_Seeds_cDNA_P Parameter: Tissue Value: Germinating Seeds
  misc_feature: MA Experiment ID: 108569 Result: Up-regulated in Transcription
  misc_feature: MA Experiment 108569 PARAMETER Experiment Name: At_0.001%_MeJA__cDNA_P Parameter: Timepoint (hr) Value: 6
  misc_feature: MA Experiment 108569 PARAMETER Experiment Name: At_0.001%_MeJA__cDNA_P Parameter: Tissue Value: Aerial
  misc_feature: MA Experiment 108569 PARAMETER Experiment Name: At_0.001%_MeJA__cDNA_P Parameter: Treatment Value: 0.001% MeJA vs. No Treatment
  misc_feature: MA Experiment ID: 108573 Result: Up-regulated in Transcription
  misc_feature: MA Experiment 108573 PARAMETER Experiment Name: At_Drought_cDNA_P Parameter: Timepoint (hr) Value: 6
  misc_feature: MA Experiment 108573 PARAMETER Experiment Name: At_Drought_cDNA_P Parameter: Tissue Value: Aerial
  misc_feature: MA Experiment 108573 PARAMETER Experiment Name: At_Drought_cDNA_P Parameter: Treatment Value: Drought vs. No Drought
  misc_feature: MA Experiment ID: 20000089 Result: Down-regulated in Transcription

SEQ ID NO: 33990 - protein, 409 aa, Arabidopsis thaliana; identical to SEQ ID NO: 30400
  peptide (1)..(409): Ceres Seq. ID no. 12324350
  misc_feature (73)..(357): Pfam Name: Protein kinase domain Pfam Description: Protein kinase domain
  misc_feature (1)..(404): Homolog of NCBI NO: 481018 NR Description: protein kinase MSK-3 (EC 2.7.1.-) [similarity] -
  misc_feature (1)..(409): Homolog of NCBI NO: 11133532 NR Description: Shaggy-related protein kinase NtK-1
  misc_feature (1)..(409): Homolog of NCBI NO: 1709127 NR Description: Glycogen synthase kinase-3 homolog MsK-1
  misc_feature (1)..(78): Homolog of NCBI NO: 7434274 NR Description: hypothetical protein A_IG002P16.21 - Arabidopsis
  misc_feature (69)..(409): Homolog of NCBI NO: 7434274 NR Description: hypothetical protein A_IG002P16.21 - Arabidopsis
  misc_feature (1)..(409): Homolog of NCBI NO: 2398519 NR Description: shaggy-like kinase alpha [Arabidopsis thaliana]
  misc_feature (1)..(409): Homolog of NCBI NO: 541901 NR Description: protein kinase ASK-alpha (EC 2.7.1.-)
  misc_feature (1)..(409): Homolog of NCBI NO: 18421039 NR Description: shaggy-like kinase alpha
  misc_feature (1)..(409): Homolog of NCBI NO: 21553877 NR Description: shaggy related protein kinase ASK-GAMMA
  misc_feature (1)..(409): Homolog of NCBI NO: 15230058 NR Description: shaggy related protein kinase, ASK-GAMMA

SEQ ID NO: 33991 - protein, 381 aa, Arabidopsis thaliana; identical to SEQ ID NO: 30401
  peptide (1)..(381): Ceres Seq. ID no. 12324351
  misc_feature (45)..(329): Pfam Name: Protein kinase domain Pfam Description: Protein kinase domain
  misc_feature (1)..(376): Homolog of NCBI NO: 481018 NR Description: protein kinase MSK-3 (EC 2.7.1.-) [similarity] -
  misc_feature (1)..(381): Homolog of NCBI NO: 11133532 NR Description: Shaggy-related protein kinase NtK-1
  misc_feature (1)..(381): Homolog of NCBI NO: 1709127 NR Description: Glycogen synthase kinase-3 homolog MsK-1
  misc_feature (1)..(50): Homolog of NCBI NO: 7434274 NR Description: hypothetical protein A_IG002P16.21 - Arabidopsis
  misc_feature (41)..(381): Homolog of NCBI NO: 7434274 NR Description: hypothetical protein A_IG002P16.21 - Arabidopsis
  misc_feature (1)..(381): Homolog of NCBI NO: 2398519 NR Description: shaggy-like kinase alpha [Arabidopsis thaliana]
  misc_feature (1)..(381): Homolog of NCBI NO: 541901 NR Description: protein kinase ASK-alpha (EC 2.7.1.-)
  misc_feature (1)..(381): Homolog of NCBI NO: 18421039 NR Description: shaggy-like kinase alpha
  misc_feature (1)..(381): Homolog of NCBI NO: 21553877 NR Description: shaggy related protein kinase ASK-GAMMA
  misc_feature (1)..(381): Homolog of NCBI NO: 15230058 NR Description: shaggy related protein kinase, ASK-GAMMA

SEQ ID NO: 33992 - protein, 378 aa, Arabidopsis thaliana; identical to SEQ ID NO: 30402
  peptide (1)..(378): Ceres Seq. ID no. 12324352
  misc_feature (42)..(326): Pfam Name: Protein kinase domain Pfam Description: Protein kinase domain
  misc_feature (1)..(373): Homolog of NCBI NO: 481018 NR Description: protein kinase MSK-3 (EC 2.7.1.-) [similarity] -
  misc_feature (1)..(378): Homolog of NCBI NO: 11133532 NR Description: Shaggy-related protein kinase NtK-1
  misc_feature (1)..(378): Homolog of NCBI NO: 1709127 NR Description: Glycogen synthase kinase-3 homolog MsK-1
  misc_feature (1)..(47): Homolog of NCBI NO: 7434274 NR Description: hypothetical protein A_IG002P16.21 - Arabidopsis
  misc_feature (38)..(378): Homolog of NCBI NO: 7434274 NR Description: hypothetical protein A_IG002P16.21 - Arabidopsis
  misc_feature (1)..(378): Homolog of NCBI NO: 2398519 NR Description: shaggy-like kinase alpha [Arabidopsis thaliana]
  misc_feature (1)..(378): Homolog of NCBI NO: 541901 NR Description: protein kinase ASK-alpha (EC 2.7.1.-)
  misc_feature (1)..(378): Homolog of NCBI NO: 18421039 NR Description: shaggy-like kinase alpha
  misc_feature (1)..(378): Homolog of NCBI NO: 21553877 NR Description: shaggy related protein kinase ASK-GAMMA
  misc_feature (1)..(378): Homolog of NCBI NO: 15230058 NR Description: shaggy related protein kinase, ASK-GAMMA

SEQ ID NO: 33993 - DNA, 1511 bp, Arabidopsis thaliana; identical to SEQ ID NO: 30403
  misc_feature (1)..(1511): Ceres Seq. ID no. 12371675
  misc_feature: MA Experiment ID: 108434 Result: Down-regulated in Transcription
  misc_feature: MA Experiment 108434 PARAMETER Experiment Name: At_Root_Tips_cDNA_P Parameter: Tissue Value: Root Tips
  misc_feature: MA Experiment ID: 108488 Result: Down-regulated in Transcription
  misc_feature: MA Experiment ID: 20000265 Result: Up-regulated in Transcription
  misc_feature: MA Experiment 20000265 PARAMETER Experiment Name: At_Open_Flower_P Parameter: Age (day) Value: 21
  misc_feature: MA Experiment 20000265 PARAMETER Experiment Name: At_Open_Flower_P Parameter: Plant Line Value: WS
  misc_feature: MA Experiment 20000265 PARAMETER Experiment Name: At_Open_Flower_P Parameter: Tissue Value: Closed Flower vs. Whole Plant
  misc_feature: MA Experiment ID: 20000495 Result: Up-regulated in Transcription
  misc_feature: MA Experiment 20000495 PARAMETER Experiment Name: At_Guard_Cells_P Parameter: Harvest Date Value: 8/2/2002
  misc_feature: MA Experiment 20000495 PARAMETER Experiment Name: At_Guard_Cells_P Parameter: Organism Value: A. thaliana
  misc_feature: MA Experiment 20000495 PARAMETER Experiment Name: At_Guard_Cells_P Parameter: Tissue Value: Guard Cells vs. Leaves
  misc_feature: MA Experiment ID: 20000794 Result: Up-regulated in Transcription
  misc_feature: MA Experiment 20000794 PARAMETER Experiment Name: At_Petals_P Parameter: Age (day) Value: 23-25 days
  misc_feature: MA Experiment 20000794 PARAMETER Experiment Name: At_Petals_P Parameter: Plant Line Value: WS
  misc_feature: MA Experiment 20000794 PARAMETER Experiment Name: At_Petals_P Parameter: Tissue Value: Petals vs. Whole plant
  misc_feature: MA Experiment ID: 20001248 Result: Down-regulated in Transcription
  misc_feature: MA Experiment 20001248 PARAMETER Experiment Name: At_Far-red-induction_P Parameter: Age (day) Value: 7
  misc_feature: MA Experiment 20001248 PARAMETER Experiment Name: At_Far-red-induction_P Parameter: Light Value: Far-red vs. White
  misc_feature: MA Experiment 20001248 PARAMETER Experiment Name: At_Far-red-induction_P Parameter: Organism Value: A. thaliana
  misc_feature: MA Experiment 20001248 PARAMETER Experiment Name: At_Far-red-induction_P Parameter: Plant Line Value: Columbia
  misc_feature: MA Experiment 20001248 PARAMETER Experiment Name: At_Far-red-induction_P Parameter: Timepoint (hr) Value: 4
  misc_feature: MA Experiment 20001248 PARAMETER Experiment Name: At_Far-red-induction_P Parameter: Tissue Value: Whole Plant
  misc_feature: MA Experiment ID: 20001905 Result: Up-regulated in Transcription
  misc_feature: MA Experiment 20001905 PARAMETER Experiment Name: At_Drought_Reproduction_P Parameter: Age (day) Value: 40
  misc_feature: MA Experiment 20001905 PARAMETER Experiment Name: At_Drought_Reproduction_P Parameter: Organism Value: A. thaliana
  misc_feature: MA Experiment 20001905 PARAMETER Experiment Name: At_Drought_Reproduction_P Parameter: Plant Line Value: WS
  misc_feature: MA Experiment 20001905 PARAMETER Experiment Name: At_Drought_Reproduction_P Parameter: Timepoint (day) Value: 10
  misc_feature: MA Experiment 20001905 PARAMETER Experiment Name: At_Drought_Reproduction_P Parameter: Tissue Value: Rosettes
  misc_feature: MA Experiment 20001905 PARAMETER Experiment Name: At_Drought_Reproduction_P Parameter: Treatment Value: Drought vs. No Drought

SEQ ID NO: 33994 - protein, 359 aa, Arabidopsis thaliana; identical to SEQ ID NO: 30404
  peptide (1)..(359): Ceres Seq. ID no. 12371676
  misc_feature (7)..(358): Homolog of NCBI NO: 38345515 NR Description: OSJNBa0039K24.18 [Oryza sativa (japonica
  misc_feature (4)..(359): Homolog of NCBI NO: 21593427 NR Description: unknown [Arabidopsis thaliana]
  misc_feature (4)..(359): Homolog of NCBI NO: 18425155 NR Description: putative protein
  misc_feature (1)..(359): Homolog of NCBI NO: 38637049 NR Description: MAP3K-like protein kinase [Oryza sativa (japonica
  misc_feature (4)..(342): Homolog of NCBI NO: 34897530 NR Description: OSJNBa0042L16.2 [Oryza sativa (japonica
  misc_feature (23)..(359): Homolog of NCBI NO: 25407778 NR Description: MAP3K-like protein kinase [imported] -
  misc_feature (4)..(358): Homolog of NCBI NO: 38345461 NR Description: OSJNBa0042L16.16 [Oryza sativa (japonica
  misc_feature (20)..(359): Homolog of NCBI NO: 27754722 NR Description: unknown protein [Arabidopsis thaliana]
  misc_feature (1)..(359): Homolog of NCBI NO: 15230348 NR Description: unknown protein; protein id: At3g19310.1
  misc_feature (1)..(359): Homolog of NCBI NO: 18402763 NR Description: expressed protein

SEQ ID NO: 33995 - protein, 238 aa, Arabidopsis thaliana; identical to SEQ ID NO: 30405
  peptide (1)..(238): Ceres Seq. ID no. 12371677
  misc_feature (1)..(237): Homolog of NCBI NO: 38345515 NR Description: OSJNBa0039K24.18 [Oryza sativa (japonica
  misc_feature (1)..(238): Homolog of NCBI NO: 21593427 NR Description: unknown [Arabidopsis thaliana]
  misc_feature (1)..(238): Homolog of NCBI NO: 18425155 NR Description: putative protein
  misc_feature (1)..(238): Homolog of NCBI NO: 38637049 NR Description: MAP3K-like protein kinase [Oryza sativa (japonica
  misc_feature (1)..(221): Homolog of NCBI NO: 34897530 NR Description: OSJNBa0042L16.2 [Oryza sativa (japonica
  misc_feature (1)..(238): Homolog of NCBI NO: 25407778 NR Description: MAP3K-like protein kinase [imported] -
  misc_feature (1)..(237): Homolog of NCBI NO: 38345461 NR Description: OSJNBa0042L16.16 [Oryza sativa (japonica
  misc_feature (1)..(238): Homolog of NCBI NO: 27754722 NR Description: unknown protein [Arabidopsis thaliana]
  misc_feature (1)..(238): Homolog of NCBI NO: 15230348 NR Description: unknown protein; protein id: At3g19310.1
  misc_feature (1)..(238): Homolog of NCBI NO: 18402763 NR Description: expressed protein

SEQ ID NO: 33996 - protein, 235 aa, Arabidopsis thaliana; identical to SEQ ID NO: 30406
  peptide (1)..(235): Ceres Seq. ID no. 12371678
  misc_feature (1)..(234): Homolog of NCBI NO: 38345515 NR Description: OSJNBa0039K24.18 [Oryza sativa (japonica
  misc_feature (1)..(235): Homolog of NCBI NO: 21593427 NR Description: unknown [Arabidopsis thaliana]
  misc_feature (1)..(235): Homolog of NCBI NO: 18425155 NR Description: putative protein
  misc_feature (1)..(235): Homolog of NCBI NO: 38637049 NR Description: MAP3K-like protein kinase [Oryza sativa (japonica
  misc_feature (1)..(218): Homolog of NCBI NO: 34897530 NR Description: OSJNBa0042L16.2 [Oryza sativa (japonica
  misc_feature (1)..(235): Homolog of NCBI NO: 25407778 NR Description: MAP3K-like protein kinase [imported] -
  misc_feature (1)..(234): Homolog of NCBI NO: 38345461 NR Description: OSJNBa0042L16.16 [Oryza sativa (japonica
  misc_feature (1)..(235): Homolog of NCBI NO: 27754722 NR Description: unknown protein [Arabidopsis thaliana]
  misc_feature (1)..(235): Homolog of NCBI NO: 15230348 NR Description: unknown protein; protein id: At3g19310.1
  misc_feature (1)..(235): Homolog of NCBI NO: 18402763 NR Description: expressed protein

SEQ ID NO: 33997 - DNA, 1070 bp, Arabidopsis thaliana; identical to SEQ ID NO: 30407
  misc_feature (1)..(1070): Ceres Seq. ID no. 12327436
  misc_feature: MA Experiment ID: 108434 Result: Up-regulated in Transcription
  misc_feature: MA Experiment 108434 PARAMETER Experiment Name: At_Root_Tips_cDNA_P Parameter: Tissue Value: Root Tips
  misc_feature: MA Experiment ID: 108461 Result: Up-regulated in Transcription
  misc_feature: MA Experiment 108461 PARAMETER Experiment Name: At_Germinating_Seeds_cDNA_P Parameter: Age (day) Value: 1 vs. 0
  misc_feature: MA Experiment 108461 PARAMETER Experiment Name: At_Germinating_Seeds_cDNA_P Parameter: Tissue Value: Germinating Seeds
  misc_feature: MA Experiment ID: 108462 Result: Up-regulated in Transcription
  misc_feature: MA Experiment 108462 PARAMETER Experiment Name: At_Germinating_Seeds_cDNA_P Parameter: Age (day) Value: 2 vs. 0
  misc_feature: MA Experiment 108462 PARAMETER Experiment Name: At_Germinating_Seeds_cDNA_P Parameter: Tissue Value: Germinating Seeds
  misc_feature: MA Experiment ID: 108473 Result: Down-regulated in Transcription
  misc_feature: MA Experiment 108473 PARAMETER Experiment Name: At_Drought_Flowers_cDNA_P Parameter: Timepoint (hr) Value: 7 d
  misc_feature: MA Experiment 108473 PARAMETER Experiment Name: At_Drought_Flowers_cDNA_P Parameter: Tissue Value: Flower
  misc_feature: MA Experiment 108473 PARAMETER Experiment Name: At_Drought_Flowers_cDNA_P Parameter: Treatment Value: Drought vs. No Drought
  misc_feature: MA Experiment ID: 108572 Result: Down-regulated in Transcription
  misc_feature: MA Experiment 108572 PARAMETER Experiment Name: At_Drought_cDNA_P Parameter: Timepoint (hr) Value: 1
  misc_feature: MA Experiment 108572 PARAMETER Experiment Name: At_Drought_cDNA_P Parameter: Tissue Value: Aerial
  misc_feature: MA Experiment 108572 PARAMETER Experiment Name: At_Drought_cDNA_P Parameter: Treatment Value: Drought vs. No Drought
  misc_feature: MA Experiment ID: 108573 Result: Down-regulated in Transcription
  misc_feature: MA Experiment 108573 PARAMETER Experiment Name: At_Drought_cDNA_P Parameter: Timepoint (hr) Value: 6
  misc_feature: MA Experiment 108573 PARAMETER Experiment Name: At_Drought_cDNA_P Parameter: Tissue Value: Aerial
  misc_feature: MA Experiment 108573 PARAMETER Experiment Name: At_Drought_cDNA_P Parameter: Treatment Value: Drought vs. No Drought
  misc_feature: MA Experiment ID: 108585 Result: Down-regulated in Transcription
  misc_feature: MA Experiment 108585 PARAMETER Experiment Name: At_5mM_NaNP_cDNA_P Parameter: Timepoint (hr) Value: 6
  misc_feature: MA Experiment 108585 PARAMETER Experiment Name: At_5mM_NaNP_cDNA_P Parameter: Tissue Value: Aerial
  misc_feature: MA Experiment 108585 PARAMETER Experiment Name: At_5mM_NaNP_cDNA_P Parameter: Treatment Value: null
  misc_feature: MA Experiment ID: 20000111 Result: Down-regulated in Transcription
  misc_feature: MA Experiment 20000111 PARAMETER Experiment Name: At_42deg_Heat_cDNA_P Parameter: Temperature (deg C) Value: 42 vs. 22
  misc_feature: MA Experiment 20000111 PARAMETER Experiment Name: At_42deg_Heat_cDNA_P Parameter: Timepoint (hr) Value: 6
  misc_feature: MA Experiment 20000111 PARAMETER Experiment Name: At_42deg_Heat_cDNA_P Parameter: Tissue Value: Aerial
  misc_feature: MA Experiment ID: 20000113 Result: Down-regulated in Transcription
  misc_feature: MA Experiment 20000113 PARAMETER Experiment Name: At_42deg_Heat_cDNA_P Parameter: Temperature (deg C) Value: 42 vs. 22
  misc_feature: MA Experiment 20000113 PARAMETER Experiment Name: At_42deg_Heat_cDNA_P Parameter: Timepoint (hr) Value: 8
  misc_feature: MA Experiment 20000113 PARAMETER Experiment Name: At_42deg_Heat_cDNA_P Parameter: Tissue Value: Aerial
  misc_feature: MA Experiment ID: 20000173 Result: Down-regulated in Transcription
  misc_feature: MA Experiment 20000173 PARAMETER Experiment Name: At_42deg_Heat_P Parameter: Age (day) Value: 14
  misc_feature: MA Experiment 20000173 PARAMETER Experiment Name: At_42deg_Heat_P Parameter: Organism Value: A. thaliana
  misc_feature: MA Experiment 20000173 PARAMETER Experiment Name: At_42deg_Heat_P Parameter: Plant Line Value: WS
  misc_feature: MA Experiment 20000173 PARAMETER Experiment Name: At_42deg_Heat_P Parameter: Temperature (deg C) Value: 42 vs. 22
  misc_feature: MA Experiment 20000173 PARAMETER Experiment Name: At_42deg_Heat_P Parameter: Timepoint (hr) Value: 6
  misc_feature: MA Experiment 20000173 PARAMETER Experiment Name: At_42deg_Heat_P Parameter: Tissue Value: Aerial
  misc_feature: MA Experiment ID: 20000179 Result: Up-regulated in Transcription
  misc_feature: MA Experiment 20000179 PARAMETER Experiment Name: At_Germinating_Seeds_P Parameter: Age (hr) Value: 6 vs. 0
  misc_feature: MA Experiment 20000179 PARAMETER Experiment Name: At_Germinating_Seeds_P Parameter: Tissue Value: Germinating Seeds
  misc_feature: MA Experiment ID: 20000180 Result: Up-regulated in Transcription
  misc_feature: MA Experiment 20000180 PARAMETER Experiment Name: At_Germinating_Seeds_P Parameter: Age (hr) Value: 24 vs. 0
  misc_feature: MA Experiment 20000180 PARAMETER Experiment Name: At_Germinating_Seeds_P Parameter: Tissue Value: Germinating Seeds
  misc_feature: MA Experiment ID: 20000182 Result: Down-regulated in Transcription
  misc_feature: MA Experiment 20000182 PARAMETER Experiment Name: At_2mM_SA_P Parameter: Age (day) Value: 14
  misc_feature: MA Experiment 20000182 PARAMETER Experiment Name: At_2mM_SA_P Parameter: Organism Value: A. thaliana
  misc_feature: MA Experiment 20000182 PARAMETER Experiment Name: At_2mM_SA_P Parameter: Plant Line Value: WS
  misc_feature: MA Experiment 20000182 PARAMETER Experiment Name: At_2mM_SA_P Parameter: Timepoint (hr) Value: 6
  misc_feature: MA Experiment 20000182 PARAMETER Experiment Name: At_2mM_SA_P Parameter: Tissue Value: Aerial
  misc_feature: MA Experiment 20000182 PARAMETER Experiment Name: At_2mM_SA_P Parameter: Treatment Value: 2mM SA vs. No Treatment
  misc_feature: MA Experiment ID: 20000185 Result: Down-regulated in Transcription
  misc_feature: MA Experiment 20000185 PARAMETER Experiment Name: At_Roots__P Parameter: Age (day) Value: 7 vs. 21
  misc_feature: MA Experiment 20000185 PARAMETER Experiment Name: At_Roots__P Parameter: Organism Value: A. thaliana
  misc_feature: MA Experiment 20000185 PARAMETER Experiment Name: At_Roots__P Parameter: Tissue Value: Roots vs. Whole Plant
  misc_feature: MA Experiment ID: 20000214 Result: Down-regulated in Transcription
  misc_feature: MA Experiment 20000214 PARAMETER Experiment Name: At_4deg_Cold_P Parameter: Timepoint (hr) Value: 6
  misc_feature: MA Experiment ID: 20000224 Result: Down-regulated in Transcription
  misc_feature: MA Experiment ID: 20000234 Result: Up-regulated in Transcription
  misc_feature: MA Experiment 20000234 PARAMETER Experiment Name: At_Siliques_P Parameter: Age (day) Value: 21
  misc_feature: MA Experiment 20000234 PARAMETER Experiment Name: At_Siliques_P Parameter: Organism Value: A. thaliana
  misc_feature: MA Experiment 20000234 PARAMETER Experiment Name: At_Siliques_P Parameter: Plant Line Value: WS
  misc_feature: MA Experiment 20000234 PARAMETER Experiment Name: At_Siliques_P Parameter: Tissue Value: Less Than 5mm Siliques vs. Whole Plant
  misc_feature: MA Experiment ID: 20000265 Result: Up-regulated in Transcription
  misc_feature: MA Experiment 20000265 PARAMETER Experiment Name: At_Open_Flower_P Parameter: Age (day) Value: 21
  misc_feature: MA Experiment 20000265 PARAMETER Experiment Name: At_Open_Flower_P Parameter: Plant Line Value: WS
  misc_feature: MA Experiment 20000265 PARAMETER Experiment Name: At_Open_Flower_P Parameter: Tissue Value: Closed Flower vs. Whole Plant
  misc_feature: MA Experiment ID: 20000268 Result: Down-regulated in Transcription
  misc_feature: MA Experiment 20000268 PARAMETER Experiment Name: At_100mM_NaCl__P Parameter: Age (day) Value: 14
  misc_feature: MA Experiment 20000268 PARAMETER Experiment Name: At_100mM_NaCl__P Parameter: Organism Value: A. thaliana
  misc_feature: MA Experiment 20000268 PARAMETER Experiment Name: At_100mM_NaCl__P Parameter: Plant Line Value: WS
  misc_feature: MA Experiment 20000268 PARAMETER Experiment Name: At_100mM_NaCl__P Parameter: Timepoint (hr) Value: 6
  misc_feature: MA Experiment 20000268 PARAMETER Experiment Name: At_100mM_NaCl__P Parameter: Tissue Value: Whole Plant
  misc_feature: MA Experiment 20000268 PARAMETER Experiment Name: At_100mM_NaCl__P Parameter: Treatment Value: 100mM NaCl vs. No Treatment
  misc_feature: MA Experiment ID: 20000436 Result: Down-regulated in Transcription
  misc_feature: MA Experiment 20000436 PARAMETER Experiment Name: At_Drought_P Parameter: Age (day) Value: 7
  misc_feature: MA Experiment 20000436 PARAMETER Experiment Name: At_Drought_P Parameter: Organism Value: A. thaliana
  misc_feature: MA Experiment 20000436 PARAMETER Experiment Name: At_Drought_P Parameter: Plant Line Value: WS
  misc_feature: MA Experiment 20000436 PARAMETER Experiment Name: At_Drought_P Parameter: Timepoint (hr) Value: 12
  misc_feature: MA Experiment 20000436 PARAMETER Experiment Name: At_Drought_P Parameter: Tissue Value: Whole Plant
  misc_feature: MA Experiment 20000436 PARAMETER Experiment Name: At_Drought_P Parameter: Treatment Value: Drought vs. No Drought
  misc_feature: MA Experiment ID: 20000437 Result: Down-regulated in Transcription
  misc_feature: MA Experiment 20000437 PARAMETER Experiment Name: At_Drought_P Parameter: Age (day) Value: 8
  misc_feature: MA Experiment 20000437 PARAMETER Experiment Name: At_Drought_P Parameter: Organism Value: A. thaliana
  misc_feature: MA Experiment 20000437 PARAMETER Experiment Name: At_Drought_P Parameter: Plant Line Value: WS
  misc_feature: MA Experiment 20000437 PARAMETER Experiment Name: At_Drought_P Parameter: Timepoint (hr) Value: 24
  misc_feature: MA Experiment 20000437 PARAMETER Experiment Name: At_Drought_P Parameter: Tissue Value: Whole Plant
  misc_feature: MA Experiment 20000437 PARAMETER Experiment Name: At_Drought_P Parameter: Treatment Value: Drought vs. No Drought
  misc_feature: MA Experiment ID: 20000438 Result: Down-regulated in Transcription
  misc_feature: MA Experiment 20000438 PARAMETER Experiment Name: At_Shoots__P Parameter: Age (day) Value: 14
  misc_feature: MA Experiment 20000438 PARAMETER Experiment Name: At_Shoots__P Parameter: Tissue Value: Shoots vs. Whole Plant
  misc_feature: MA Experiment ID: 20000439 Result: Down-regulated in Transcription
  misc_feature: MA Experiment 20000439 PARAMETER Experiment Name: At_Roots__P Parameter: Age (day) Value: 14 vs. 21
  misc_feature: MA Experiment 20000439 PARAMETER Experiment Name: At_Roots__P Parameter: Organism Value: A. thaliana
  misc_feature: MA Experiment 20000439 PARAMETER Experiment Name: At_Roots__P Parameter: Tissue Value: Roots vs. Whole Plant
  misc_feature: MA Experiment ID: 20000495 Result: Up-regulated in Transcription
  misc_feature: MA Experiment 20000495 PARAMETER Experiment Name: At_Guard_Cells_P Parameter: Harvest Date Value: 8/2/2002
  misc_feature: MA Experiment 20000495 PARAMETER Experiment Name: At_Guard_Cells_P Parameter: Organism Value: A. thaliana
  misc_feature: MA Experiment 20000495 PARAMETER Experiment Name: At_Guard_Cells_P Parameter: Tissue Value: Guard Cells vs. Leaves
  misc_feature: MA Experiment ID: 20000496 Result: Up-regulated in Transcription
  misc_feature: MA Experiment 20000496 PARAMETER Experiment Name: At_Guard_Cells_P Parameter: Harvest Date Value: 7/19/2002
  misc_feature: MA Experiment 20000496 PARAMETER Experiment Name: At_Guard_Cells_P Parameter: Organism Value: Canola
  misc_feature: MA Experiment 20000496 PARAMETER Experiment Name: At_Guard_Cells_P Parameter: Tissue Value: Guard Cells vs. Leaves
  misc_feature: MA Experiment ID: 20000606 Result: Up-regulated in Transcription
  misc_feature: MA Experiment 20000606 PARAMETER Experiment Name: At_CS8548_Mutant_P Parameter: Age (day) Value: 14
  misc_feature: MA Experiment 20000606 PARAMETER Experiment Name: At_CS8548_Mutant_P Parameter: Plant Line Value: CS8548 vs. wt
  misc_feature: MA Experiment 20000606 PARAMETER Experiment Name: At_CS8548_Mutant_P Parameter: Tissue Value: Whole Plant
  misc_feature: MA Experiment ID: 20000794 Result: Down-regulated in Transcription
  misc_feature: MA Experiment 20000794 PARAMETER Experiment Name: At_Petals_P Parameter: Age (day) Value: 23-25 days
  misc_feature: MA Experiment 20000794 PARAMETER Experiment Name: At_Petals_P Parameter: Plant Line Value: WS
  misc_feature: MA Experiment 20000794 PARAMETER Experiment Name: At_Petals_P Parameter: Tissue Value: Petals vs. Whole plant
  misc_feature: MA Experiment ID: 20001451 Result: Down-regulated in Transcription
  misc_feature: MA Experiment 20001451 PARAMETER Experiment Name: At_Far-red-induction_P Parameter: Age (day) Value: 7
  misc_feature: MA Experiment 20001451 PARAMETER Experiment Name: At_Far-red-induction_P Parameter: Light Value: Far-red vs. White
  misc_feature: MA Experiment 20001451 PARAMETER Experiment Name: At_Far-red-induction_P Parameter: Organism Value: A. thaliana
  misc_feature: MA Experiment 20001451 PARAMETER Experiment Name: At_Far-red-induction_P Parameter: Plant Line Value: Columbia
  misc_feature: MA Experiment 20001451 PARAMETER Experiment Name: At_Far-red-induction_P Parameter: Timepoint (hr) Value: 24
  misc_feature: MA Experiment 20001451 PARAMETER Experiment Name: At_Far-red-induction_P Parameter: Tissue Value: Whole Plant
  misc_feature: MA Experiment ID: 20001554 Result: Down-regulated in Transcription
  misc_feature: MA Experiment 20001554 PARAMETER Experiment Name: At_Drought_Soil_Dry_P Parameter: Age (day) Value: 21
  misc_feature: MA Experiment 20001554 PARAMETER Experiment Name: At_Drought_Soil_Dry_P Parameter: Organism Value: A. thaliana
  misc_feature: MA Experiment 20001554 PARAMETER Experiment Name: At_Drought_Soil_Dry_P Parameter: Plant Line Value: WS
  misc_feature: MA Experiment 20001554 PARAMETER Experiment Name: At_Drought_Soil_Dry_P Parameter: Post Timepoint (hr) Value: None
  misc_feature: MA Experiment 20001554 PARAMETER Experiment Name: At_Drought_Soil_Dry_P Parameter: Post-Treatment Value: None
  misc_feature: MA Experiment 20001554 PARAMETER Experiment Name: At_Drought_Soil_Dry_P Parameter: Timepoint (day) Value: 7
  misc_feature: MA Experiment 20001554 PARAMETER Experiment Name: At_Drought_Soil_Dry_P Parameter: Treatment Value: Drought vs. No Drought
  misc_feature: MA Experiment ID: 20001555 Result: Down-regulated in Transcription
  misc_feature: MA Experiment 20001555 PARAMETER Experiment Name: At_Drought_Soil_Dry_P Parameter: Age (day) Value: 24
  misc_feature: MA Experiment 20001555 PARAMETER Experiment Name: At_Drought_Soil_Dry_P Parameter: Organism Value: A. thaliana
  misc_feature: MA Experiment 20001555 PARAMETER Experiment Name: At_Drought_Soil_Dry_P Parameter: Plant Line Value: WS
  misc_feature: MA Experiment 20001555 PARAMETER Experiment Name: At_Drought_Soil_Dry_P Parameter: Post Timepoint (hr) Value: None
  misc_feature: MA Experiment 20001555 PARAMETER Experiment Name: At_Drought_Soil_Dry_P Parameter: Post-Treatment Value: None
  misc_feature: MA Experiment 20001555 PARAMETER Experiment Name: At_Drought_Soil_Dry_P Parameter: Timepoint (day) Value: 10
  misc_feature: MA Experiment 20001555 PARAMETER Experiment Name: At_Drought_Soil_Dry_P Parameter: Treatment Value: Drought vs. No Drought
  misc_feature: MA Experiment ID: 20001556 Result: Down-regulated in Transcription
  misc_feature: MA Experiment 20001556 PARAMETER Experiment Name: At_Drought_Soil_Dry_P Parameter: Age (day) Value: 26
  misc_feature: MA Experiment 20001556 PARAMETER Experiment Name: At_Drought_Soil_Dry_P Parameter: Organism Value: A. thaliana
  misc_feature: MA Experiment 20001556 PARAMETER Experiment Name: At_Drought_Soil_Dry_P Parameter: Plant Line Value: WS
  misc_feature: MA Experiment 20001556 PARAMETER Experiment Name: At_Drought_Soil_Dry_P Parameter: Post Timepoint (hr) Value: None
  misc_feature: MA Experiment 20001556 PARAMETER Experiment Name: At_Drought_Soil_Dry_P Parameter: Post-Treatment Value: None
  misc_feature: MA Experiment 20001556 PARAMETER Experiment Name: At_Drought_Soil_Dry_P Parameter: Timepoint (day) Value: 12
  misc_feature: MA Experiment 20001556 PARAMETER Experiment Name: At_Drought_Soil_Dry_P Parameter: Treatment Value: Drought vs. No Drought
  misc_feature: MA Experiment ID: 20001557 Result: Up-regulated in Transcription
  misc_feature: MA Experiment 20001557 PARAMETER Experiment Name: At_Drought_Soil_Dry_P Parameter: Age (day) Value: 27
  misc_feature: MA Experiment 20001557 PARAMETER Experiment Name: At_Drought_Soil_Dry_P Parameter: Organism Value: A. thaliana
  misc_feature: MA Experiment 20001557 PARAMETER Experiment Name: At_Drought_Soil_Dry_P Parameter: Plant Line Value: WS
  misc_feature: MA Experiment 20001557 PARAMETER Experiment Name: At_Drought_Soil_Dry_P Parameter: Post Timepoint (hr) Value: 3
  misc_feature: MA Experiment 20001557 PARAMETER Experiment Name: At_Drought_Soil_Dry_P Parameter: Post-Treatment Value: Re-Water vs. No Drought
  misc_feature: MA Experiment 20001557 PARAMETER Experiment Name: At_Drought_Soil_Dry_P Parameter: Timepoint (day) Value: 13
  misc_feature: MA Experiment 20001557 PARAMETER Experiment Name: At_Drought_Soil_Dry_P Parameter: Treatment Value: Drought vs. No Drought
  misc_feature: MA Experiment ID: 20001558 Result: Up-regulated in Transcription
  misc_feature: MA Experiment 20001558 PARAMETER Experiment Name: At_Drought_Soil_Dry_P Parameter: Age (day) Value: 27
  misc_feature: MA Experiment 20001558 PARAMETER Experiment Name: At_Drought_Soil_Dry_P Parameter: Organism Value: A. thaliana
  misc_feature: MA Experiment 20001558 PARAMETER Experiment Name: At_Drought_Soil_Dry_P Parameter: Plant Line Value: WS
  misc_feature: MA Experiment 20001558 PARAMETER Experiment Name: At_Drought_Soil_Dry_P Parameter: Post Timepoint (hr) Value: 6
  misc_feature: MA Experiment 20001558 PARAMETER Experiment Name: At_Drought_Soil_Dry_P Parameter: Post-Treatment Value: Re-Water vs. No Drought
  misc_feature: MA Experiment 20001558 PARAMETER Experiment Name: At_Drought_Soil_Dry_P Parameter: Timepoint (day) Value: 13
  misc_feature: MA Experiment 20001558 PARAMETER Experiment Name: At_Drought_Soil_Dry_P Parameter: Treatment Value: Drought vs. No Drought
  misc_feature: MA Experiment ID: 20001560 Result: Up-regulated in Transcription
  misc_feature: MA Experiment 20001560 PARAMETER Experiment Name: At_Drought_Soil_Dry_P Parameter: Age (day) Value: 28
  misc_feature: MA Experiment 20001560 PARAMETER Experiment Name: At_Drought_Soil_Dry_P Parameter: Organism Value: A. thaliana
  misc_feature: MA Experiment 20001560 PARAMETER Experiment Name: At_Drought_Soil_Dry_P Parameter: Plant Line Value: WS
  misc_feature: MA Experiment 20001560 PARAMETER Experiment Name: At_Drought_Soil_Dry_P Parameter: Post Timepoint (hr) Value: None
  misc_feature: MA Experiment 20001560 PARAMETER Experiment Name: At_Drought_Soil_Dry_P Parameter: Post-Treatment Value: None
  misc_feature: MA Experiment 20001560 PARAMETER Experiment Name: At_Drought_Soil_Dry_P Parameter: Timepoint (day) Value: 14
  misc_feature: MA Experiment 20001560 PARAMETER Experiment Name: At_Drought_Soil_Dry_P Parameter: Treatment Value: Drought vs. No Drought
  misc_feature: MA Experiment ID: 20001904 Result: Down-regulated in Transcription
  misc_feature: MA Experiment 20001904 PARAMETER Experiment Name: At_Drought_Reproduction_P Parameter: Age (day) Value: 37
  misc_feature: MA Experiment 20001904 PARAMETER Experiment Name: At_Drought_Reproduction_P Parameter: Organism Value: A. thaliana
  misc_feature: MA Experiment 20001904 PARAMETER Experiment Name: At_Drought_Reproduction_P Parameter: Plant Line Value: WS
  misc_feature: MA Experiment 20001904 PARAMETER Experiment Name: At_Drought_Reproduction_P Parameter: Timepoint (day) Value: 7
  misc_feature: MA Experiment 20001904 PARAMETER Experiment Name: At_Drought_Reproduction_P Parameter: Tissue Value: Rosettes
  misc_feature: MA Experiment 20001904 PARAMETER Experiment Name: At_Drought_Reproduction_P Parameter: Treatment Value: Drought vs. No Drought
  misc_feature: MA Experiment ID: 20001905 Result: Down-regulated in Transcription
  misc_feature: MA Experiment 20001905 PARAMETER Experiment Name: At_Drought_Reproduction_P Parameter: Age (day) Value: 40
  misc_feature: MA Experiment 20001905 PARAMETER Experiment Name: At_Drought_Reproduction_P Parameter: Organism Value: A. thaliana
  misc_feature: MA Experiment 20001905 PARAMETER Experiment Name: At_Drought_Reproduction_P Parameter: Plant Line Value: WS
  misc_feature: MA Experiment 20001905 PARAMETER Experiment Name: At_Drought_Reproduction_P Parameter: Timepoint (day) Value: 10
  misc_feature: MA Experiment 20001905 PARAMETER Experiment Name: At_Drought_Reproduction_P Parameter: Tissue Value: Rosettes
  misc_feature: MA Experiment 20001905 PARAMETER Experiment Name: At_Drought_Reproduction_P Parameter: Treatment Value: Drought vs. No Drought
  misc_feature: MA Experiment ID: 20001906 Result: Down-regulated in Transcription
  misc_feature: MA Experiment 20001906 PARAMETER Experiment Name: At_Drought_Reproduction_P Parameter: Age (day) Value: 35
  misc_feature: MA Experiment 20001906 PARAMETER Experiment Name: At_Drought_Reproduction_P Parameter: Organism Value: A. thaliana
  misc_feature: MA Experiment 20001906 PARAMETER Experiment Name: At_Drought_Reproduction_P Parameter: Plant Line Value: WS
  misc_feature: MA Experiment 20001906 PARAMETER Experiment Name: At_Drought_Reproduction_P Parameter: Timepoint (day) Value: 5
  misc_feature: MA Experiment 20001906 PARAMETER Experiment Name: At_Drought_Reproduction_P Parameter: Tissue Value: Siliques
  misc_feature: MA Experiment 20001906 PARAMETER Experiment Name: At_Drought_Reproduction_P Parameter: Treatment Value: Drought vs. No Drought
  misc_feature: MA Experiment ID: 20001907 Result: Down-regulated in Transcription
  misc_feature: MA Experiment 20001907 PARAMETER Experiment Name: At_Drought_Reproduction_P Parameter: Age (day) Value: 37
  misc_feature: MA Experiment 20001907 PARAMETER Experiment Name: At_Drought_Reproduction_P Parameter: Organism Value: A. thaliana
  misc_feature: MA Experiment 20001907 PARAMETER Experiment Name: At_Drought_Reproduction_P Parameter: Plant Line Value: WS
  misc_feature: MA Experiment 20001907 PARAMETER Experiment Name: At_Drought_Reproduction_P Parameter: Timepoint (day) Value: 7
  misc_feature: MA Experiment 20001907 PARAMETER Experiment Name: At_Drought_Reproduction_P Parameter: Tissue Value: Siliques
  misc_feature: MA Experiment 20001907 PARAMETER Experiment Name: At_Drought_Reproduction_P Parameter: Treatment Value: Drought vs. No Drought
  misc_feature: MA Experiment ID: 20001908 Result: Down-regulated in Transcription
  misc_feature: MA Experiment 20001908 PARAMETER Experiment Name: At_Drought_Reproduction_P Parameter: Age (day) Value: 40
  misc_feature: MA Experiment 20001908 PARAMETER Experiment Name: At_Drought_Reproduction_P Parameter: Organism Value: A. thaliana
  misc_feature: MA Experiment 20001908 PARAMETER Experiment Name: At_Drought_Reproduction_P Parameter: Plant Line Value: WS
  misc_feature: MA Experiment 20001908 PARAMETER Experiment Name: At_Drought_Reproduction_P Parameter: Timepoint (day) Value: 10
  misc_feature: MA Experiment 20001908 PARAMETER Experiment Name: At_Drought_Reproduction_P Parameter: Tissue Value: Siliques
  misc_feature: MA Experiment 20001908 PARAMETER Experiment Name: At_Drought_Reproduction_P Parameter: Treatment Value: Drought vs. No Drought
  misc_feature: MA Experiment ID: 20001911 Result: Down-regulated in Transcription
  misc_feature: MA Experiment 20001911 PARAMETER Experiment Name: At_Drought_Reproduction_P Parameter: Age (day) Value: 40
  misc_feature: MA Experiment 20001911 PARAMETER Experiment Name: At_Drought_Reproduction_P Parameter: Organism Value: A. thaliana
  misc_feature: MA Experiment 20001911 PARAMETER Experiment Name: At_Drought_Reproduction_P Parameter: Plant Line Value: WS
  misc_feature: MA Experiment 20001911 PARAMETER Experiment Name: At_Drought_Reproduction_P Parameter: Timepoint (day) Value: 10
  misc_feature: MA Experiment 20001911 PARAMETER Experiment Name: At_Drought_Reproduction_P Parameter: Tissue Value: Flowers
  misc_feature: MA Experiment 20001911 PARAMETER Experiment Name: At_Drought_Reproduction_P Parameter: Treatment Value: Drought vs. No Drought

SEQ ID NO: 33998 - protein, 290 aa, Arabidopsis thaliana; identical to SEQ ID NO: 30408
  peptide (1)..(290): Ceres Seq. ID no. 12327437
  misc_feature (29)..(208): Pfam Name: Glycosyl hydrolases family 16 Pfam Description: Glycosyl hydrolases family 16
  misc_feature (28)..(290): Homolog of NCBI NO: 541939 NR Description: xyloglucan endo-1,4-beta-D-glucanase (EC 3.2.1.-)
  misc_feature (29)..(288): Homolog of NCBI NO: 950299 NR Description: xyloglucan endotransglycosylase precursor
  misc_feature (9)..(290): Homolog of NCBI NO: 15240733 NR Description: xyloglucan endotransglycosylase (EXGT-A4)
  misc_feature (14)..(284): Homolog of NCBI NO: 5070246 NR Description: xyloglucan endo-transglycosylase-like protein
  misc_feature (4)..(290): Homolog of NCBI NO: 21553878 NR Description: putative xyloglucan endotransglycosylase
  misc_feature (1)..(290): Homolog of NCBI NO: 15236265 NR Description: xyloglucan endotransglycosylase, putative

SEQ ID NO: 33999 - protein, 287 aa, Arabidopsis thaliana; identical to SEQ ID NO: 30409
  peptide (1)..(287): Ceres Seq. ID no. 12327438
  misc_feature (26)..(205): Pfam Name: Glycosyl hydrolases family 16 Pfam Description: Glycosyl hydrolases family 16
  misc_feature (25)..(287): Homolog of NCBI NO: 541939 NR Description: xyloglucan endo-1,4-beta-D-glucanase (EC 3.2.1.-)
  misc_feature (26)..(285): Homolog of NCBI NO: 950299 NR Description: xyloglucan endotransglycosylase precursor
  misc_feature (6)..(287): Homolog of NCBI NO: 15240733 NR Description: xyloglucan endotransglycosylase (EXGT-A4)
  misc_feature (11)..(281): Homolog of NCBI NO: 5070246 NR Description: xyloglucan endo-transglycosylase-like protein
  misc_feature (1)..(287): Homolog of NCBI NO: 21553878 NR Description: putative xyloglucan endotransglycosylase
  misc_feature (1)..(287): Homolog of NCBI NO: 15236265 NR Description: xyloglucan endotransglycosylase, putative

SEQ ID NO: 34000 - protein, 280 aa, Arabidopsis thaliana; identical to SEQ ID NO: 30410
  peptide (1)..(280): Ceres Seq. ID no. 12327439
  misc_feature (19)..(198): Pfam Name: Glycosyl hydrolases family 16 Pfam Description: Glycosyl hydrolases family 16
  misc_feature (18)..(280): Homolog of NCBI NO: 541939 NR Description: xyloglucan endo-1,4-beta-D-glucanase (EC 3.2.1.-)
  misc_feature (19)..(278): Homolog of NCBI NO: 950299 NR Description: xyloglucan endotransglycosylase precursor
  misc_feature (1)..(280): Homolog of NCBI NO: 15240733 NR Description: xyloglucan endotransglycosylase (EXGT-A4)
  misc_feature (4)..(274): Homolog of NCBI NO: 5070246 NR Description: xyloglucan endo-transglycosylase-like protein
  misc_feature (1)..(280): Homolog of NCBI NO: 21553878 NR Description: putative xyloglucan endotransglycosylase
  misc_feature (1)..(280): Homolog of NCBI NO: 15236265 NR Description: xyloglucan endotransglycosylase, putative

SEQ ID NO: 34001 - DNA, 1350 bp, Arabidopsis thaliana; identical to SEQ ID NO: 30411
  misc_feature (1)..(1350): Ceres Seq. ID no. 13580471
  misc_feature: MA Experiment ID: 108434 Result: Up-regulated in Transcription
  misc_feature: MA Experiment 108434 PARAMETER Experiment Name: At_Root_Tips_cDNA_P Parameter: Tissue Value: Root Tips
  misc_feature: MA Experiment ID: 108461 Result: Up-regulated in Transcription
  misc_feature: MA Experiment 108461 PARAMETER Experiment Name: At_Germinating_Seeds_cDNA_P Parameter: Age (day) Value: 1 vs. 0
  misc_feature: MA Experiment 108461 PARAMETER Experiment Name: At_Germinating_Seeds_cDNA_P Parameter: Tissue Value: Germinating Seeds
  misc_feature: MA Experiment ID: 108462 Result: Up-regulated in Transcription
  misc_feature: MA Experiment 108462 PARAMETER Experiment Name: At_Germinating_Seeds_cDNA_P Parameter: Age (day) Value: 2 vs. 0
  misc_feature: MA Experiment 108462 PARAMETER Experiment Name: At_Germinating_Seeds_cDNA_P Parameter: Tissue Value: Germinating Seeds
  misc_feature: MA Experiment ID: 108463 Result: Up-regulated in Transcription
  misc_feature: MA Experiment 108463 PARAMETER Experiment Name: At_Germinating_Seeds_cDNA_P Parameter: Age (day) Value: 3 vs. 0
  misc_feature: MA Experiment 108463 PARAMETER Experiment Name: At_Germinating_Seeds_cDNA_P Parameter: Tissue Value: Germinating Seeds
  misc_feature: MA Experiment ID: 108595 Result: Up-regulated in Transcription
  misc_feature: MA Experiment 108595 PARAMETER Experiment Name: At_Ler-pi_Ovule_cDNA_P Parameter: Plant Line Value: null
  misc_feature: MA Experiment ID: 20000179 Result: Up-regulated in Transcription
  misc_feature: MA Experiment 20000179 PARAMETER Experiment Name: At_Germinating_Seeds_P Parameter: Age (hr) Value: 6 vs. 0
  misc_feature: MA Experiment 20000179 PARAMETER Experiment Name: At_Germinating_Seeds_P Parameter: Tissue Value: Germinating Seeds
  misc_feature: MA Experiment ID: 20000180 Result: Up-regulated in Transcription
  misc_feature: MA Experiment 20000180 PARAMETER Experiment Name: At_Germinating_Seeds_P Parameter: Age (hr) Value: 24 vs. 0
  misc_feature: MA Experiment 20000180 PARAMETER Experiment Name: At_Germinating_Seeds_P Parameter: Tissue Value: Germinating Seeds
  misc_feature: MA Experiment ID: 20000185 Result: Up-regulated in Transcription
  misc_feature: MA Experiment 20000185 PARAMETER Experiment Name: At_Roots__P Parameter: Age (day) Value: 7 vs. 21
  misc_feature: MA Experiment 20000185 PARAMETER Experiment Name: At_Roots__P Parameter: Organism Value: A. thaliana
  misc_feature: MA Experiment 20000185 PARAMETER Experiment Name: At_Roots__P Parameter: Tissue Value: Roots vs. Whole Plant
  misc_feature: MA Experiment ID: 20000227 Result: Up-regulated in Transcription
  misc_feature: MA Experiment 20000227 PARAMETER Experiment Name: At_Root-Tips-vs-Tops_P Parameter: Tissue Value: Root Tips vs. Root Tops
  misc_feature: MA Experiment ID: 20000234 Result: Up-regulated in Transcription
  misc_feature: MA Experiment 20000234 PARAMETER Experiment Name: At_Siliques_P Parameter: Age (day) Value: 21
  misc_feature: MA Experiment 20000234 PARAMETER Experiment Name: At_Siliques_P Parameter: Organism Value: A. thaliana
  misc_feature: MA Experiment 20000234 PARAMETER Experiment Name: At_Siliques_P Parameter: Plant Line Value: WS
  misc_feature: MA Experiment 20000234 PARAMETER Experiment Name: At_Siliques_P Parameter: Tissue Value: Less Than 5mm Siliques vs. Whole Plant
  misc_feature: MA Experiment ID: 20000264 Result: Up-regulated in Transcription
  misc_feature: MA Experiment 20000264 PARAMETER Experiment Name: At_Open_Flower_P Parameter: Age (day) Value: 21
  misc_feature: MA Experiment 20000264 PARAMETER Experiment Name: At_Open_Flower_P Parameter: Plant Line Value: WS
  misc_feature: MA Experiment 20000264 PARAMETER Experiment Name: At_Open_Flower_P Parameter: Tissue Value: Open Flower vs. Whole Plant
  misc_feature: MA Experiment ID: 20000265 Result: Up-regulated in Transcription
  misc_feature: MA Experiment 20000265 PARAMETER Experiment Name: At_Open_Flower_P Parameter: Age (day) Value: 21
  misc_feature: MA Experiment 20000265 PARAMETER Experiment Name: At_Open_Flower_P Parameter: Plant Line Value: WS
  misc_feature: MA Experiment 20000265 PARAMETER Experiment Name: At_Open_Flower_P Parameter: Tissue Value: Closed Flower vs. Whole Plant
  misc_feature: MA Experiment ID: 20000286 Result: Up-regulated in Transcription
  misc_feature: MA Experiment 20000286 PARAMETER Experiment Name: At_Open_Flower_P Parameter: Age (day) Value: 21
  misc_feature: MA Experiment 20000286 PARAMETER Experiment Name: At_Open_Flower_P Parameter: Plant Line Value: WS
  misc_feature: MA Experiment 20000286 PARAMETER Experiment Name: At_Open_Flower_P Parameter: Tissue Value: Half Open vs. Whole Plant
  misc_feature: MA Experiment ID: 20000439 Result: Up-regulated in Transcription
  misc_feature: MA Experiment 20000439 PARAMETER Experiment Name: At_Roots__P Parameter: Age (day) Value: 14 vs. 21
  misc_feature: MA Experiment 20000439 PARAMETER Experiment Name: At_Roots__P Parameter: Organism Value: A. thaliana
  misc_feature: MA Experiment 20000439 PARAMETER Experiment Name: At_Roots__P Parameter: Tissue Value: Roots vs. Whole Plant
  misc_feature: MA Experiment ID: 20000527 Result: Down-regulated in Transcription
  misc_feature: MA Experiment 20000527 PARAMETER Experiment Name: At_10percent_PEG_P Parameter: Age (day) Value: 20
  misc_feature: MA Experiment 20000527 PARAMETER Experiment Name: At_10percent_PEG_P Parameter: Organism Value: A. thaliana
  misc_feature: MA Experiment 20000527 PARAMETER Experiment Name: At_10percent_PEG_P Parameter: Plant Line Value: WS
  misc_feature: MA Experiment 20000527 PARAMETER Experiment Name: At_10percent_PEG_P Parameter: Timepoint (day) Value: 20
  misc_feature: MA Experiment 20000527 PARAMETER Experiment Name: At_10percent_PEG_P Parameter: Tissue Value: Whole Plant
  misc_feature: MA Experiment 20000527 PARAMETER Experiment Name: At_10percent_PEG_P Parameter: Treatment Value: 10percent PEG vs. No Treatment
  misc_feature: MA Experiment ID: 20001560 Result: Up-regulated in Transcription
  misc_feature: MA Experiment 20001560 PARAMETER Experiment Name: At_Drought_Soil_Dry_P Parameter: Age (day) Value: 28
  misc_feature: MA Experiment 20001560 PARAMETER Experiment Name: At_Drought_Soil_Dry_P Parameter: Organism Value: A. thaliana
  misc_feature: MA Experiment 20001560 PARAMETER Experiment Name: At_Drought_Soil_Dry_P Parameter: Plant Line Value: WS
  misc_feature: MA Experiment 20001560 PARAMETER Experiment Name: At_Drought_Soil_Dry_P Parameter: Post Timepoint (hr) Value: None
  misc_feature: MA Experiment 20001560 PARAMETER Experiment Name: At_Drought_Soil_Dry_P Parameter: Post-Treatment Value: None
  misc_feature: MA Experiment 20001560 PARAMETER Experiment Name: At_Drought_Soil_Dry_P Parameter: Timepoint (day) Value: 14
  misc_feature: MA Experiment 20001560 PARAMETER Experiment Name: At_Drought_Soil_Dry_P Parameter: Treatment Value: Drought vs. No Drought
  misc_feature: MA Experiment ID: 20001906 Result: Down-regulated in Transcription
  misc_feature: MA Experiment 20001906 PARAMETER Experiment Name: At_Drought_Reproduction_P Parameter: Age (day) Value: 35
  misc_feature: MA Experiment 20001906 PARAMETER Experiment Name: At_Drought_Reproduction_P Parameter: Organism Value: A. thaliana
  misc_feature: MA Experiment 20001906 PARAMETER Experiment Name: At_Drought_Reproduction_P Parameter: Plant Line Value: WS
  misc_feature: MA Experiment 20001906 PARAMETER Experiment Name: At_Drought_Reproduction_P Parameter: Timepoint (day) Value: 5
  misc_feature: MA Experiment 20001906 PARAMETER Experiment Name: At_Drought_Reproduction_P Parameter: Tissue Value: Siliques
  misc_feature: MA Experiment 20001906 PARAMETER Experiment Name: At_Drought_Reproduction_P Parameter: Treatment Value: Drought vs. No Drought

SEQ ID NO: 34002 - protein, 224 aa, Arabidopsis thaliana; identical to SEQ ID NO: 30412
  peptide (1)..(224): Ceres Seq. ID no. 15222720
  misc_feature (156)..(209): Homolog of NCBI NO: 34904010 NR Description: unnamed protein product [Oryza sativa (japonica
  misc_feature (16)..(165): Homolog of NCBI NO: 34904010 NR Description: unnamed protein product [Oryza sativa (japonica
  misc_feature (47)..(212): Homolog of NCBI NO: 30350855 NR Description: hypothetical protein At2g30900 [Arabidopsis
  misc_feature (11)..(212): Homolog of NCBI NO: 15219157 NR Description: hypothetical protein [Arabidopsis thaliana]
  misc_feature (47)..(212): Homolog of NCBI NO: 15224585 NR Description: expressed protein [Arabidopsis thaliana]
  misc_feature (23)..(212): Homolog of NCBI NO: 18403435 NR Description: expressed protein [Arabidopsis thaliana]
  misc_feature (39)..(212): Homolog of NCBI NO: 34911864 NR Description: OSJNBb0032K15.9 [Oryza sativa (japonica
  misc_feature (42)..(213): Homolog of NCBI NO: 28393769 NR Description: unknown protein [Arabidopsis thaliana]
  misc_feature (42)..(213): Homolog of NCBI NO: 21593142 NR Description: unknown [Arabidopsis thaliana]
  misc_feature (1)..(214): Homolog of NCBI NO: 18406003 NR Description: expressed protein [Arabidopsis thaliana]

SEQ ID NO: 34003 - protein, 147 aa, Arabidopsis thaliana; identical to SEQ ID NO: 30413
  peptide (1)..(147): Ceres Seq. ID no. 15222721
  misc_feature (1)..(144): Homolog of NCBI NO: 21553643 NR Description: unknown [Arabidopsis thaliana]
  misc_feature (1)..(144): Homolog of NCBI NO: 34904010 NR Description: unnamed protein product [Oryza sativa (japonica
  misc_feature (1)..(147): Homolog of NCBI NO: 30350855 NR Description: hypothetical protein At2g30900 [Arabidopsis
  misc_feature (1)..(146): Homolog of NCBI NO: 15219157 NR Description: hypothetical protein [Arabidopsis thaliana]
  misc_feature (1)..(147): Homolog of NCBI NO: 15224585 NR Description: expressed protein [Arabidopsis thaliana]
  misc_feature (1)..(144): Homolog of NCBI NO: 18403435 NR Description: expressed protein [Arabidopsis thaliana]
  misc_feature (1)..(146): Homolog of NCBI NO: 34911864 NR Description: OSJNBb0032K15.9 [Oryza sativa (japonica
  misc_feature (1)..(146): Homolog of NCBI NO: 28393769 NR Description: unknown protein [Arabidopsis thaliana]
  misc_feature (1)..(146): Homolog of NCBI NO: 21593142 NR Description: unknown [Arabidopsis thaliana]
  misc_feature (1)..(147): Homolog of NCBI NO: 18406003 NR Description: expressed protein [Arabidopsis thaliana]

SEQ ID NO: 34004 - protein, 137 aa, Arabidopsis thaliana; identical to SEQ ID NO: 30414
  peptide (1)..(137): Ceres Seq. ID no. 15222722
  misc_feature (1)..(134): Homolog of NCBI NO: 21553643 NR Description: unknown [Arabidopsis thaliana]
  misc_feature (1)..(134): Homolog of NCBI NO: 34904010 NR Description: unnamed protein product [Oryza sativa (japonica
  misc_feature (1)..(137): Homolog of NCBI NO: 30350855 NR Description: hypothetical protein At2g30900 [Arabidopsis
  misc_feature (1)..(136): Homolog of NCBI NO: 15219157 NR Description: hypothetical protein [Arabidopsis thaliana]
  misc_feature (1)..(137): Homolog of NCBI NO: 15224585 NR Description: expressed protein [Arabidopsis thaliana]
  misc_feature (1)..(134): Homolog of NCBI NO: 18403435 NR Description: expressed protein [Arabidopsis thaliana]
  misc_feature (1)..(136): Homolog of NCBI NO: 34911864 NR Description: OSJNBb0032K15.9 [Oryza sativa (japonica
  misc_feature (1)..(136): Homolog of NCBI NO: 28393769 NR Description: unknown protein [Arabidopsis thaliana]
  misc_feature (1)..(136): Homolog of NCBI NO: 21593142 NR Description: unknown [Arabidopsis thaliana]
  misc_feature (1)..(137): Homolog of NCBI NO: 18406003 NR Description: expressed protein [Arabidopsis thaliana]

SEQ ID NO: 34005 - DNA, 1286 bp, Arabidopsis thaliana; identical to SEQ ID NO: 30415
  misc_feature (1)..(1286): Ceres Seq. ID no. 12326413
  misc_feature: MA Experiment ID: 108585 Result: Up-regulated in Transcription
  misc_feature: MA Experiment 108585 PARAMETER Experiment Name: At_5mM_NaNP_cDNA_P Parameter: Timepoint (hr) Value: 6
  misc_feature: MA Experiment 108585 PARAMETER Experiment Name: At_5mM_NaNP_cDNA_P Parameter: Tissue Value: Aerial
  misc_feature: MA Experiment 108585 PARAMETER Experiment Name: At_5mM_NaNP_cDNA_P Parameter: Treatment Value: null
  misc_feature: MA Experiment ID: 20000180 Result: Down-regulated in Transcription
  misc_feature: MA Experiment 20000180 PARAMETER Experiment Name: At_Germinating_Seeds_P Parameter: Age (hr) Value: 24 vs. 0
  misc_feature: MA Experiment 20000180 PARAMETER Experiment Name: At_Germinating_Seeds_P Parameter: Tissue Value: Germinating Seeds
  misc_feature: MA Experiment ID: 20000184 Result: Down-regulated in Transcription
  misc_feature: MA Experiment 20000184 PARAMETER Experiment Name: At_Shoots__P Parameter: Age (day) Value: 7
  misc_feature: MA Experiment 20000184 PARAMETER Experiment Name: At_Shoots__P Parameter: Tissue Value: Shoots vs. Whole Plant
  misc_feature: MA Experiment ID: 20000227 Result: Down-regulated in Transcription
  misc_feature: MA Experiment 20000227 PARAMETER Experiment Name: At_Root-Tips-vs-Tops_P Parameter: Tissue Value: Root Tips vs. Root Tops
  misc_feature: MA Experiment ID: 20001557 Result: Down-regulated in Transcription
  misc_feature: MA Experiment 20001557 PARAMETER Experiment Name: At_Drought_Soil_Dry_P Parameter: Age (day) Value: 27
  misc_feature: MA Experiment 20001557 PARAMETER Experiment Name: At_Drought_Soil_Dry_P Parameter: Organism Value: A. thaliana
  misc_feature: MA Experiment 20001557 PARAMETER Experiment Name: At_Drought_Soil_Dry_P Parameter: Plant Line Value: WS
  misc_feature: MA Experiment 20001557 PARAMETER Experiment Name: At_Drought_Soil_Dry_P Parameter: Post Timepoint (hr) Value: 3
  misc_feature: MA Experiment 20001557 PARAMETER Experiment Name: At_Drought_Soil_Dry_P Parameter: Post-Treatment Value: Re-Water vs. No Drought
  misc_feature: MA Experiment 20001557 PARAMETER Experiment Name: At_Drought_Soil_Dry_P Parameter: Timepoint (day) Value: 13
  misc_feature: MA Experiment 20001557 PARAMETER Experiment Name: At_Drought_Soil_Dry_P Parameter: Treatment Value: Drought vs. No Drought

SEQ ID NO: 34006 - protein, 330 aa, Arabidopsis thaliana; identical to SEQ ID NO: 30416
  peptide (1)..(330): Ceres Seq. ID no. 12326414
  misc_feature (85)..(243): Pfam Name: Metallo-beta-lactamase superfamily Pfam Description: Metallo-beta-lactamase superfamily
  misc_feature (4)..(328): Homolog of NCBI NO: 28143946 NR Description: glyoxalase II [Brassica juncea]
  misc_feature (1)..(328): Homolog of NCBI NO: 21070362 NR Description: glyoxalase II [Pennisetum glaucum]
  misc_feature (1)..(328): Homolog of NCBI NO: 16209608 NR Description: glyoxalase II [Oryza sativa]
  misc_feature (1)..(328): Homolog of NCBI NO: 2570340 NR Description: glyoxalase II mitochondrial isozyme [Arabidopsis
  misc_feature (1)..(328): Homolog of NCBI NO: 18406237 NR Description: glyoxalase II (hydroxyacylglutathione
  misc_feature (1)..(328): Homolog of NCBI NO: 15224661 NR Description: glyoxalase II, putative (hydroxyacylglutathione
  misc_feature (1)..(328): Homolog of NCBI NO: 30684920 NR Description: glyoxalase II, putative (hydroxyacylglutathione
  misc_feature (18)..(330): Homolog of NCBI NO: 25406895 NR Description: hypothetical protein [imported] - Arabidopsis
  misc_feature (1)..(330): Homolog of NCBI NO: 18390616 NR Description: glyoxalase II, putative (hydroxyacylglutathione
  misc_feature (1)..(330): Homolog of NCBI NO: 30679573 NR Description: glyoxalase II, putative (hydroxyacylglutathione

SEQ ID NO: 34007 - protein, 288 aa, Arabidopsis thaliana; identical to SEQ ID NO: 30417
  peptide (1)..(288): Ceres Seq. ID no. 12326415
  misc_feature (43)..(201): Pfam Name: Metallo-beta-lactamase superfamily Pfam Description: Metallo-beta-lactamase superfamily
  misc_feature (1)..(286): Homolog of NCBI NO: 28143946 NR Description: glyoxalase II [Brassica juncea]
  misc_feature (1)..(286): Homolog of NCBI NO: 21070362 NR Description: glyoxalase II [Pennisetum glaucum]
  misc_feature (1)..(286): Homolog of NCBI NO: 16209608 NR Description: glyoxalase II [Oryza sativa]
  misc_feature (1)..(286): Homolog of NCBI NO: 2570340 NR Description: glyoxalase II mitochondrial isozyme [Arabidopsis
  misc_feature (1)..(286): Homolog of NCBI NO: 18406237 NR Description: glyoxalase II (hydroxyacylglutathione
  misc_feature (1)..(286): Homolog of NCBI NO: 15224661 NR Description: glyoxalase II, putative (hydroxyacylglutathione
  misc_feature (1)..(286): Homolog of NCBI NO: 30684920 NR Description: glyoxalase II, putative (hydroxyacylglutathione
  misc_feature (1)..(288): Homolog of NCBI NO: 25406895 NR Description: hypothetical protein [imported] - Arabidopsis
  misc_feature (1)..(288): Homolog of NCBI NO: 18390616 NR Description: glyoxalase II, putative (hydroxyacylglutathione
  misc_feature (1)..(288): Homolog of NCBI NO: 30679573 NR Description: glyoxalase II, putative (hydroxyacylglutathione

SEQ ID NO: 34008 - protein, 220 aa, Arabidopsis thaliana; identical to SEQ ID NO: 30418
  peptide (1)..(220): Ceres Seq. ID no. 12326416
  misc_feature (1)..(133): Pfam Name: Metallo-beta-lactamase superfamily Pfam Description: Metallo-beta-lactamase superfamily
  misc_feature (1)..(218): Homolog of NCBI NO: 28143946 NR Description: glyoxalase II [Brassica juncea]
  misc_feature (1)..(218): Homolog of NCBI NO: 21070362 NR Description: glyoxalase II [Pennisetum glaucum]
  misc_feature (1)..(218): Homolog of NCBI NO: 16209608 NR Description: glyoxalase II [Oryza sativa]
  misc_feature (1)..(218): Homolog of NCBI NO: 2570340 NR Description: glyoxalase II mitochondrial isozyme [Arabidopsis
  misc_feature (1)..(218): Homolog of NCBI NO: 18406237 NR Description: glyoxalase II (hydroxyacylglutathione
  misc_feature (1)..(218): Homolog of NCBI NO: 15224661 NR Description: glyoxalase II, putative (hydroxyacylglutathione
  misc_feature (1)..(218): Homolog of NCBI NO: 30684920 NR Description: glyoxalase II, putative (hydroxyacylglutathione
  misc_feature (1)..(220): Homolog of NCBI NO: 25406895 NR Description: hypothetical protein [imported] - Arabidopsis
  misc_feature (1)..(220): Homolog of NCBI NO: 18390616 NR Description: glyoxalase II, putative (hydroxyacylglutathione
  misc_feature (1)..(220): Homolog of NCBI NO: 30679573 NR Description: glyoxalase II, putative (hydroxyacylglutathione

SEQ ID NO: 34009 - DNA, 1267 bp, Arabidopsis thaliana; identical to SEQ ID NO: 30419
  misc_feature (1)..(1267): Ceres Seq. ID no. 12334784
  misc_feature: MA Experiment ID: 108462 Result: Down-regulated in Transcription
  misc_feature: MA Experiment 108462 PARAMETER Experiment Name: At_Germinating_Seeds_cDNA_P Parameter: Age (day) Value: 2 vs. 0
  misc_feature: MA Experiment 108462 PARAMETER Experiment Name: At_Germinating_Seeds_cDNA_P Parameter: Tissue Value: Germinating Seeds
  misc_feature: MA Experiment ID: 108569 Result: Down-regulated in Transcription
  misc_feature: MA Experiment 108569 PARAMETER Experiment Name: At_0.001%_MeJA__cDNA_P Parameter: Timepoint (hr) Value: 6
  misc_feature: MA Experiment 108569 PARAMETER Experiment Name: At_0.001%_MeJA__cDNA_P Parameter: Tissue Value: Aerial
  misc_feature: MA Experiment 108569 PARAMETER Experiment Name: At_0.001%_MeJA__cDNA_P Parameter: Treatment Value: 0.001% MeJA vs. No Treatment
  misc_feature: MA Experiment ID: 20000184 Result: Down-regulated in Transcription
  misc_feature: MA Experiment 20000184 PARAMETER Experiment Name: At_Shoots__P Parameter: Age (day) Value: 7
  misc_feature: MA Experiment 20000184 PARAMETER Experiment Name: At_Shoots__P Parameter: Tissue Value: Shoots vs. Whole Plant
  misc_feature: MA Experiment ID: 20000794 Result: Up-regulated in Transcription
  misc_feature: MA Experiment 20000794 PARAMETER Experiment Name: At_Petals_P Parameter: Age (day) Value: 23-25 days
  misc_feature: MA Experiment 20000794 PARAMETER Experiment Name: At_Petals_P Parameter: Plant Line Value: WS
  misc_feature: MA Experiment 20000794 PARAMETER Experiment Name: At_Petals_P Parameter: Tissue Value: Petals vs. Whole plant

SEQ ID NO: 34010 - protein, 383 aa, Arabidopsis thaliana; identical to SEQ ID NO: 30420
  peptide (1)..(383): Ceres Seq. ID no. 12334785
  misc_feature (331)..(369): Pfam Name: Zinc finger, C3HC4 type (RING finger) Pfam Description: Zinc finger, C3HC4 type (RING finger)
  misc_feature (2)..(377): Homolog of NCBI NO: 34364873 NR Description: hypothetical protein [Homo sapiens]
  misc_feature (2)..(377): Homolog of NCBI NO: 28175093 NR Description: Similar to ring finger protein 40 [Homo sapiens]
  misc_feature (2)..(381): Homolog of NCBI NO: 26335243 NR Description: unnamed protein product [Mus musculus]
  misc_feature (7)..(377): Homolog of NCBI NO: 33284892 NR Description: SI:bZ1C10.1.2 (novel ring finger protein) [Danio
  misc_feature (1)..(379): Homolog of NCBI NO: 30689877 NR Description: zinc finger (C3HC4-type RING finger) protein
  misc_feature (1)..(379): Homolog of NCBI NO: 7486945 NR Description: hypothetical protein At2g44950 [imported] -
  misc_feature (29)..(383): Homolog of NCBI NO: 37536934 NR Description: unknown protein [Oryza sativa (japonica
  misc_feature (19)..(383): Homolog of NCBI NO: 21553880 NR Description: unknown [Arabidopsis thaliana]
  misc_feature (4)..(383): Homolog of NCBI NO: 25405809 NR Description: unknown protein, 71207-66119 [imported] -
  misc_feature (1)..(383): Homolog of NCBI NO: 18405292 NR Description: Expressed protein

SEQ ID NO: 34011 - protein, 365 aa, Arabidopsis thaliana; identical to SEQ ID NO: 30421
  peptide (1)..(365): Ceres Seq. ID no. 12334786
  misc_feature (313)..(351): Pfam Name: Zinc finger, C3HC4 type (RING finger) Pfam Description: Zinc finger, C3HC4 type (RING finger)
  misc_feature (1)..(359): Homolog of NCBI NO: 34364873 NR Description: hypothetical protein [Homo sapiens]
  misc_feature (1)..(359): Homolog of NCBI NO: 28175093 NR Description: Similar to ring finger protein 40 [Homo sapiens]
  misc_feature (1)..(363): Homolog of NCBI NO: 26335243 NR Description: unnamed protein product [Mus musculus]
  misc_feature (1)..(359): Homolog of NCBI NO: 33284892 NR Description: SI:bZ1C10.1.2 (novel ring finger protein) [Danio
  misc_feature (1)..(361): Homolog of NCBI NO: 30689877 NR Description: zinc finger (C3HC4-type RING finger) protein
  misc_feature (1)..(361): Homolog of NCBI NO: 7486945 NR Description: hypothetical protein At2g44950 [imported] -
  misc_feature (11)..(365): Homolog of NCBI NO: 37536934 NR Description: unknown protein [Oryza sativa (japonica
  misc_feature (1)..(365): Homolog of NCBI NO: 21553880 NR Description: unknown [Arabidopsis thaliana]
  misc_feature (1)..(365): Homolog of NCBI NO: 25405809 NR Description: unknown protein, 71207-66119 [imported] -
  misc_feature (1)..(365): Homolog of NCBI NO: 18405292 NR Description: Expressed protein

SEQ ID NO: 34012 - protein, 242 aa, Arabidopsis thaliana; identical to SEQ ID NO: 30422
  peptide (1)..(242): Ceres Seq. ID no. 12334787
  misc_feature (190)..(228): Pfam Name: Zinc finger, C3HC4 type (RING finger) Pfam Description: Zinc finger, C3HC4 type (RING finger)
  misc_feature (1)..(236): Homolog of NCBI NO: 34364873 NR Description: hypothetical protein [Homo sapiens]
  misc_feature (1)..(236): Homolog of NCBI NO: 28175093 NR Description: Similar to ring finger protein 40 [Homo sapiens]
  misc_feature (1)..(240): Homolog of NCBI NO: 26335243 NR Description: unnamed protein product [Mus musculus]
  misc_feature (1)..(236): Homolog of NCBI NO: 33284892 NR Description: SI:bZ1C10.1.2 (novel ring finger protein) [Danio
  misc_feature (1)..(238): Homolog of NCBI NO: 30689877 NR Description: zinc finger (C3HC4-type RING finger) protein
  misc_feature (1)..(238): Homolog of NCBI NO: 7486945 NR Description: hypothetical protein At2g44950 [imported] -
  misc_feature (1)..(242): Homolog of NCBI NO: 37536934 NR Description: unknown protein [Oryza sativa (japonica
  misc_feature (1)..(242): Homolog of NCBI NO: 21553880 NR Description: unknown [Arabidopsis thaliana]
  misc_feature (1)..(242): Homolog of NCBI NO: 25405809 NR Description: unknown protein, 71207-66119 [imported] -
  misc_feature (1)..(242): Homolog of NCBI NO: 18405292 NR Description: Expressed protein

SEQ ID NO: 34013 - DNA, 1182 bp, Arabidopsis thaliana; identical to SEQ ID NO: 30423
  misc_feature (1)..(1182): Ceres Seq. ID no. 12482670
  misc_feature: MA Experiment ID: 20000179 Result: Up-regulated in Transcription
  misc_feature: MA Experiment 20000179 PARAMETER Experiment Name: At_Germinating_Seeds_P Parameter: Age (hr) Value: 6 vs. 0
  misc_feature: MA Experiment 20000179 PARAMETER Experiment Name: At_Germinating_Seeds_P Parameter: Tissue Value: Germinating Seeds
  misc_feature: MA Experiment ID: 20000227 Result: Up-regulated in Transcription
  misc_feature: MA Experiment 20000227 PARAMETER Experiment Name: At_Root-Tips-vs-Tops_P Parameter: Tissue Value: Root Tips vs. Root Tops
  misc_feature: MA Experiment ID: 20000234 Result: Up-regulated in Transcription
  misc_feature: MA Experiment 20000234 PARAMETER Experiment Name: At_Siliques_P Parameter: Age (day) Value: 21
  misc_feature: MA Experiment 20000234 PARAMETER Experiment Name: At_Siliques_P Parameter: Organism Value: A. thaliana
  misc_feature: MA Experiment 20000234 PARAMETER Experiment Name: At_Siliques_P Parameter: Plant Line Value: WS
  misc_feature: MA Experiment 20000234 PARAMETER Experiment Name: At_Siliques_P Parameter: Tissue Value: Less Than 5mm Siliques vs. Whole Plant
  misc_feature: MA Experiment ID: 20000235 Result: Up-regulated in Transcription
  misc_feature: MA Experiment 20000235 PARAMETER Experiment Name: At_Siliques_P Parameter: Age (day) Value: 21
  misc_feature: MA Experiment 20000235 PARAMETER Experiment Name: At_Siliques_P Parameter: Organism Value: A. thaliana
  misc_feature: MA Experiment 20000235 PARAMETER Experiment Name: At_Siliques_P Parameter: Plant Line Value: WS
  misc_feature: MA Experiment 20000235 PARAMETER Experiment Name: At_Siliques_P Parameter: Tissue Value: 5-10mm Siliques vs. Whole Plant
  misc_feature: MA Experiment ID: 20000264 Result: Up-regulated in Transcription
  misc_feature: MA Experiment 20000264 PARAMETER Experiment Name: At_Open_Flower_P Parameter: Age (day) Value: 21
  misc_feature: MA Experiment 20000264 PARAMETER Experiment Name: At_Open_Flower_P Parameter: Plant Line Value: WS
  misc_feature: MA Experiment 20000264 PARAMETER Experiment Name: At_Open_Flower_P Parameter: Tissue Value: Open Flower vs. Whole Plant
  misc_feature: MA Experiment ID: 20000286 Result: Up-regulated in Transcription
  misc_feature: MA Experiment 20000286 PARAMETER Experiment Name: At_Open_Flower_P Parameter: Age (day) Value: 21
  misc_feature: MA Experiment 20000286 PARAMETER Experiment Name: At_Open_Flower_P Parameter: Plant Line Value: WS
  misc_feature: MA Experiment 20000286 PARAMETER Experiment Name: At_Open_Flower_P Parameter: Tissue Value: Half Open vs. Whole Plant
  misc_feature: MA Experiment ID: 20001771 Result: Up-regulated in Transcription
  misc_feature: MA Experiment 20001771 PARAMETER Experiment Name: At_Far-red-enriched-adult_P Parameter: Age (day) Value: 28
  misc_feature: MA Experiment 20001771 PARAMETER Experiment Name: At_Far-red-enriched-adult_P Parameter: Light Value: Far-red enriched vs. White
  misc_feature: MA Experiment 20001771 PARAMETER Experiment Name: At_Far-red-enriched-adult_P Parameter: Organism Value: A. thaliana
  misc_feature: MA Experiment 20001771 PARAMETER Experiment Name: At_Far-red-enriched-adult_P Parameter: Plant Line Value: Columbia
  misc_feature: MA Experiment 20001771 PARAMETER Experiment Name: At_Far-red-enriched-adult_P Parameter: Timepoint (hr) Value: 16
  misc_feature: MA Experiment 20001771 PARAMETER Experiment Name: At_Far-red-enriched-adult_P Parameter: Tissue Value: Aerial

SEQ ID NO: 34014 - protein, 346 aa, Arabidopsis thaliana; identical to SEQ ID NO: 30424
  peptide (1)..(346): Ceres Seq. ID no. 12482671
  misc_feature (54)..(337): Homolog of NCBI NO: 15221343 NR Description: putative bifunctional nuclease
  misc_feature (62)..(337): Homolog of NCBI NO: 34895514 NR Description: putative bifunctional nuclease
  misc_feature (62)..(337): Homolog of NCBI NO: 9558456 NR Description: unnamed protein product [Oryza sativa (japonica
  misc_feature (60)..(337): Homolog of NCBI NO: 4099835 NR Description: bifunctional nuclease [Zinnia elegans]
  misc_feature (88)..(152): Homolog of NCBI NO: 7485717 NR Description: hypothetical protein F18E5.210 - Arabidopsis
  misc_feature (183)..(346): Homolog of NCBI NO: 7485717 NR Description: hypothetical protein F18E5.210 - Arabidopsis
  misc_feature (53)..(344): Homolog of NCBI NO: 22328857 NR Description: expressed protein; protein id: At4g21585.1
  misc_feature (57)..(344): Homolog of NCBI NO: 21593575 NR Description: endonuclease, putative [Arabidopsis thaliana]
  misc_feature (57)..(344): Homolog of NCBI NO: 18415729 NR Description: endonuclease, putative
  misc_feature (53)..(346): Homolog of NCBI NO: 18415727 NR Description: putative bifunctional nuclease

SEQ ID NO: 34015 - protein, 294 aa, Arabidopsis thaliana; identical to SEQ ID NO: 30425
  peptide (1)..(294): Ceres Seq. ID no. 12482672
  misc_feature (2)..(285): Homolog of NCBI NO: 15221343 NR Description: putative bifunctional nuclease
  misc_feature (10)..(285): Homolog of NCBI NO: 34895514 NR Description: putative bifunctional nuclease
  misc_feature (10)..(285): Homolog of NCBI NO: 9558456 NR Description: unnamed protein product [Oryza sativa (japonica
  misc_feature (8)..(285): Homolog of NCBI NO: 4099835 NR Description: bifunctional nuclease [Zinnia elegans]
  misc_feature (36)..(100): Homolog of NCBI NO: 7485717 NR Description: hypothetical protein F18E5.210 - Arabidopsis
  misc_feature (131)..(294): Homolog of NCBI NO: 7485717 NR Description: hypothetical protein F18E5.210 - Arabidopsis
  misc_feature (1)..(292): Homolog of NCBI NO: 22328857 NR Description: expressed protein; protein id: At4g21585.1
  misc_feature (5)..(292): Homolog of NCBI NO: 21593575 NR Description: endonuclease, putative [Arabidopsis thaliana]
  misc_feature (5)..(292): Homolog of NCBI NO: 18415729 NR Description: endonuclease, putative
  misc_feature (1)..(294): Homolog of NCBI NO: 18415727 NR Description: putative bifunctional nuclease

SEQ ID NO: 34016 - protein, 288 aa, Arabidopsis thaliana; identical to SEQ ID NO: 30426
  peptide (1)..(288): Ceres Seq. ID no. 12482673
  misc_feature (1)..(279): Homolog of NCBI NO: 15221343 NR Description: putative bifunctional nuclease
  misc_feature (4)..(279): Homolog of NCBI NO: 34895514 NR Description: putative bifunctional nuclease
  misc_feature (4)..(279): Homolog of NCBI NO: 9558456 NR Description: unnamed protein product [Oryza sativa (japonica
  misc_feature (2)..(279): Homolog of NCBI NO: 4099835 NR Description: bifunctional nuclease [Zinnia elegans]
  misc_feature (30)..(94): Homolog of NCBI NO: 7485717 NR Description: hypothetical protein F18E5.210 - Arabidopsis
  misc_feature (125)..(288): Homolog of NCBI NO: 7485717 NR Description: hypothetical protein F18E5.210 - Arabidopsis
  misc_feature (1)..(286): Homolog of NCBI NO: 22328857 NR Description: expressed protein; protein id: At4g21585.1
  misc_feature (1)..(286): Homolog of NCBI NO: 21593575 NR Description: endonuclease, putative [Arabidopsis thaliana]
  misc_feature (1)..(286): Homolog of NCBI NO: 18415729 NR Description: endonuclease, putative
  misc_feature (1)..(288): Homolog of NCBI NO: 18415727 NR Description: putative bifunctional nuclease

SEQ ID NO: 34017 - DNA, 1375 bp, Arabidopsis thaliana; identical to SEQ ID NO: 30427
  misc_feature (1)..(1375): Ceres Seq. ID no. 13491061
  misc_feature: MA Experiment ID: 108434 Result: Up-regulated in Transcription
  misc_feature: MA Experiment 108434 PARAMETER Experiment Name: At_Root_Tips_cDNA_P Parameter: Tissue Value: Root Tips
  misc_feature: MA Experiment ID: 108462 Result: Down-regulated in Transcription
  misc_feature: MA Experiment 108462 PARAMETER Experiment Name: At_Germinating_Seeds_cDNA_P Parameter: Age (day) Value: 2 vs. 0
  misc_feature: MA Experiment 108462 PARAMETER Experiment Name: At_Germinating_Seeds_cDNA_P Parameter: Tissue Value: Germinating Seeds
  misc_feature: MA Experiment ID: 108463 Result: Down-regulated in Transcription
  misc_feature: MA Experiment 108463 PARAMETER Experiment Name: At_Germinating_Seeds_cDNA_P Parameter: Age (day) Value: 3 vs. 0
  misc_feature: MA Experiment 108463 PARAMETER Experiment Name: At_Germinating_Seeds_cDNA_P Parameter: Tissue Value: Germinating Seeds
  misc_feature: MA Experiment ID: 108577 Result: Down-regulated in Transcription
  misc_feature: MA Experiment 108577 PARAMETER Experiment Name: At_42deg_Heat_cDNA_P Parameter: Temperature (deg C) Value: 42 vs. 22
  misc_feature: MA Experiment 108577 PARAMETER Experiment Name: At_42deg_Heat_cDNA_P Parameter: Timepoint (hr) Value: 6
  misc_feature: MA Experiment 108577 PARAMETER Experiment Name: At_42deg_Heat_cDNA_P Parameter: Tissue Value: Aerial
  misc_feature: MA Experiment ID: 20000437 Result: Down-regulated in Transcription
  misc_feature: MA Experiment 20000437 PARAMETER Experiment Name: At_Drought_P Parameter: Age (day) Value: 8
  misc_feature: MA Experiment 20000437 PARAMETER Experiment Name: At_Drought_P Parameter: Organism Value: A. thaliana
  misc_feature: MA Experiment 20000437 PARAMETER Experiment Name: At_Drought_P Parameter: Plant Line Value: WS
  misc_feature: MA Experiment 20000437 PARAMETER Experiment Name: At_Drought_P Parameter: Timepoint (hr) Value: 24
  misc_feature: MA Experiment 20000437 PARAMETER Experiment Name: At_Drought_P Parameter: Tissue Value: Whole Plant
  misc_feature: MA Experiment 20000437 PARAMETER Experiment Name: At_Drought_P Parameter: Treatment Value: Drought vs. No Drought
  misc_feature: MA Experiment ID: 20000496 Result: Up-regulated in Transcription
  misc_feature: MA Experiment 20000496 PARAMETER Experiment Name: At_Guard_Cells_P Parameter: Harvest Date Value: 7/19/2002
  misc_feature: MA Experiment 20000496 PARAMETER Experiment Name: At_Guard_Cells_P Parameter: Organism Value: Canola
  misc_feature: MA Experiment 20000496 PARAMETER Experiment Name: At_Guard_Cells_P Parameter: Tissue Value: Guard Cells vs. Leaves
  misc_feature: MA Experiment ID: 20001905 Result: Down-regulated in Transcription
  misc_feature: MA Experiment 20001905 PARAMETER Experiment Name: At_Drought_Reproduction_P Parameter: Age (day) Value: 40
  misc_feature: MA Experiment 20001905 PARAMETER Experiment Name: At_Drought_Reproduction_P Parameter: Organism Value: A. thaliana
  misc_feature: MA Experiment 20001905 PARAMETER Experiment Name: At_Drought_Reproduction_P Parameter: Plant Line Value: WS
  misc_feature: MA Experiment 20001905 PARAMETER Experiment Name: At_Drought_Reproduction_P Parameter: Timepoint (day) Value: 10
  misc_feature: MA Experiment 20001905 PARAMETER Experiment Name: At_Drought_Reproduction_P Parameter: Tissue Value: Rosettes
  misc_feature: MA Experiment 20001905 PARAMETER Experiment Name: At_Drought_Reproduction_P Parameter: Treatment Value: Drought vs. No Drought

SEQ ID NO: 34018 - protein, 298 aa, Arabidopsis thaliana; identical to SEQ ID NO: 30428
  peptide (1)..(298): Ceres Seq. ID no. 13491062
  misc_feature (150)..(205): Pfam Name: KH domain Pfam Description: KH domain
  misc_feature (41)..(296): Homolog of NCBI NO: 15241136 NR Description: KH domain protein [Arabidopsis thaliana]
  misc_feature (30)..(296): Homolog of NCBI NO: 15224909 NR Description: KH domain protein [Arabidopsis thaliana]
  misc_feature (41)..(296): Homolog of NCBI NO: 19424087 NR Description: putative RNA-binding protein [Arabidopsis
  misc_feature (31)..(295): Homolog of NCBI NO: 34900448 NR Description: contains EST C27129(C51039)~similar to
  misc_feature (4)..(296): Homolog of NCBI NO: 20268733 NR Description: unknown protein [Arabidopsis thaliana]
  misc_feature (4)..(296): Homolog of NCBI NO: 15236738 NR Description: KH domain protein [Arabidopsis thaliana]
  misc_feature (62)..(296): Homolog of NCBI NO: 34907446 NR Description: P0434C04.5 [Oryza sativa (japonica
  misc_feature (136)..(298): Homolog of NCBI NO: 25402559 NR Description: hypothetical protein [imported] - Arabidopsis
  misc_feature (1)..(298): Homolog of NCBI NO: 16930473 NR Description: At1g09660/F21M12_5 [Arabidopsis thaliana]
  misc_feature (1)..(298): Homolog of NCBI NO: 22329449 NR Description: KH domain quaking protein, putative [Arabidopsis

SEQ ID NO: 34019 - protein, 297 aa, Arabidopsis thaliana; identical to SEQ ID NO: 30429
  peptide (1)..(297): Ceres Seq. ID no. 13491063
  misc_feature (149)..(204): Pfam Name: KH domain Pfam Description: KH domain
  misc_feature (40)..(295): Homolog of NCBI NO: 15241136 NR Description: KH domain protein [Arabidopsis thaliana]
  misc_feature (29)..(295): Homolog of NCBI NO: 15224909 NR Description: KH domain protein [Arabidopsis thaliana]
  misc_feature (40)..(295): Homolog of NCBI NO: 19424087 NR Description: putative RNA-binding protein [Arabidopsis
  misc_feature (30)..(294): Homolog of NCBI NO: 34900448 NR Description: contains EST C27129(C51039)~similar to
  misc_feature (3)..(295): Homolog of NCBI NO: 20268733 NR Description: unknown protein [Arabidopsis thaliana]
  misc_feature (3)..(295): Homolog of NCBI NO: 15236738 NR Description: KH domain protein [Arabidopsis thaliana]
  misc_feature (61)..(295): Homolog of NCBI NO: 34907446 NR Description: P0434C04.5 [Oryza sativa (japonica
  misc_feature (135)..(297): Homolog of NCBI NO: 25402559 NR Description: hypothetical protein [imported] - Arabidopsis
  misc_feature (1)..(297): Homolog of NCBI NO: 16930473 NR Description: At1g09660/F21M12_5 [Arabidopsis thaliana]
  misc_feature (1)..(297): Homolog of NCBI NO: 22329449 NR Description: KH domain quaking protein, putative [Arabidopsis

SEQ ID NO: 34020 - protein, 288 aa, Arabidopsis thaliana; identical to SEQ ID NO: 30430
  peptide (1)..(288): Ceres Seq. ID no. 13491064
  misc_feature (140)..(195): Pfam Name: KH domain Pfam Description: KH domain
  misc_feature (31)..(286): Homolog of NCBI NO: 15241136 NR Description: KH domain protein [Arabidopsis thaliana]
  misc_feature (20)..(286): Homolog of NCBI NO: 15224909 NR Description: KH domain protein [Arabidopsis thaliana]
  misc_feature (31)..(286): Homolog of NCBI NO: 19424087 NR Description: putative RNA-binding protein [Arabidopsis
  misc_feature (21)..(285): Homolog of NCBI NO: 34900448 NR Description: contains EST C27129(C51039)~similar to
  misc_feature (1)..(286): Homolog of NCBI NO: 20268733 NR Description: unknown protein [Arabidopsis thaliana]
  misc_feature (1)..(286): Homolog of NCBI NO: 15236738 NR Description: KH domain protein [Arabidopsis thaliana]
  misc_feature (52)..(286): Homolog of NCBI NO: 34907446 NR Description: P0434C04.5 [Oryza sativa (japonica
  misc_feature (126)..(288): Homolog of NCBI NO: 25402559 NR Description: hypothetical protein [imported] - Arabidopsis
  misc_feature (1)..(288): Homolog of NCBI NO: 16930473 NR Description: At1g09660/F21M12_5 [Arabidopsis thaliana]
  misc_feature (1)..(288): Homolog of NCBI NO: 22329449 NR Description: KH domain quaking protein, putative [Arabidopsis

SEQ ID NO: 34021 - DNA, 1358 bp, Arabidopsis thaliana; identical to SEQ ID NO: 30431
  misc_feature (1)..(1358): Ceres Seq. ID no. 12423111
  misc_feature: MA Experiment ID: 108434 Result: Down-regulated in Transcription
  misc_feature: MA Experiment 108434 PARAMETER Experiment Name: At_Root_Tips_cDNA_P Parameter: Tissue Value: Root Tips
  misc_feature: MA Experiment ID: 108488 Result: Down-regulated in Transcription
  misc_feature: MA Experiment ID: 20000111 Result: Down-regulated in Transcription
  misc_feature: MA Experiment 20000111 PARAMETER Experiment Name: At_42deg_Heat_cDNA_P Parameter: Temperature (deg C) Value: 42 vs. 22
  misc_feature: MA Experiment 20000111 PARAMETER Experiment Name: At_42deg_Heat_cDNA_P Parameter: Timepoint (hr) Value: 6
  misc_feature: MA Experiment 20000111 PARAMETER Experiment Name: At_42deg_Heat_cDNA_P Parameter: Tissue Value: Aerial
  misc_feature: MA Experiment ID: 20000171 Result: Down-regulated in Transcription
  misc_feature: MA Experiment 20000171 PARAMETER Experiment Name: At_42deg_Heat_P Parameter: Age (day) Value: 14
  misc_feature: MA Experiment 20000171 PARAMETER Experiment Name: At_42deg_Heat_P Parameter: Organism Value: A. thaliana
  misc_feature: MA Experiment 20000171 PARAMETER Experiment Name: At_42deg_Heat_P Parameter: Plant Line Value: WS
  misc_feature: MA Experiment 20000171 PARAMETER Experiment Name: At_42deg_Heat_P Parameter: Temperature (deg C) Value: 42 vs. 22
  misc_feature: MA Experiment 20000171 PARAMETER Experiment Name: At_42deg_Heat_P Parameter: Timepoint (hr) Value: 1
  misc_feature: MA Experiment 20000171 PARAMETER Experiment Name: At_42deg_Heat_P Parameter: Tissue Value: Aerial
  misc_feature: MA Experiment ID: 20000173 Result: Down-regulated in Transcription
  misc_feature: MA Experiment 20000173 PARAMETER Experiment Name: At_42deg_Heat_P Parameter: Age (day) Value: 14
  misc_feature: MA Experiment 20000173 PARAMETER Experiment Name: At_42deg_Heat_P Parameter: Organism Value: A. thaliana
  misc_feature: MA Experiment 20000173 PARAMETER Experiment Name: At_42deg_Heat_P Parameter: Plant Line Value: WS
  misc_feature: MA Experiment 20000173 PARAMETER Experiment Name: At_42deg_Heat_P Parameter: Temperature (deg C) Value: 42 vs. 22
  misc_feature: MA Experiment 20000173 PARAMETER Experiment Name: At_42deg_Heat_P Parameter: Timepoint (hr) Value: 6
  misc_feature: MA Experiment 20000173 PARAMETER Experiment Name: At_42deg_Heat_P Parameter: Tissue Value: Aerial
  misc_feature: MA Experiment ID: 20000182 Result: Up-regulated in Transcription
  misc_feature: MA Experiment 20000182 PARAMETER Experiment Name: At_2mM_SA_P Parameter: Age (day) Value: 14
  misc_feature: MA Experiment 20000182 PARAMETER Experiment Name: At_2mM_SA_P Parameter: Organism Value: A. thaliana
  misc_feature: MA Experiment 20000182 PARAMETER Experiment Name: At_2mM_SA_P Parameter: Plant Line Value: WS
  misc_feature: MA Experiment 20000182 PARAMETER Experiment Name: At_2mM_SA_P Parameter: Timepoint (hr) Value: 6
  misc_feature: MA Experiment 20000182 PARAMETER Experiment Name: At_2mM_SA_P Parameter: Tissue Value: Aerial
  misc_feature: MA Experiment 20000182 PARAMETER Experiment Name: At_2mM_SA_P Parameter: Treatment Value: 2mM SA vs. No Treatment
  misc_feature: MA Experiment ID: 20000184 Result: Down-regulated in Transcription
  misc_feature: MA Experiment 20000184 PARAMETER Experiment Name: At_Shoots__P Parameter: Age (day) Value: 7
  misc_feature: MA Experiment 20000184 PARAMETER Experiment Name: At_Shoots__P Parameter: Tissue Value: Shoots vs. Whole Plant
  misc_feature: MA Experiment ID: 20000234 Result: Down-regulated in Transcription
  misc_feature: MA Experiment 20000234 PARAMETER Experiment Name: At_Siliques_P Parameter: Age (day) Value: 21
  misc_feature: MA Experiment 20000234 PARAMETER Experiment Name: At_Siliques_P Parameter: Organism Value: A. thaliana
  misc_feature: MA Experiment 20000234 PARAMETER Experiment Name: At_Siliques_P Parameter: Plant Line Value: WS
  misc_feature: MA Experiment 20000234 PARAMETER Experiment Name: At_Siliques_P Parameter: Tissue Value: Less Than 5mm Siliques vs. Whole Plant
  misc_feature: MA Experiment ID: 20000264 Result: Down-regulated in Transcription
  misc_feature: MA Experiment 20000264 PARAMETER Experiment Name: At_Open_Flower_P Parameter: Age (day) Value: 21
  misc_feature: MA Experiment 20000264 PARAMETER Experiment Name: At_Open_Flower_P Parameter: Plant Line Value: WS
  misc_feature: MA Experiment 20000264 PARAMETER Experiment Name: At_Open_Flower_P Parameter: Tissue Value: Open Flower vs. Whole Plant
  misc_feature: MA Experiment ID: 20000265 Result: Down-regulated in Transcription
  misc_feature: MA Experiment 20000265 PARAMETER Experiment Name: At_Open_Flower_P Parameter: Age (day) Value: 21
  misc_feature: MA Experiment 20000265 PARAMETER Experiment Name: At_Open_Flower_P Parameter: Plant Line Value: WS
  misc_feature: MA Experiment 20000265 PARAMETER Experiment Name: At_Open_Flower_P Parameter: Tissue Value: Closed Flower vs. Whole Plant
  misc_feature: MA Experiment ID: 20000286 Result: Down-regulated in Transcription
  misc_feature: MA Experiment 20000286 PARAMETER Experiment Name: At_Open_Flower_P Parameter: Age (day) Value: 21
  misc_feature: MA Experiment 20000286 PARAMETER Experiment Name: At_Open_Flower_P Parameter: Plant Line Value: WS
  misc_feature: MA Experiment 20000286 PARAMETER Experiment Name: At_Open_Flower_P Parameter: Tissue Value: Half Open vs. Whole Plant
  misc_feature: MA Experiment ID: 20000438 Result: Down-regulated in Transcription
  misc_feature: MA Experiment 20000438 PARAMETER Experiment Name: At_Shoots__P Parameter: Age (day) Value: 14
  misc_feature: MA Experiment 20000438 PARAMETER Experiment Name: At_Shoots__P Parameter: Tissue Value: Shoots vs. Whole Plant
  misc_feature: MA Experiment ID: 20000452 Result: Up-regulated in Transcription
  misc_feature: MA Experiment 20000452 PARAMETER Experiment Name: At_CS6879_Shoots-Roots_P Parameter: Age (day) Value: 14
  misc_feature: MA Experiment 20000452 PARAMETER Experiment Name: At_CS6879_Shoots-Roots_P Parameter: Organism Value: A. thaliana
  misc_feature: MA Experiment 20000452 PARAMETER Experiment Name: At_CS6879_Shoots-Roots_P Parameter: Plant Line Value: CS6879 vs. WS
  misc_feature: MA Experiment 20000452 PARAMETER Experiment Name: At_CS6879_Shoots-Roots_P Parameter: Tissue Value: Shoots
  misc_feature: MA Experiment ID: 20000495 Result: Down-regulated in Transcription
  misc_feature: MA Experiment 20000495 PARAMETER Experiment Name: At_Guard_Cells_P Parameter: Harvest Date Value: 8/2/2002
  misc_feature: MA Experiment 20000495 PARAMETER Experiment Name: At_Guard_Cells_P Parameter: Organism Value: A. thaliana
  misc_feature: MA Experiment 20000495 PARAMETER Experiment Name: At_Guard_Cells_P Parameter: Tissue Value: Guard Cells vs. Leaves
  misc_feature: MA Experiment ID: 20000496 Result: Down-regulated in Transcription
  misc_feature: MA Experiment 20000496 PARAMETER Experiment Name: At_Guard_Cells_P Parameter: Harvest Date Value: 7/19/2002
  misc_feature: MA Experiment 20000496 PARAMETER Experiment Name: At_Guard_Cells_P Parameter: Organism Value: Canola
  misc_feature: MA Experiment 20000496 PARAMETER Experiment Name: At_Guard_Cells_P Parameter: Tissue Value: Guard Cells vs. Leaves
  misc_feature: MA Experiment ID: 20000794 Result: Down-regulated in Transcription
  misc_feature: MA Experiment 20000794 PARAMETER Experiment Name: At_Petals_P Parameter: Age (day) Value: 23-25 days
  misc_feature: MA Experiment 20000794 PARAMETER Experiment Name: At_Petals_P Parameter: Plant Line Value: WS
  misc_feature: MA Experiment 20000794 PARAMETER Experiment Name: At_Petals_P Parameter: Tissue Value: Petals vs. Whole plant
  misc_feature: MA Experiment ID: 20001451 Result: Up-regulated in Transcription
  misc_feature: MA Experiment 20001451 PARAMETER Experiment Name: At_Far-red-induction_P Parameter: Age (day) Value: 7
  misc_feature: MA Experiment 20001451 PARAMETER Experiment Name: At_Far-red-induction_P Parameter: Light Value: Far-red vs. White
  misc_feature: MA Experiment 20001451 PARAMETER Experiment Name: At_Far-red-induction_P Parameter: Organism Value: A. thaliana
  misc_feature: MA Experiment 20001451 PARAMETER Experiment Name: At_Far-red-induction_P Parameter: Plant Line Value: Columbia
  misc_feature: MA Experiment 20001451 PARAMETER Experiment Name: At_Far-red-induction_P Parameter: Timepoint (hr) Value: 24
  misc_feature: MA Experiment 20001451 PARAMETER Experiment Name: At_Far-red-induction_P Parameter: Tissue Value: Whole Plant
  misc_feature: MA Experiment ID: 20001556 Result: Down-regulated in Transcription
  misc_feature: MA Experiment 20001556 PARAMETER Experiment Name: At_Drought_Soil_Dry_P Parameter: Age (day) Value: 26
  misc_feature: MA Experiment 20001556 PARAMETER Experiment Name: At_Drought_Soil_Dry_P Parameter: Organism Value: A. thaliana
  misc_feature: MA Experiment 20001556 PARAMETER Experiment Name: At_Drought_Soil_Dry_P Parameter: Plant Line Value: WS
  misc_feature: MA Experiment 20001556 PARAMETER Experiment Name: At_Drought_Soil_Dry_P Parameter: Post Timepoint (hr) Value: None
  misc_feature: MA Experiment 20001556 PARAMETER Experiment Name: At_Drought_Soil_Dry_P Parameter: Post-Treatment Value: None
  misc_feature: MA Experiment 20001556 PARAMETER Experiment Name: At_Drought_Soil_Dry_P Parameter: Timepoint (day) Value: 12
  misc_feature: MA Experiment 20001556 PARAMETER Experiment Name: At_Drought_Soil_Dry_P Parameter: Treatment Value: Drought vs. No Drought
  misc_feature: MA Experiment ID: 20001557 Result: Down-regulated in Transcription
  misc_feature: MA Experiment 20001557 PARAMETER Experiment Name: At_Drought_Soil_Dry_P Parameter: Age (day) Value: 27
  misc_feature: MA Experiment 20001557 PARAMETER Experiment Name: At_Drought_Soil_Dry_P Parameter: Organism Value: A. thaliana
  misc_feature: MA Experiment 20001557 PARAMETER Experiment Name: At_Drought_Soil_Dry_P Parameter: Plant Line Value: WS
  misc_feature: MA Experiment 20001557 PARAMETER Experiment Name: At_Drought_Soil_Dry_P Parameter: Post Timepoint (hr) Value: 3
  misc_feature: MA Experiment 20001557 PARAMETER Experiment Name: At_Drought_Soil_Dry_P Parameter: Post-Treatment Value: Re-Water vs. No Drought
  misc_feature: MA Experiment 20001557 PARAMETER Experiment Name: At_Drought_Soil_Dry_P Parameter: Timepoint (day) Value: 13
  misc_feature: MA Experiment 20001557 PARAMETER Experiment Name: At_Drought_Soil_Dry_P Parameter: Treatment Value: Drought vs. No Drought
  misc_feature: MA Experiment ID: 20001558 Result: Down-regulated in Transcription
  misc_feature: MA Experiment 20001558 PARAMETER Experiment Name: At_Drought_Soil_Dry_P Parameter: Age (day) Value: 27
  misc_feature: MA Experiment 20001558 PARAMETER Experiment Name: At_Drought_Soil_Dry_P Parameter: Organism Value: A. thaliana
  misc_feature: MA Experiment 20001558 PARAMETER Experiment Name: At_Drought_Soil_Dry_P Parameter: Plant Line Value: WS
  misc_feature: MA Experiment 20001558 PARAMETER Experiment Name: At_Drought_Soil_Dry_P Parameter: Post Timepoint (hr) Value: 6
  misc_feature: MA Experiment 20001558 PARAMETER Experiment Name: At_Drought_Soil_Dry_P Parameter: Post-Treatment Value: Re-Water vs. No Drought
  misc_feature: MA Experiment 20001558 PARAMETER Experiment Name: At_Drought_Soil_Dry_P Parameter: Timepoint (day) Value: 13
  misc_feature: MA Experiment 20001558 PARAMETER Experiment Name: At_Drought_Soil_Dry_P Parameter: Treatment Value: Drought vs. No Drought
  misc_feature: MA Experiment ID: 20001757 Result: Down-regulated in Transcription
  misc_feature: MA Experiment 20001757 PARAMETER Experiment Name: At_50mM_NH4NO3_L-to-H_P Parameter: Timepoint (hr) Value: 6
  misc_feature: MA Experiment 20001757 PARAMETER Experiment Name: At_50mM_NH4NO3_L-to-H_P Parameter: Tissue Value: Leaf
  misc_feature: MA Experiment 20001757 PARAMETER Experiment Name: At_50mM_NH4NO3_L-to-H_P Parameter: Treatment Value: 50mM NH4NO3 vs 100mM Mannitol

SEQ ID NO: 34022 - protein, 398 aa, Arabidopsis thaliana; identical to SEQ ID NO: 30432
  peptide (1)..(398): Ceres Seq. ID no. 12423112
  misc_feature (29)..(396): Pfam Name: Protein of unknown function (DUF793) Pfam Description: Protein of unknown function (DUF793)
  misc_feature (30)..(381): Homolog of NCBI NO: 18410617 NR Description: expressed protein
  misc_feature (30)..(381): Homolog of NCBI NO: 21536674 NR Description: unknown [Arabidopsis thaliana]
  misc_feature (30)..(394): Homolog of NCBI NO: 15218428 NR Description: hypothetical protein; protein id: At1g43630.1
  misc_feature (29)..(396): Homolog of NCBI NO: 38345505 NR Description: OSJNBa0039K24.3 [Oryza sativa (japonica
  misc_feature (30)..(394): Homolog of NCBI NO: 21593634 NR Description: unknown [Arabidopsis thaliana]
  misc_feature (30)..(394): Homolog of NCBI NO: 18394649 NR Description: expressed protein
  misc_feature (28)..(294): Homolog of NCBI NO: 15222577 NR Description: hypothetical protein; protein id: At1g63930.1
  misc_feature (28)..(397): Homolog of NCBI NO: 15236522 NR Description: putative protein
  misc_feature (28)..(398): Homolog of NCBI NO: 15237130 NR Description: putative protein
  misc_feature (28)..(398): Homolog of NCBI NO: 21553882 NR Description: unknown [Arabidopsis thaliana]

SEQ ID NO: 34023 - protein, 371 aa, Arabidopsis thaliana; identical to SEQ ID NO: 30433
  peptide (1)..(371): Ceres Seq. ID no. 12423113
  misc_feature (2)..(369): Pfam Name: Protein of unknown function (DUF793) Pfam Description: Protein of unknown function (DUF793)
  misc_feature (3)..(354): Homolog of NCBI NO: 18410617 NR Description: expressed protein
  misc_feature (3)..(354): Homolog of NCBI NO: 21536674 NR Description: unknown [Arabidopsis thaliana]
  misc_feature (3)..(367): Homolog of NCBI NO: 15218428 NR Description: hypothetical protein; protein id: At1g43630.1
  misc_feature (2)..(369): Homolog of NCBI NO: 38345505 NR Description: OSJNBa0039K24.3 [Oryza sativa (japonica
  misc_feature (3)..(367): Homolog of NCBI NO: 21593634 NR Description: unknown [Arabidopsis thaliana]
  misc_feature (3)..(367): Homolog of NCBI NO: 18394649 NR Description: expressed protein
  misc_feature (1)..(267): Homolog of NCBI NO: 15222577 NR Description: hypothetical protein; protein id: At1g63930.1
  misc_feature (1)..(370): Homolog of NCBI NO: 15236522 NR Description: putative protein
  misc_feature (1)..(371): Homolog of NCBI NO: 15237130 NR Description: putative protein
  misc_feature (1)..(371): Homolog of NCBI NO: 21553882 NR Description: unknown [Arabidopsis thaliana]

SEQ ID NO: 34024 - protein, 348 aa, Arabidopsis thaliana; identical to SEQ ID NO: 30434
  peptide (1)..(348): Ceres Seq. ID no. 12423114
  misc_feature (1)..(346): Pfam Name: Protein of unknown function (DUF793) Pfam Description: Protein of unknown function (DUF793)
  misc_feature (1)..(331): Homolog of NCBI NO: 18410617 NR Description: expressed protein
  misc_feature (1)..(331): Homolog of NCBI NO: 21536674 NR Description: unknown [Arabidopsis thaliana]
  misc_feature (1)..(344): Homolog of NCBI NO: 15218428 NR Description: hypothetical protein; protein id: At1g43630.1
  misc_feature (1)..(346): Homolog of NCBI NO: 38345505 NR Description: OSJNBa0039K24.3 [Oryza sativa (japonica
  misc_feature (1)..(344): Homolog of NCBI NO: 21593634 NR Description: unknown [Arabidopsis thaliana]
  misc_feature (1)..(344): Homolog of NCBI NO: 18394649 NR Description: expressed protein
  misc_feature (1)..(244): Homolog of NCBI NO: 15222577 NR Description: hypothetical protein; protein id: At1g63930.1
  misc_feature (1)..(347): Homolog of NCBI NO: 15236522 NR Description: putative protein
  misc_feature (1)..(348): Homolog of NCBI NO: 15237130 NR Description: putative protein
  misc_feature (1)..(348): Homolog of NCBI NO: 21553882 NR Description: unknown [Arabidopsis thaliana]

SEQ ID NO: 34025 - DNA, 711 bp, Arabidopsis thaliana; identical to SEQ ID NO: 30435
  misc_feature (1)..(711): Ceres Seq. ID no. 12482108
  misc_feature: MA Experiment ID: 108462 Result: Down-regulated in Transcription
  misc_feature: MA Experiment 108462 PARAMETER Experiment Name: At_Germinating_Seeds_cDNA_P Parameter: Age (day) Value: 2 vs. 0
  misc_feature: MA Experiment 108462 PARAMETER Experiment Name: At_Germinating_Seeds_cDNA_P Parameter: Tissue Value: Germinating Seeds
  misc_feature: MA Experiment ID: 20000227 Result: Down-regulated in Transcription
  misc_feature: MA Experiment 20000227 PARAMETER Experiment Name: At_Root-Tips-vs-Tops_P Parameter: Tissue Value: Root Tips vs. Root Tops

SEQ ID NO: 34026 - protein, 155 aa, Arabidopsis thaliana; identical to SEQ ID NO: 30436
  peptide (1)..(155): Ceres Seq. ID no. 12482109
  misc_feature (46)..(155): Pfam Name: Uncharacterised protein family (UPF0041) Pfam Description: Uncharacterised protein family (UPF0041)
  misc_feature (63)..(137): Homolog of NCBI NO: 37546581 NR Description: similar to ENSANGP00000015797 [Homo sapiens]
  misc_feature (63)..(136): Homolog of NCBI NO: 12852283 NR Description: unnamed protein product [Mus musculus]
  misc_feature (63)..(144): Homolog of NCBI NO: 39591631 NR Description: Hypothetical protein CBG18071 [Caenorhabditis
  misc_feature (63)..(144): Homolog of NCBI NO: 17554512 NR Description: Uncharacterised protein family (UPF0041)
  misc_feature (63)..(136): Homolog of NCBI NO: 12852262 NR Description: unnamed protein product [Mus musculus]
  misc_feature (63)..(136): Homolog of NCBI NO: 9055178 NR Description: brain protein 44-like; apoptosis-regulating basic
  misc_feature (63)..(136): Homolog of NCBI NO: 7706369 NR Description: brain protein 44-like; HSPC040 protein [Homo
  misc_feature (63)..(136): Homolog of NCBI NO: 4929727 NR Description: CGI-129 protein [Homo sapiens]
  misc_feature (43)..(133): Homolog of NCBI NO: 19075237 NR Description: conserved hypothetical protein
  misc_feature (46)..(155): Homolog of NCBI NO: 15241266 NR Description: putative protein

SEQ ID NO: 34027 - protein, 110 aa, Arabidopsis thaliana; identical to SEQ ID NO: 30437
  peptide (1)..(110): Ceres Seq. ID no. 12482110
  misc_feature (1)..(110): Pfam Name: Uncharacterised protein family (UPF0041) Pfam Description: Uncharacterised protein family (UPF0041)
  misc_feature (18)..(92): Homolog of NCBI NO: 37546581 NR Description: similar to ENSANGP00000015797 [Homo sapiens]
  misc_feature (18)..(91): Homolog of NCBI NO: 12852283 NR Description: unnamed protein product [Mus musculus]
  misc_feature (18)..(99): Homolog of NCBI NO: 39591631 NR Description: Hypothetical protein CBG18071 [Caenorhabditis
  misc_feature (18)..(99): Homolog of NCBI NO: 17554512 NR Description: Uncharacterised protein family (UPF0041)
  misc_feature (18)..(91): Homolog of NCBI NO: 12852262 NR Description: unnamed protein product [Mus musculus]
  misc_feature (18)..(91): Homolog of NCBI NO: 9055178 NR Description: brain protein 44-like; apoptosis-regulating basic
  misc_feature (18)..(91): Homolog of NCBI NO: 7706369 NR Description: brain protein 44-like; HSPC040 protein [Homo
  misc_feature (18)..(91): Homolog of NCBI NO: 4929727 NR Description: CGI-129 protein [Homo sapiens]
  misc_feature (1)..(88): Homolog of NCBI NO: 19075237 NR Description: conserved hypothetical protein
  misc_feature (1)..(110): Homolog of NCBI NO: 15241266 NR Description: putative protein

SEQ ID NO: 34028 - DNA, 2369 bp, Arabidopsis thaliana; identical to SEQ ID NO: 30438
  misc_feature (1)..(2369): Ceres Seq. ID no. 12327544
  misc_feature: MA Experiment ID: 20001451 Result: Down-regulated in Transcription
  misc_feature: MA Experiment 20001451 PARAMETER Experiment Name: At_Far-red-induction_P Parameter: Age (day) Value: 7
  misc_feature: MA Experiment 20001451 PARAMETER Experiment Name: At_Far-red-induction_P Parameter: Light Value: Far-red vs. White
  misc_feature: MA Experiment 20001451 PARAMETER Experiment Name: At_Far-red-induction_P Parameter: Organism Value: A. thaliana
  misc_feature: MA Experiment 20001451 PARAMETER Experiment Name: At_Far-red-induction_P Parameter: Plant Line Value: Columbia
  misc_feature: MA Experiment 20001451 PARAMETER Experiment Name: At_Far-red-induction_P Parameter: Timepoint (hr) Value: 24
  misc_feature: MA Experiment 20001451 PARAMETER Experiment Name: At_Far-red-induction_P Parameter: Tissue Value: Whole Plant

SEQ ID NO: 34029 - protein, 623 aa, Arabidopsis thaliana; identical to SEQ ID NO: 30439
  peptide (1)..(623): Ceres Seq. ID no. 12327545
  misc_feature (271)..(464): Pfam Name: ATP synthase alpha/beta family, Pfam Description: ATP synthase alpha/beta family,
  misc_feature (271)..(464): Pfam Name: ATP synthase alpha/beta family, Pfam Description: ATP synthase alpha/beta family,
  misc_feature (13)..(620): Homolog of NCBI NO: 20129479 NR Description: CG5075-PA [Drosophila melanogaster]
  misc_feature (8)..(620): Homolog of NCBI NO: 30584887 NR Description: Homo sapiens ATPase, H+ transporting, lysosomal
  misc_feature (1)..(623): Homolog of NCBI NO: 2506211 NR Description: Vacuolar ATP synthase catalytic subunit A A subunit) (Vacuolar proton pump alpha subunit) (V-ATPase 69 kDa
  misc_feature (1)..(623): Homolog of NCBI NO: 27883932 NR Description: vacuolar H+-ATPase A1 subunit isoform
  misc_feature (1)..(623): Homolog of NCBI NO: 3169287 NR Description: vacuolar H+-ATPase catalytic subunit [Gossypium
  misc_feature (13)..(620): Homolog of NCBI NO: 20129479 NR Description: CG5075-PA [Drosophila melanogaster]
  misc_feature (1)..(623): Homolog of NCBI NO: 2506211 NR Description: Vacuolar ATP synthase catalytic subunit A A subunit) (Vacuolar proton pump alpha subunit) (V-ATPase 69 kDa
  misc_feature (1)..(623): Homolog of NCBI NO: 3169287 NR Description: vacuolar H+-ATPase catalytic subunit [Gossypium
  misc_feature (1)..(623): Homolog of NCBI NO: 12585490 NR Description: Vacuolar ATP synthase catalytic subunit A A subunit) (Vacuolar proton pump alpha subunit) (V-ATPase 69 kDa
  misc_feature (1)..(623): Homolog of NCBI NO: 137460 NR Description: Vacuolar ATP synthase catalytic subunit A A subunit) (Vacuolar proton pump alpha subunit) (V-ATPase 69 kDa
  misc_feature (1)..(623): Homolog of NCBI NO: 15982954 NR Description: V-ATPase catalytic subunit A [Prunus persica]
  misc_feature (1)..(623): Homolog of NCBI NO: 27884018 NR Description: vacuolar H+-ATPase A2 subunit isoform
  misc_feature (1)..(623): Homolog of NCBI NO: 401322 NR Description: Vacuolar ATP synthase catalytic subunit A A subunit) (Vacuolar proton pump alpha subunit) (V-ATPase 69 kDa
  misc_feature (1)..(623): Homolog of NCBI NO: 27883932 NR Description: vacuolar H+-ATPase A1 subunit isoform
  misc_feature (8)..(620): Homolog of NCBI NO: 30584887 NR Description: Homo sapiens ATPase, H+ transporting, lysosomal
  misc_feature (1)..(623): Homolog of NCBI NO: 401322 NR Description: Vacuolar ATP synthase catalytic subunit A A subunit) (Vacuolar proton pump alpha subunit) (V-ATPase 69 kDa
  misc_feature (1)..(623): Homolog of NCBI NO: 27884018 NR Description: vacuolar H+-ATPase A2 subunit isoform
  misc_feature (1)..(623): Homolog of NCBI NO: 15982954 NR Description: V-ATPase catalytic subunit A [Prunus persica]
  misc_feature (1)..(623): Homolog of NCBI NO: 137460 NR Description: Vacuolar ATP synthase catalytic subunit A A subunit) (Vacuolar proton pump alpha subunit) (V-ATPase 69 kDa
  misc_feature (1)..(623): Homolog of NCBI NO: 12585490 NR Description: Vacuolar ATP synthase catalytic subunit A A subunit) (Vacuolar proton pump alpha subunit) (V-ATPase 69 kDa

SEQ ID NO: 34030 - protein, 587 aa, Arabidopsis thaliana; identical to SEQ ID NO: 30440
  peptide (1)..(587): Ceres Seq. ID no. 12327546
  misc_feature (235)..(428): Pfam Name: ATP synthase alpha/beta family, Pfam Description: ATP synthase alpha/beta family,
  misc_feature (235)..(428): Pfam Name: ATP synthase alpha/beta family, Pfam Description: ATP synthase alpha/beta family,
  misc_feature (1)..(584): Homolog of NCBI NO: 20129479 NR Description: CG5075-PA [Drosophila melanogaster]
  misc_feature (1)..(584): Homolog of NCBI NO: 30584887 NR Description: Homo sapiens ATPase, H+ transporting, lysosomal
  misc_feature (1)..(587): Homolog of NCBI NO: 2506211 NR Description: Vacuolar ATP synthase catalytic subunit A A subunit) (Vacuolar proton pump alpha subunit) (V-ATPase 69 kDa
  misc_feature (1)..(587): Homolog of NCBI NO: 27883932 NR Description: vacuolar H+-ATPase A1 subunit isoform
  misc_feature (1)..(587): Homolog of NCBI NO: 3169287 NR Description: vacuolar H+-ATPase catalytic subunit [Gossypium
  misc_feature (1)..(584): Homolog of NCBI NO: 20129479 NR Description: CG5075-PA [Drosophila melanogaster]
  misc_feature (1)..(587): Homolog of NCBI NO: 2506211 NR Description: Vacuolar ATP synthase catalytic subunit A A subunit) (Vacuolar proton pump alpha subunit) (V-ATPase 69 kDa
  misc_feature (1)..(587): Homolog of NCBI NO: 3169287 NR Description: vacuolar H+-ATPase catalytic subunit [Gossypium
  misc_feature (1)..(587): Homolog of NCBI NO: 12585490 NR Description: Vacuolar ATP synthase catalytic subunit A A subunit) (Vacuolar proton pump alpha subunit) (V-ATPase 69 kDa
  misc_feature (1)..(587): Homolog of NCBI NO: 137460 NR Description: Vacuolar ATP synthase catalytic subunit A A subunit) (Vacuolar proton pump alpha subunit) (V-ATPase 69 kDa
  misc_feature (1)..(587): Homolog of NCBI NO: 15982954 NR Description: V-ATPase catalytic subunit A [Prunus persica]
  misc_feature (1)..(587): Homolog of NCBI NO: 27884018 NR Description: vacuolar H+-ATPase A2 subunit isoform
  misc_feature (1)..(587): Homolog of NCBI NO: 401322 NR Description: Vacuolar ATP synthase catalytic subunit A A subunit) (Vacuolar proton pump alpha subunit) (V-ATPase 69 kDa
  misc_feature (1)..(587): Homolog of NCBI NO: 27883932 NR Description: vacuolar H+-ATPase A1 subunit isoform
  misc_feature (1)..(584): Homolog of NCBI NO: 30584887 NR Description: Homo sapiens ATPase, H+ transporting, lysosomal
  misc_feature (1)..(587): Homolog of NCBI NO: 401322 NR Description: Vacuolar ATP synthase catalytic subunit A A subunit) (Vacuolar proton pump alpha subunit) (V-ATPase 69 kDa
  misc_feature (1)..(587): Homolog of NCBI NO: 27884018 NR Description: vacuolar H+-ATPase A2 subunit isoform
  misc_feature (1)..(587): Homolog of NCBI NO: 15982954 NR Description: V-ATPase catalytic subunit A [Prunus persica]
  misc_feature (1)..(587): Homolog of NCBI NO: 137460 NR Description: Vacuolar ATP synthase catalytic subunit A A subunit) (Vacuolar proton pump alpha subunit) (V-ATPase 69 kDa
  misc_feature (1)..(587): Homolog of NCBI NO: 12585490 NR Description: Vacuolar ATP synthase catalytic subunit A A subunit) (Vacuolar proton pump alpha subunit) (V-ATPase 69 kDa

SEQ ID NO: 34031 - protein, 582 aa, Arabidopsis thaliana; identical to SEQ ID NO: 30441
  peptide (1)..(582): Ceres Seq. ID no. 12327547
  misc_feature (230)..(423): Pfam Name: ATP synthase alpha/beta family, Pfam Description: ATP synthase alpha/beta family,
  misc_feature (230)..(423): Pfam Name: ATP synthase alpha/beta family, Pfam Description: ATP synthase alpha/beta family,
  misc_feature (1)..(579): Homolog of NCBI NO: 20129479 NR Description: CG5075-PA [Drosophila melanogaster]
  misc_feature (1)..(579): Homolog of NCBI NO: 30584887 NR Description: Homo sapiens ATPase, H+ transporting, lysosomal
  misc_feature (1)..(582): Homolog of NCBI NO: 2506211 NR Description: Vacuolar ATP synthase catalytic subunit A A subunit) (Vacuolar proton pump alpha subunit) (V-ATPase 69 kDa
  misc_feature (1)..(582): Homolog of NCBI NO: 27883932 NR Description: vacuolar H+-ATPase A1 subunit isoform
  misc_feature (1)..(582): Homolog of NCBI NO: 3169287 NR Description: vacuolar H+-ATPase catalytic subunit [Gossypium
  misc_feature (1)..(579): Homolog of NCBI NO: 20129479 NR Description: CG5075-PA [Drosophila melanogaster]
  misc_feature (1)..(582): Homolog of NCBI NO: 2506211 NR Description: Vacuolar ATP synthase catalytic subunit A A subunit) (Vacuolar proton pump alpha subunit) (V-ATPase 69 kDa
  misc_feature (1)..(582): Homolog of NCBI NO: 3169287 NR Description: vacuolar H+-ATPase catalytic subunit [Gossypium
  misc_feature (1)..(582): Homolog of NCBI NO: 12585490 NR Description: Vacuolar ATP synthase catalytic subunit A A subunit) (Vacuolar proton pump alpha subunit) (V-ATPase 69 kDa
  misc_feature (1)..(582): Homolog of NCBI NO: 137460 NR Description: Vacuolar ATP synthase catalytic subunit A A subunit) (Vacuolar proton pump alpha subunit) (V-ATPase 69 kDa
  misc_feature (1)..(582): Homolog of NCBI NO: 15982954 NR Description: V-ATPase catalytic subunit A [Prunus persica]
  misc_feature (1)..(582): Homolog of NCBI NO: 27884018 NR Description: vacuolar H+-ATPase A2 subunit isoform
  misc_feature (1)..(582): Homolog of NCBI NO: 401322 NR Description: Vacuolar ATP synthase catalytic subunit A A subunit) (Vacuolar proton pump alpha subunit) (V-ATPase 69 kDa
  misc_feature (1)..(582): Homolog of NCBI NO: 27883932 NR Description: vacuolar H+-ATPase A1 subunit isoform
  misc_feature (1)..(579): Homolog of NCBI NO: 30584887 NR Description: Homo sapiens ATPase, H+ transporting, lysosomal
  misc_feature (1)..(582): Homolog of NCBI NO: 401322 NR Description: Vacuolar ATP synthase catalytic subunit A A subunit) (Vacuolar proton pump alpha subunit) (V-ATPase 69 kDa
  misc_feature (1)..(582): Homolog of NCBI NO: 27884018 NR Description: vacuolar H+-ATPase A2 subunit isoform
  misc_feature (1)..(582): Homolog of NCBI NO: 15982954 NR Description: V-ATPase catalytic subunit A [Prunus persica]
  misc_feature (1)..(582): Homolog of NCBI NO: 137460 NR Description: Vacuolar ATP synthase catalytic subunit A A subunit) (Vacuolar proton pump alpha subunit) (V-ATPase 69 kDa
  misc_feature (1)..(582): Homolog of NCBI NO: 12585490 NR Description: Vacuolar ATP synthase catalytic subunit A A subunit) (Vacuolar proton pump alpha subunit) (V-ATPase 69 kDa

SEQ ID NO: 34032 - DNA, 903 bp, Arabidopsis thaliana; identical to SEQ ID NO: 30442
  misc_feature (1)..(903): Ceres Seq. ID no. 12372123
  misc_feature: MA Experiment ID: 108461 Result: Up-regulated in Transcription
  misc_feature: MA Experiment 108461 PARAMETER Experiment Name: At_Germinating_Seeds_cDNA_P Parameter: Age (day) Value: 1 vs. 0
  misc_feature: MA Experiment 108461 PARAMETER Experiment Name: At_Germinating_Seeds_cDNA_P Parameter: Tissue Value: Germinating Seeds
  misc_feature: MA Experiment ID: 108462 Result: Up-regulated in Transcription
  misc_feature: MA Experiment 108462 PARAMETER Experiment Name: At_Germinating_Seeds_cDNA_P Parameter: Age (day) Value: 2 vs. 0
  misc_feature: MA Experiment 108462 PARAMETER Experiment Name: At_Germinating_Seeds_cDNA_P Parameter: Tissue Value: Germinating Seeds
  misc_feature: MA Experiment ID: 20000180 Result: Up-regulated in Transcription
  misc_feature: MA Experiment 20000180 PARAMETER Experiment Name: At_Germinating_Seeds_P Parameter: Age (hr) Value: 24 vs. 0
  misc_feature: MA Experiment 20000180 PARAMETER Experiment Name: At_Germinating_Seeds_P Parameter: Tissue Value: Germinating Seeds
  misc_feature: MA Experiment ID: 20000185 Result: Down-regulated in Transcription
  misc_feature: MA Experiment 20000185 PARAMETER Experiment Name: At_Roots__P Parameter: Age (day) Value: 7 vs. 21
  misc_feature: MA Experiment 20000185 PARAMETER Experiment Name: At_Roots__P Parameter: Organism Value: A. thaliana
  misc_feature: MA Experiment 20000185 PARAMETER Experiment Name: At_Roots__P Parameter: Tissue Value: Roots vs. Whole Plant
  misc_feature: MA Experiment ID: 20000224 Result: Down-regulated in Transcription
  misc_feature: MA Experiment ID: 20001557 Result: Up-regulated in Transcription
  misc_feature: MA Experiment 20001557 PARAMETER Experiment Name: At_Drought_Soil_Dry_P Parameter: Age (day) Value: 27
  misc_feature: MA Experiment 20001557 PARAMETER Experiment Name: At_Drought_Soil_Dry_P Parameter: Organism Value: A. thaliana
  misc_feature: MA Experiment 20001557 PARAMETER Experiment Name: At_Drought_Soil_Dry_P Parameter: Plant Line Value: WS
  misc_feature: MA Experiment 20001557 PARAMETER Experiment Name: At_Drought_Soil_Dry_P Parameter: Post Timepoint (hr) Value: 3
  misc_feature: MA Experiment 20001557 PARAMETER Experiment Name: At_Drought_Soil_Dry_P Parameter: Post-Treatment Value: Re-Water vs. No Drought
  misc_feature: MA Experiment 20001557 PARAMETER Experiment Name: At_Drought_Soil_Dry_P Parameter: Timepoint (day) Value: 13
  misc_feature: MA Experiment 20001557 PARAMETER Experiment Name: At_Drought_Soil_Dry_P Parameter: Treatment Value: Drought vs. No Drought
  misc_feature: MA Experiment ID: 20001905 Result: Down-regulated in Transcription
  misc_feature: MA Experiment 20001905 PARAMETER Experiment Name: At_Drought_Reproduction_P Parameter: Age (day) Value: 40
  misc_feature: MA Experiment 20001905 PARAMETER Experiment Name: At_Drought_Reproduction_P Parameter: Organism Value: A. thaliana
  misc_feature: MA Experiment 20001905 PARAMETER Experiment Name: At_Drought_Reproduction_P Parameter: Plant Line Value: WS
  misc_feature: MA Experiment 20001905 PARAMETER Experiment Name: At_Drought_Reproduction_P Parameter: Timepoint (day) Value: 10
  misc_feature: MA Experiment 20001905 PARAMETER Experiment Name: At_Drought_Reproduction_P Parameter: Tissue Value: Rosettes
  misc_feature: MA Experiment 20001905 PARAMETER Experiment Name: At_Drought_Reproduction_P Parameter: Treatment Value: Drought vs. No Drought

SEQ ID NO: 34033 - protein, 228 aa, Arabidopsis thaliana; identical to SEQ ID NO: 30443
  peptide (1)..(228): Ceres Seq. ID no. 12372124
  misc_feature (57)..(228): Pfam Name: Protein of unknown function (DUF1068) Pfam Description: Protein of unknown function (DUF1068)
  misc_feature (68)..(228): Homolog of NCBI NO: 7487433 NR Description: hypothetical protein At2g32580 [imported] -
  misc_feature (68)..(227): Homolog of NCBI NO: 18390477 NR Description: expressed protein
  misc_feature (68)..(228): Homolog of NCBI NO: 21553781 NR Description: unknown [Arabidopsis thaliana]
  misc_feature (68)..(228): Homolog of NCBI NO: 18403016 NR Description: expressed protein
  misc_feature (68)..(227): Homolog of NCBI NO: 27922919 NR Description: unknown protein [Phytophthora sojae]
  misc_feature (64)..(226): Homolog of NCBI NO: 38345038 NR Description: OSJNBa0029H02.22 [Oryza sativa (japonica
  misc_feature (65)..(228): Homolog of NCBI NO: 25364110 NR Description: hypothetical protein At2g24290 [imported] -
  misc_feature (57)..(228): Homolog of NCBI NO: 18400504 NR Description: expressed protein
  misc_feature (57)..(228): Homolog of NCBI NO: 18417716 NR Description: Expressed protein
  misc_feature (6)..(228): Homolog of NCBI NO: 25407700 NR Description: hypothetical protein AT4g30990 [imported] -

SEQ ID NO: 34034 - protein, 172 aa, Arabidopsis thaliana; identical to SEQ ID NO: 30444
  peptide (1)..(172): Ceres Seq. ID no. 12372125
  misc_feature (1)..(172): Pfam Name: Protein of unknown function (DUF1068) Pfam Description: Protein of unknown function (DUF1068)
  misc_feature (12)..(172): Homolog of NCBI NO: 7487433 NR Description: hypothetical protein At2g32580 [imported] -
  misc_feature (12)..(171): Homolog of NCBI NO: 18390477 NR Description: expressed protein
  misc_feature (12)..(172): Homolog of NCBI NO: 21553781 NR Description: unknown [Arabidopsis thaliana]
  misc_feature (12)..(172): Homolog of NCBI NO: 18403016 NR Description: expressed protein
  misc_feature (12)..(171): Homolog of NCBI NO: 27922919 NR Description: unknown protein [Phytophthora sojae]
  misc_feature (8)..(170): Homolog of NCBI NO: 38345038 NR Description: OSJNBa0029H02.22 [Oryza sativa (japonica
  misc_feature (9)..(172): Homolog of NCBI NO: 25364110 NR Description: hypothetical protein At2g24290 [imported] -
  misc_feature (1)..(172): Homolog of NCBI NO: 18400504 NR Description: expressed protein
  misc_feature (1)..(172): Homolog of NCBI NO: 18417716 NR Description: Expressed protein
  misc_feature (1)..(172): Homolog of NCBI NO: 25407700 NR Description: hypothetical protein AT4g30990 [imported] -

SEQ ID NO: 34035 - protein, 164 aa, Arabidopsis thaliana; identical to SEQ ID NO: 30445
  peptide (1)..(164): Ceres Seq. ID no. 12372126
  misc_feature (1)..(164): Pfam Name: Protein of unknown function (DUF1068) Pfam Description: Protein of unknown function (DUF1068)
  misc_feature (4)..(164): Homolog of NCBI NO: 7487433 NR Description: hypothetical protein At2g32580 [imported] -
  misc_feature (4)..(163): Homolog of NCBI NO: 18390477 NR Description: expressed protein
  misc_feature (4)..(164): Homolog of NCBI NO: 21553781 NR Description: unknown [Arabidopsis thaliana]
  misc_feature (4)..(164): Homolog of NCBI NO: 18403016 NR Description: expressed protein
  misc_feature (4)..(163): Homolog of NCBI NO: 27922919 NR Description: unknown protein [Phytophthora sojae]
  misc_feature (1)..(162): Homolog of NCBI NO: 38345038 NR Description: OSJNBa0029H02.22 [Oryza sativa (japonica
  misc_feature (1)..(164): Homolog of NCBI NO: 25364110 NR Description: hypothetical protein At2g24290 [imported] -
  misc_feature (1)..(164): Homolog of NCBI NO: 18400504 NR Description: expressed protein
  misc_feature (1)..(164): Homolog of NCBI NO: 18417716 NR Description: Expressed protein
  misc_feature (1)..(164): Homolog of NCBI NO: 25407700 NR Description: hypothetical protein AT4g30990 [imported] -

SEQ ID NO: 34036 - DNA, 675 bp, Arabidopsis thaliana; identical to SEQ ID NO: 30446
  misc_feature (1)..(675): Ceres Seq. ID no. 12322124
  misc_feature: MA Experiment ID: 20000173 Result: Up-regulated in Transcription
  misc_feature: MA Experiment 20000173 PARAMETER Experiment Name: At_42deg_Heat_P Parameter: Age (day) Value: 14
  misc_feature: MA Experiment 20000173 PARAMETER Experiment Name: At_42deg_Heat_P Parameter: Organism Value: A. thaliana
  misc_feature: MA Experiment 20000173 PARAMETER Experiment Name: At_42deg_Heat_P Parameter: Plant Line Value: WS
  misc_feature: MA Experiment 20000173 PARAMETER Experiment Name: At_42deg_Heat_P Parameter: Temperature (deg C) Value: 42 vs. 22
  misc_feature: MA Experiment 20000173 PARAMETER Experiment Name: At_42deg_Heat_P Parameter: Timepoint (hr) Value: 6
  misc_feature: MA Experiment 20000173 PARAMETER Experiment Name: At_42deg_Heat_P Parameter: Tissue Value: Aerial
  misc_feature: MA Experiment ID: 20000227 Result: Down-regulated in Transcription
  misc_feature: MA Experiment 20000227 PARAMETER Experiment Name: At_Root-Tips-vs-Tops_P Parameter: Tissue Value: Root Tips vs. Root Tops
  misc_feature: MA Experiment ID: 20000234 Result: Down-regulated in Transcription
  misc_feature: MA Experiment 20000234 PARAMETER Experiment Name: At_Siliques_P Parameter: Age (day) Value: 21
  misc_feature: MA Experiment 20000234 PARAMETER Experiment Name: At_Siliques_P Parameter: Organism Value: A. thaliana
  misc_feature: MA Experiment 20000234 PARAMETER Experiment Name: At_Siliques_P Parameter: Plant Line Value: WS
  misc_feature: MA Experiment 20000234 PARAMETER Experiment Name: At_Siliques_P Parameter: Tissue Value: Less Than 5mm Siliques vs. Whole Plant
  misc_feature: MA Experiment ID: 20000265 Result: Down-regulated in Transcription
  misc_feature: MA Experiment 20000265 PARAMETER Experiment Name: At_Open_Flower_P Parameter: Age (day) Value: 21
  misc_feature: MA Experiment 20000265 PARAMETER Experiment Name: At_Open_Flower_P Parameter: Plant Line Value: WS
  misc_feature: MA Experiment 20000265 PARAMETER Experiment Name: At_Open_Flower_P Parameter: Tissue Value: Closed Flower vs. Whole Plant
  misc_feature: MA Experiment ID: 20000286 Result: Down-regulated in Transcription
  misc_feature: MA Experiment 20000286 PARAMETER Experiment Name: At_Open_Flower_P Parameter: Age (day) Value: 21
  misc_feature: MA Experiment 20000286 PARAMETER Experiment Name: At_Open_Flower_P Parameter: Plant Line Value: WS
  misc_feature: MA Experiment 20000286 PARAMETER Experiment Name: At_Open_Flower_P Parameter: Tissue Value: Half Open vs. Whole Plant

SEQ ID NO: 34037 - protein, 135 aa, Arabidopsis thaliana; identical to SEQ ID NO: 30447
  peptide (1)..(135): Ceres Seq. ID no. 12322125
  misc_feature (1)..(134): Pfam Name: Uncharacterised protein family (UPF0220) Pfam Description: Uncharacterised protein family (UPF0220)
  misc_feature (36)..(135): Homolog of NCBI NO: 38047947 NR Description: similar to Drosophila melanogaster CG15012
  misc_feature (15)..(129): Homolog of NCBI NO: 33150604 NR Description: IFNRC [Homo sapiens]
  misc_feature (15)..(135): Homolog of NCBI NO: 39595350 NR Description: Hypothetical protein CBG03988 [Caenorhabditis
  misc_feature (15)..(135): Homolog of NCBI NO: 27732805 NR Description: similar to Small membrane protein 1 [Rattus
  misc_feature (1)..(135): Homolog of NCBI NO: 34610239 NR Description: small membrane protein 1 [Mus musculus]
  misc_feature (15)..(135): Homolog of NCBI NO: 7657595 NR Description: small membrane protein 1 [Homo sapiens]
  misc_feature (15)..(135): Homolog of NCBI NO: 24657484 NR Description: CG15012-PB [Drosophila melanogaster]
  misc_feature (1)..(97): Homolog of NCBI NO: 25373092 NR Description: protein T32E20.29 [imported] - Arabidopsis
  misc_feature (1)..(135): Homolog of NCBI NO: 18400231 NR Description: expressed protein

SEQ ID NO: 34038 - protein, 82 aa, Arabidopsis thaliana; identical to SEQ ID NO: 26444
  peptide (1)..(82): Ceres Seq. ID no. 12322126
  misc_feature (1)..(81): Pfam Name: Uncharacterised protein family (UPF0220) Pfam Description: Uncharacterised protein family (UPF0220)
  misc_feature (1)..(82): Homolog of NCBI NO: 38047947 NR Description: similar to Drosophila melanogaster CG15012
  misc_feature (1)..(76): Homolog of NCBI NO: 33150604 NR Description: IFNRC [Homo sapiens]
  misc_feature (1)..(82): Homolog of NCBI NO: 39595350 NR Description: Hypothetical protein CBG03988 [Caenorhabditis
  misc_feature (1)..(82): Homolog of NCBI NO: 27732805 NR Description: similar to Small membrane protein 1 [Rattus
  misc_feature (1)..(82): Homolog of NCBI NO: 34610239 NR Description: small membrane protein 1 [Mus musculus]
  misc_feature (1)..(82): Homolog of NCBI NO: 7657595 NR Description: small membrane protein 1 [Homo sapiens]
  misc_feature (1)..(82): Homolog of NCBI NO: 24657484 NR Description: CG15012-PB [Drosophila melanogaster]
  misc_feature (1)..(44): Homolog of NCBI NO: 25373092 NR Description: protein T32E20.29 [imported] - Arabidopsis
  misc_feature (1)..(82): Homolog of NCBI NO: 18400231 NR Description: expressed protein

SEQ ID NO: 34039 - protein, 80 aa, Arabidopsis thaliana; identical to SEQ ID NO: 30449
  peptide (1)..(80): Ceres Seq. ID no. 12322127

SEQ ID NO: 34040 - DNA, 1040 bp, Arabidopsis thaliana; identical to SEQ ID NO: 30450
  misc_feature (1)..(1040): Ceres Seq. ID no. 13492462
  misc_feature: MA Experiment ID: 108462 Result: Up-regulated in Transcription
  misc_feature: MA Experiment 108462 PARAMETER Experiment Name: At_Germinating_Seeds_cDNA_P Parameter: Age (day) Value: 2 vs. 0
  misc_feature: MA Experiment 108462 PARAMETER Experiment Name: At_Germinating_Seeds_cDNA_P Parameter: Tissue Value: Germinating Seeds
  misc_feature: MA Experiment ID: 108463 Result: Up-regulated in Transcription
  misc_feature: MA Experiment 108463 PARAMETER Experiment Name: At_Germinating_Seeds_cDNA_P Parameter: Age (day) Value: 3 vs. 0
  misc_feature: MA Experiment 108463 PARAMETER Experiment Name: At_Germinating_Seeds_cDNA_P Parameter: Tissue Value: Germinating Seeds
  misc_feature: MA Experiment ID: 108464 Result: Up-regulated in Transcription
  misc_feature: MA Experiment 108464 PARAMETER Experiment Name: At_Germinating_Seeds_cDNA_P Parameter: Age (day) Value: 4 vs. 0
  misc_feature: MA Experiment 108464 PARAMETER Experiment Name: At_Germinating_Seeds_cDNA_P Parameter: Tissue Value: Germinating Seeds
  misc_feature: MA Experiment ID: 108489 Result: Up-regulated in Transcription
  misc_feature: MA Experiment ID: 108576 Result: Down-regulated in Transcription
  misc_feature: MA Experiment 108576 PARAMETER Experiment Name: At_42deg_Heat_cDNA_P Parameter: Temperature (deg C) Value: 42 vs. 22
  misc_feature: MA Experiment 108576 PARAMETER Experiment Name: At_42deg_Heat_cDNA_P Parameter: Timepoint (hr) Value: 1
  misc_feature: MA Experiment 108576 PARAMETER Experiment Name: At_42deg_Heat_cDNA_P Parameter: Tissue Value: Aerial
  misc_feature: MA Experiment ID: 108577 Result: Down-regulated in Transcription
  misc_feature: MA Experiment 108577 PARAMETER Experiment Name: At_42deg_Heat_cDNA_P Parameter: Temperature (deg C) Value: 42 vs. 22
  misc_feature: MA Experiment 108577 PARAMETER Experiment Name: At_42deg_Heat_cDNA_P Parameter: Timepoint (hr) Value: 6
  misc_feature: MA Experiment 108577 PARAMETER Experiment Name: At_42deg_Heat_cDNA_P Parameter: Tissue Value: Aerial
  misc_feature: MA Experiment ID: 108579 Result: Down-regulated in Transcription
  misc_feature: MA Experiment 108579 PARAMETER Experiment Name: At_4deg_Cold_cDNA_P Parameter: Temperature (deg C) Value: 4 vs. 22
  misc_feature: MA Experiment 108579 PARAMETER Experiment Name: At_4deg_Cold_cDNA_P Parameter: Timepoint (hr) Value: 6
  misc_feature: MA Experiment 108579 PARAMETER Experiment Name: At_4deg_Cold_cDNA_P Parameter: Tissue Value: Aerial
  misc_feature: MA Experiment ID: 108595 Result: Down-regulated in Transcription
  misc_feature: MA Experiment 108595 PARAMETER Experiment Name: At_Ler-pi_Ovule_cDNA_P Parameter: Plant Line Value: null
  misc_feature: MA Experiment ID: 108607 Result: Down-regulated in Transcription
  misc_feature: MA Experiment 108607 PARAMETER Experiment Name: At_100uM_ABA_cDNA_P Parameter: Timepoint (hr) Value: 4
  misc_feature: MA Experiment 108607 PARAMETER Experiment Name: At_100uM_ABA_cDNA_P Parameter: Tissue Value: Aerial
  misc_feature: MA Experiment 108607 PARAMETER Experiment Name: At_100uM_ABA_cDNA_P Parameter: Treatment Value: 100uM ABA vs. No Treatment
  misc_feature: MA Experiment ID: 108608 Result: Down-regulated in Transcription
  misc_feature: MA Experiment 108608 PARAMETER Experiment Name: At_100uM_ABA_cDNA_P Parameter: Timepoint (hr) Value: 1
  misc_feature: MA Experiment 108608 PARAMETER Experiment Name: At_100uM_ABA_cDNA_P Parameter: Tissue Value: Aerial
  misc_feature: MA Experiment 108608 PARAMETER Experiment Name: At_100uM_ABA_cDNA_P Parameter: Treatment Value: 100uM ABA vs. No Treatment
  misc_feature: MA Experiment ID: 20000069 Result: Down-regulated in Transcription
  misc_feature: MA Experiment 20000069 PARAMETER Experiment Name: At_100uM_ABA_Mutants_cDNA_P Parameter: Plant Line Value: CS23
  misc_feature: MA Experiment 20000069 PARAMETER Experiment Name: At_100uM_ABA_Mutants_cDNA_P Parameter: Timepoint (hr) Value: 6
  misc_feature: MA Experiment 20000069 PARAMETER Experiment Name: At_100uM_ABA_Mutants_cDNA_P Parameter: Tissue Value: Aerial
  misc_feature: MA Experiment 20000069 PARAMETER Experiment Name: At_100uM_ABA_Mutants_cDNA_P Parameter: Treatment Value: 100uM ABA vs. No Treatment
  misc_feature: MA Experiment ID: 20000070 Result: Down-regulated in Transcription
  misc_feature: MA Experiment 20000070 PARAMETER Experiment Name: At_100uM_ABA_Mutants_cDNA_P Parameter: Plant Line Value: CS24
  misc_feature: MA Experiment 20000070 PARAMETER Experiment Name: At_100uM_ABA_Mutants_cDNA_P Parameter: Timepoint (hr) Value: 6
  misc_feature: MA Experiment 20000070 PARAMETER Experiment Name: At_100uM_ABA_Mutants_cDNA_P Parameter: Tissue Value: Aerial
  misc_feature: MA Experiment 20000070 PARAMETER Experiment Name: At_100uM_ABA_Mutants_cDNA_P Parameter: Treatment Value: 100uM ABA vs. No Treatment
  misc_feature: MA Experiment ID: 20000087 Result: Down-regulated in Transcription
  misc_feature: MA Experiment 20000087 PARAMETER Experiment Name: At_100uM_ABA_Mutants_cDNA_P Parameter: Plant Line Value: WS
  misc_feature: MA Experiment 20000087 PARAMETER Experiment Name: At_100uM_ABA_Mutants_cDNA_P Parameter: Timepoint (hr) Value: 6
  misc_feature: MA Experiment 20000087 PARAMETER Experiment Name: At_100uM_ABA_Mutants_cDNA_P Parameter: Tissue Value: Aerial
  misc_feature: MA Experiment 20000087 PARAMETER Experiment Name: At_100uM_ABA_Mutants_cDNA_P Parameter: Treatment Value: 100uM ABA vs. No Treatment
  misc_feature: MA Experiment ID: 20000166 Result: Down-regulated in Transcription
  misc_feature: MA Experiment 20000166 PARAMETER Experiment Name: At_100uM_ABA_P Parameter: Age (day) Value: 14
  misc_feature: MA Experiment 20000166 PARAMETER Experiment Name: At_100uM_ABA_P Parameter: Organism Value: A. thaliana
  misc_feature: MA Experiment 20000166 PARAMETER Experiment Name: At_100uM_ABA_P Parameter: Plant Line Value: WS
  misc_feature: MA Experiment 20000166 PARAMETER Experiment Name: At_100uM_ABA_P Parameter: Timepoint (hr) Value: 1
  misc_feature: MA Experiment 20000166 PARAMETER Experiment Name: At_100uM_ABA_P Parameter: Tissue Value: Aerial
  misc_feature: MA Experiment 20000166 PARAMETER Experiment Name: At_100uM_ABA_P Parameter: Treatment Value: 100uM ABA vs. No Treatment
  misc_feature: MA Experiment ID: 20000180 Result: Up-regulated in Transcription
  misc_feature: MA Experiment 20000180 PARAMETER Experiment Name: At_Germinating_Seeds_P Parameter: Age (hr) Value: 24 vs. 0
  misc_feature: MA Experiment 20000180 PARAMETER Experiment Name: At_Germinating_Seeds_P Parameter: Tissue Value: Germinating Seeds
  misc_feature: MA Experiment ID: 20000184 Result: Up-regulated in Transcription
  misc_feature: MA Experiment 20000184 PARAMETER Experiment Name: At_Shoots__P Parameter: Age (day) Value: 7
  misc_feature: MA Experiment 20000184 PARAMETER Experiment Name: At_Shoots__P Parameter: Tissue Value: Shoots vs. Whole Plant
  misc_feature: MA Experiment ID: 20000185 Result: Up-regulated in Transcription
  misc_feature: MA Experiment 20000185 PARAMETER Experiment Name: At_Roots__P Parameter: Age (day) Value: 7 vs. 21
  misc_feature: MA Experiment 20000185 PARAMETER Experiment Name: At_Roots__P Parameter: Organism Value: A. thaliana
  misc_feature: MA Experiment 20000185 PARAMETER Experiment Name: At_Roots__P Parameter: Tissue Value: Roots vs. Whole Plant
  misc_feature: MA Experiment ID: 20000234 Result: Down-regulated in Transcription
  misc_feature: MA Experiment 20000234 PARAMETER Experiment Name: At_Siliques_P Parameter: Age (day) Value: 21
  misc_feature: MA Experiment 20000234 PARAMETER Experiment Name: At_Siliques_P Parameter: Organism Value: A. thaliana
  misc_feature: MA Experiment 20000234 PARAMETER Experiment Name: At_Siliques_P Parameter: Plant Line Value: WS
  misc_feature: MA Experiment 20000234 PARAMETER Experiment Name: At_Siliques_P Parameter: Tissue Value: Less Than 5mm Siliques vs. Whole Plant
  misc_feature: MA Experiment ID: 20000235 Result: Down-regulated in Transcription
  misc_feature: MA Experiment 20000235 PARAMETER Experiment Name: At_Siliques_P Parameter: Age (day) Value: 21
  misc_feature: MA Experiment 20000235 PARAMETER Experiment Name: At_Siliques_P Parameter: Organism Value: A. thaliana
  misc_feature: MA Experiment 20000235 PARAMETER Experiment Name: At_Siliques_P Parameter: Plant Line Value: WS
  misc_feature: MA Experiment 20000235 PARAMETER Experiment Name: At_Siliques_P Parameter: Tissue Value: 5-10mm Siliques vs. Whole Plant
  misc_feature: MA Experiment ID: 20000264 Result: Down-regulated in Transcription
  misc_feature: MA Experiment 20000264 PARAMETER Experiment Name: At_Open_Flower_P Parameter: Age (day) Value: 21
  misc_feature: MA Experiment 20000264 PARAMETER Experiment Name: At_Open_Flower_P Parameter: Plant Line Value: WS
  misc_feature: MA Experiment 20000264 PARAMETER Experiment Name: At_Open_Flower_P Parameter: Tissue Value: Open Flower vs. Whole Plant
  misc_feature: MA Experiment ID: 20000265 Result: Down-regulated in Transcription
  misc_feature: MA Experiment 20000265 PARAMETER Experiment Name: At_Open_Flower_P Parameter: Age (day) Value: 21
  misc_feature: MA Experiment 20000265 PARAMETER Experiment Name: At_Open_Flower_P Parameter: Plant Line Value: WS
  misc_feature: MA Experiment 20000265 PARAMETER Experiment Name: At_Open_Flower_P Parameter: Tissue Value: Closed Flower vs. Whole Plant
  misc_feature: MA Experiment ID: 20000268 Result: Down-regulated in Transcription
  misc_feature: MA Experiment 20000268 PARAMETER Experiment Name: At_100mM_NaCl__P Parameter: Age (day) Value: 14
  misc_feature: MA Experiment 20000268 PARAMETER Experiment Name: At_100mM_NaCl__P Parameter: Organism Value: A. thaliana
  misc_feature: MA Experiment 20000268 PARAMETER Experiment Name: At_100mM_NaCl__P Parameter: Plant Line Value: WS
  misc_feature: MA Experiment 20000268 PARAMETER Experiment Name: At_100mM_NaCl__P Parameter: Timepoint (hr) Value: 6
  misc_feature: MA Experiment 20000268 PARAMETER Experiment Name: At_100mM_NaCl__P Parameter: Tissue Value: Whole Plant
  misc_feature: MA Experiment 20000268 PARAMETER Experiment Name: At_100mM_NaCl__P Parameter: Treatment Value: 100mM NaCl vs. No Treatment
  misc_feature: MA Experiment ID: 20000269 Result: Down-regulated in Transcription
  misc_feature: MA Experiment 20000269 PARAMETER Experiment Name: At_1mM_KNO3_L-vs-H_Roots_P Parameter: Age (day) Value: 7,10,12
  misc_feature: MA Experiment 20000269 PARAMETER Experiment Name: At_1mM_KNO3_L-vs-H_Roots_P Parameter: Organism Value: A. thaliana
  misc_feature: MA Experiment 20000269 PARAMETER Experiment Name: At_1mM_KNO3_L-vs-H_Roots_P Parameter: Plant Line Value: WS
  misc_feature: MA Experiment 20000269 PARAMETER Experiment Name: At_1mM_KNO3_L-vs-H_Roots_P Parameter: Timepoint (day) Value: 7,10,12
  misc_feature: MA Experiment 20000269 PARAMETER Experiment Name: At_1mM_KNO3_L-vs-H_Roots_P Parameter: Tissue Value: Roots
  misc_feature: MA Experiment 20000269 PARAMETER Experiment Name: At_1mM_KNO3_L-vs-H_Roots_P Parameter: Treatment Value: 1mM KNO3 vs. 50mM KNO3
  misc_feature: MA Experiment ID: 20000286 Result: Down-regulated in Transcription
  misc_feature: MA Experiment 20000286 PARAMETER Experiment Name: At_Open_Flower_P Parameter: Age (day) Value: 21
  misc_feature: MA Experiment 20000286 PARAMETER Experiment Name: At_Open_Flower_P Parameter: Plant Line Value: WS
  misc_feature: MA Experiment 20000286 PARAMETER Experiment Name: At_Open_Flower_P Parameter: Tissue Value: Half Open vs. Whole Plant
  misc_feature: MA Experiment ID: 20000308 Result: Down-regulated in Transcription
  misc_feature: MA Experiment 20000308 PARAMETER Experiment Name: At_100mM_NaCl__P Parameter: Age (day) Value: 17
  misc_feature: MA Experiment 20000308 PARAMETER Experiment Name: At_100mM_NaCl__P Parameter: Organism Value: A. thaliana
  misc_feature: MA Experiment 20000308 PARAMETER Experiment Name: At_100mM_NaCl__P Parameter: Plant Line Value: WS
  misc_feature: MA Experiment 20000308 PARAMETER Experiment Name: At_100mM_NaCl__P Parameter: Timepoint (hr) Value: 72
  misc_feature: MA Experiment 20000308 PARAMETER Experiment Name: At_100mM_NaCl__P Parameter: Tissue Value: Whole Plant
  misc_feature: MA Experiment 20000308 PARAMETER Experiment Name: At_100mM_NaCl__P Parameter: Treatment Value: 100mM NaCl vs. No Treatment
  misc_feature: MA Experiment ID: 20000436 Result: Down-regulated in Transcription
  misc_feature: MA Experiment 20000436 PARAMETER Experiment Name: At_Drought_P Parameter: Age (day) Value: 7
  misc_feature: MA Experiment 20000436 PARAMETER Experiment Name: At_Drought_P Parameter: Organism Value: A. thaliana
  misc_feature: MA Experiment 20000436 PARAMETER Experiment Name: At_Drought_P Parameter: Plant Line Value: WS
  misc_feature: MA Experiment 20000436 PARAMETER Experiment Name: At_Drought_P Parameter: Timepoint (hr) Value: 12
  misc_feature: MA Experiment 20000436 PARAMETER Experiment Name: At_Drought_P Parameter: Tissue Value: Whole Plant
  misc_feature: MA Experiment 20000436 PARAMETER Experiment Name: At_Drought_P Parameter: Treatment Value: Drought vs. No Drought
  misc_feature: MA Experiment ID: 20000437 Result: Down-regulated in Transcription
  misc_feature: MA Experiment 20000437 PARAMETER Experiment Name: At_Drought_P Parameter: Age (day) Value: 8
  misc_feature: MA Experiment 20000437 PARAMETER Experiment Name: At_Drought_P Parameter: Organism Value: A. thaliana
  misc_feature: MA Experiment 20000437 PARAMETER Experiment Name: At_Drought_P Parameter: Plant Line Value: WS
  misc_feature: MA Experiment 20000437 PARAMETER Experiment Name: At_Drought_P Parameter: Timepoint (hr) Value: 24
  misc_feature: MA Experiment 20000437 PARAMETER Experiment Name: At_Drought_P Parameter: Tissue Value: Whole Plant
  misc_feature: MA Experiment 20000437 PARAMETER Experiment Name: At_Drought_P Parameter: Treatment Value: Drought vs. No Drought
  misc_feature: MA Experiment ID: 20000439 Result: Up-regulated in Transcription
  misc_feature: MA Experiment 20000439 PARAMETER Experiment Name: At_Roots__P Parameter: Age (day) Value: 14 vs. 21
  misc_feature: MA Experiment 20000439 PARAMETER Experiment Name: At_Roots__P Parameter: Organism Value: A. thaliana
  misc_feature: MA Experiment 20000439 PARAMETER Experiment Name: At_Roots__P Parameter: Tissue Value: Roots vs. Whole Plant
  misc_feature: MA Experiment ID: 20000453 Result: Down-regulated in Transcription
  misc_feature: MA Experiment 20000453 PARAMETER Experiment Name: At_100uM_ABA_P Parameter: Age (day) Value: 15
  misc_feature: MA Experiment 20000453 PARAMETER Experiment Name: At_100uM_ABA_P Parameter: Organism Value: A. thaliana
  misc_feature: MA Experiment 20000453 PARAMETER Experiment Name: At_100uM_ABA_P Parameter: Plant Line Value: WS
  misc_feature: MA Experiment 20000453 PARAMETER Experiment Name: At_100uM_ABA_P Parameter: Timepoint (hr) Value: 24
  misc_feature: MA Experiment 20000453 PARAMETER Experiment Name: At_100uM_ABA_P Parameter: Tissue Value: Aerial
  misc_feature: MA Experiment 20000453 PARAMETER Experiment Name: At_100uM_ABA_P Parameter: Treatment Value: 100uM ABA vs. No Treatment
  misc_feature: MA Experiment ID: 20000455 Result: Down-regulated in Transcription
  misc_feature: MA Experiment 20000455 PARAMETER Experiment Name: At_100uM_ABA_P Parameter: Age (day) Value: 16
  misc_feature: MA Experiment 20000455 PARAMETER Experiment Name: At_100uM_ABA_P Parameter: Organism Value: A. thaliana
  misc_feature: MA Experiment 20000455 PARAMETER Experiment Name: At_100uM_ABA_P Parameter: Plant Line Value: WS
  misc_feature: MA Experiment 20000455 PARAMETER Experiment Name: At_100uM_ABA_P Parameter: Timepoint (hr) Value: 48
  misc_feature: MA Experiment 20000455 PARAMETER Experiment Name: At_100uM_ABA_P Parameter: Tissue Value: Aerial
  misc_feature: MA Experiment 20000455 PARAMETER Experiment Name: At_100uM_ABA_P Parameter: Treatment Value: 100uM ABA vs. No Treatment
  misc_feature: MA Experiment ID: 20000709 Result: Up-regulated in Transcription
  misc_feature: MA Experiment 20000709 PARAMETER Experiment Name: At_15mM_NH4NO3_L-to-H_P Parameter: Age (hr) Value: 14
  misc_feature: MA Experiment 20000709 PARAMETER Experiment Name: At_15mM_NH4NO3_L-to-H_P Parameter: Organism Value: A. thaliana
  misc_feature: MA Experiment 20000709 PARAMETER Experiment Name: At_15mM_NH4NO3_L-to-H_P Parameter: Plant Line Value: WS
  misc_feature: MA Experiment 20000709 PARAMETER Experiment Name: At_15mM_NH4NO3_L-to-H_P Parameter: Timepoint (hr) Value: 4
  misc_feature: MA Experiment 20000709 PARAMETER Experiment Name: At_15mM_NH4NO3_L-to-H_P Parameter: Tissue Value: Aerial
  misc_feature: MA Experiment 20000709 PARAMETER Experiment Name: At_15mM_NH4NO3_L-to-H_P Parameter: Treatment Value: 15mM NH4NO3 vs. 30mM Mannitol
  misc_feature: MA Experiment ID: 20000794 Result: Down-regulated in Transcription
  misc_feature: MA Experiment 20000794 PARAMETER Experiment Name: At_Petals_P Parameter: Age (day) Value: 23-25 days
  misc_feature: MA Experiment 20000794 PARAMETER Experiment Name: At_Petals_P Parameter: Plant Line Value: WS
  misc_feature: MA Experiment 20000794 PARAMETER Experiment Name: At_Petals_P Parameter: Tissue Value: Petals vs. Whole plant
  misc_feature: MA Experiment ID: 20001247 Result: Up-regulated in Transcription
  misc_feature: MA Experiment 20001247 PARAMETER Experiment Name: At_Far-red-induction_P Parameter: Age (day) Value: 7
  misc_feature: MA Experiment 20001247 PARAMETER Experiment Name: At_Far-red-induction_P Parameter: Light Value: Far-red vs. White
  misc_feature: MA Experiment 20001247 PARAMETER Experiment Name: At_Far-red-induction_P Parameter: Organism Value: A. thaliana
  misc_feature: MA Experiment 20001247 PARAMETER Experiment Name: At_Far-red-induction_P Parameter: Plant Line Value: Columbia
  misc_feature: MA Experiment 20001247 PARAMETER Experiment Name: At_Far-red-induction_P Parameter: Timepoint (hr) Value: 1
  misc_feature: MA Experiment 20001247 PARAMETER Experiment Name: At_Far-red-induction_P Parameter: Tissue Value: Whole Plant
  misc_feature: MA Experiment ID: 20001451 Result: Up-regulated in Transcription
  misc_feature: MA Experiment 20001451 PARAMETER Experiment Name: At_Far-red-induction_P Parameter: Age (day) Value: 7
  misc_feature: MA Experiment 20001451 PARAMETER Experiment Name: At_Far-red-induction_P Parameter: Light Value: Far-red vs. White
  misc_feature: MA Experiment 20001451 PARAMETER Experiment Name: At_Far-red-induction_P Parameter: Organism Value: A. thaliana
  misc_feature: MA Experiment 20001451 PARAMETER Experiment Name: At_Far-red-induction_P Parameter: Plant Line Value: Columbia
  misc_feature: MA Experiment 20001451 PARAMETER Experiment Name: At_Far-red-induction_P Parameter: Timepoint (hr) Value: 24
  misc_feature: MA Experiment 20001451 PARAMETER Experiment Name: At_Far-red-induction_P Parameter: Tissue Value: Whole Plant
  misc_feature: MA Experiment ID: 20001457 Result: Up-regulated in Transcription
  misc_feature: MA Experiment 20001457 PARAMETER Experiment Name: At_50mM_NH4NO3_L-to-H_P Parameter: Age (day) Value: Undefined
  misc_feature: MA Experiment 20001457 PARAMETER Experiment Name: At_50mM_NH4NO3_L-to-H_P Parameter: Organism Value: Undefined
  misc_feature: MA Experiment 20001457 PARAMETER Experiment Name: At_50mM_NH4NO3_L-to-H_P Parameter: Plant Line Value: Undefined
  misc_feature: MA Experiment 20001457 PARAMETER Experiment Name: At_50mM_NH4NO3_L-to-H_P Parameter: Timepoint (hr) Value: 0.5
  misc_feature: MA Experiment 20001457 PARAMETER Experiment Name: At_50mM_NH4NO3_L-to-H_P Parameter: Tissue Value: Siliques
  misc_feature: MA Experiment 20001457 PARAMETER Experiment Name: At_50mM_NH4NO3_L-to-H_P Parameter: Treatment Value: 50mM NH4NO3 vs. 100mM Manitol
  misc_feature: MA Experiment ID: 20001458 Result: Up-regulated in Transcription
  misc_feature: MA Experiment 20001458 PARAMETER Experiment Name: At_50mM_NH4NO3_L-to-H_P Parameter: Age (day) Value: Undefined
  misc_feature: MA Experiment 20001458 PARAMETER Experiment Name: At_50mM_NH4NO3_L-to-H_P Parameter: Organism Value: Undefined
  misc_feature: MA Experiment 20001458 PARAMETER Experiment Name: At_50mM_NH4NO3_L-to-H_P Parameter: Plant Line Value: Undefined
  misc_feature: MA Experiment 20001458 PARAMETER Experiment Name: At_50mM_NH4NO3_L-to-H_P Parameter: Timepoint (hr) Value: 2
  misc_feature: MA Experiment 20001458 PARAMETER Experiment Name: At_50mM_NH4NO3_L-to-H_P Parameter: Tissue Value: Siliques
  misc_feature: MA Experiment 20001458 PARAMETER Experiment Name: At_50mM_NH4NO3_L-to-H_P Parameter: Treatment Value: 50mM NH4NO3 vs. 100mM Manitol
  misc_feature: MA Experiment ID: 20001459 Result: Up-regulated in Transcription
  misc_feature: MA Experiment 20001459 PARAMETER Experiment Name: At_50mM_NH4NO3_L-to-H_P Parameter: Age (day) Value: Undefined
  misc_feature: MA Experiment 20001459 PARAMETER Experiment Name: At_50mM_NH4NO3_L-to-H_P Parameter: Organism Value: Undefined
  misc_feature: MA Experiment 20001459 PARAMETER Experiment Name: At_50mM_NH4NO3_L-to-H_P Parameter: Plant Line Value: Undefined
  misc_feature: MA Experiment 20001459 PARAMETER Experiment Name: At_50mM_NH4NO3_L-to-H_P Parameter: Timepoint (hr) Value: 4
  misc_feature: MA Experiment 20001459 PARAMETER Experiment Name: At_50mM_NH4NO3_L-to-H_P Parameter: Tissue Value: Siliques
  misc_feature: MA Experiment 20001459 PARAMETER Experiment Name: At_50mM_NH4NO3_L-to-H_P Parameter: Treatment Value: 50mM NH4NO3 vs. 100mM Manitol
  misc_feature: MA Experiment ID: 20001554 Result: Down-regulated in Transcription
  misc_feature: MA Experiment 20001554 PARAMETER Experiment Name: At_Drought_Soil_Dry_P Parameter: Age (day) Value: 21
  misc_feature: MA Experiment 20001554 PARAMETER Experiment Name: At_Drought_Soil_Dry_P Parameter: Organism Value: A. thaliana
  misc_feature: MA Experiment 20001554 PARAMETER Experiment Name: At_Drought_Soil_Dry_P Parameter: Plant Line Value: WS
  misc_feature: MA Experiment 20001554 PARAMETER Experiment Name: At_Drought_Soil_Dry_P Parameter: Post Timepoint (hr) Value: None
  misc_feature: MA Experiment 20001554 PARAMETER Experiment Name: At_Drought_Soil_Dry_P Parameter: Post-Treatment Value: None
  misc_feature: MA Experiment 20001554 PARAMETER Experiment Name: At_Drought_Soil_Dry_P Parameter: Timepoint (day) Value: 7
  misc_feature: MA Experiment 20001554 PARAMETER Experiment Name: At_Drought_Soil_Dry_P Parameter: Treatment Value: Drought vs. No Drought
  misc_feature: MA Experiment ID: 20001555 Result: Down-regulated in Transcription
  misc_feature: MA Experiment 20001555 PARAMETER Experiment Name: At_Drought_Soil_Dry_P Parameter: Age (day) Value: 24
  misc_feature: MA Experiment 20001555 PARAMETER Experiment Name: At_Drought_Soil_Dry_P Parameter: Organism Value: A. thaliana
  misc_feature: MA Experiment 20001555 PARAMETER Experiment Name: At_Drought_Soil_Dry_P Parameter: Plant Line Value: WS
  misc_feature: MA Experiment 20001555 PARAMETER Experiment Name: At_Drought_Soil_Dry_P Parameter: Post Timepoint (hr) Value: None
  misc_feature: MA Experiment 20001555 PARAMETER Experiment Name: At_Drought_Soil_Dry_P Parameter: Post-Treatment Value: None
  misc_feature: MA Experiment 20001555 PARAMETER Experiment Name: At_Drought_Soil_Dry_P Parameter: Timepoint (day) Value: 10
  misc_feature: MA Experiment 20001555 PARAMETER Experiment Name: At_Drought_Soil_Dry_P Parameter: Treatment Value: Drought vs. No Drought
  misc_feature: MA Experiment ID: 20001556 Result: Down-regulated in Transcription
  misc_feature: MA Experiment 20001556 PARAMETER Experiment Name: At_Drought_Soil_Dry_P Parameter: Age (day) Value: 26
  misc_feature: MA Experiment 20001556 PARAMETER Experiment Name: At_Drought_Soil_Dry_P Parameter: Organism Value: A. thaliana
  misc_feature: MA Experiment 20001556 PARAMETER Experiment Name: At_Drought_Soil_Dry_P Parameter: Plant Line Value: WS
  misc_feature: MA Experiment 20001556 PARAMETER Experiment Name: At_Drought_Soil_Dry_P Parameter: Post Timepoint (hr) Value: None
  misc_feature: MA Experiment 20001556 PARAMETER Experiment Name: At_Drought_Soil_Dry_P Parameter: Post-Treatment Value: None
  misc_feature: MA Experiment 20001556 PARAMETER Experiment Name: At_Drought_Soil_Dry_P Parameter: Timepoint (day) Value: 12
  misc_feature: MA Experiment 20001556 PARAMETER Experiment Name: At_Drought_Soil_Dry_P Parameter: Treatment Value: Drought vs. No Drought
  misc_feature: MA Experiment ID: 20001559 Result: Down-regulated in Transcription
  misc_feature: MA Experiment 20001559 PARAMETER Experiment Name: At_Drought_Soil_Dry_P Parameter: Age (day) Value: 28
  misc_feature: MA Experiment 20001559 PARAMETER Experiment Name: At_Drought_Soil_Dry_P Parameter: Organism Value: A. thaliana
  misc_feature: MA Experiment 20001559 PARAMETER Experiment Name: At_Drought_Soil_Dry_P Parameter: Plant Line Value: WS
  misc_feature: MA Experiment 20001559 PARAMETER Experiment Name: At_Drought_Soil_Dry_P Parameter: Post Timepoint (hr) Value: 29
  misc_feature: MA Experiment 20001559 PARAMETER Experiment Name: At_Drought_Soil_Dry_P Parameter: Post-Treatment Value: Re-Water vs. No Drought
  misc_feature: MA Experiment 20001559 PARAMETER Experiment Name: At_Drought_Soil_Dry_P Parameter: Timepoint (day) Value: 14
  misc_feature: MA Experiment 20001559 PARAMETER Experiment Name: At_Drought_Soil_Dry_P Parameter: Treatment Value: Drought vs. No Drought
  misc_feature: MA Experiment ID: 20001757 Result: Up-regulated in Transcription
  misc_feature: MA Experiment 20001757 PARAMETER Experiment Name: At_50mM_NH4NO3_L-to-H_P Parameter: Timepoint (hr) Value: 6
  misc_feature: MA Experiment 20001757 PARAMETER Experiment Name: At_50mM_NH4NO3_L-to-H_P Parameter: Tissue Value: Leaf
  misc_feature: MA Experiment 20001757 PARAMETER Experiment Name: At_50mM_NH4NO3_L-to-H_P Parameter: Treatment Value: 50mM NH4NO3 vs 100mM Mannitol
  misc_feature: MA Experiment ID: 20001759 Result: Up-regulated in Transcription
  misc_feature: MA Experiment 20001759 PARAMETER Experiment Name: At_50mM_NH4NO3_L-to-H_P Parameter: Timepoint (hr) Value: 1
  misc_feature: MA Experiment 20001759 PARAMETER Experiment Name: At_50mM_NH4NO3_L-to-H_P Parameter: Tissue Value: Siliques
  misc_feature: MA Experiment 20001759 PARAMETER Experiment Name: At_50mM_NH4NO3_L-to-H_P Parameter: Treatment Value: 50mM NH4NO3 vs 100mM Mannitol
  misc_feature: MA Experiment ID: 20001760 Result: Up-regulated in Transcription
  misc_feature: MA Experiment 20001760 PARAMETER Experiment Name: At_50mM_NH4NO3_L-to-H_P Parameter: Timepoint (hr) Value: 2
  misc_feature: MA Experiment 20001760 PARAMETER Experiment Name: At_50mM_NH4NO3_L-to-H_P Parameter: Tissue Value: Siliques
  misc_feature: MA Experiment 20001760 PARAMETER Experiment Name: At_50mM_NH4NO3_L-to-H_P Parameter: Treatment Value: 50mM NH4NO3 vs 100mM Mannitol
  misc_feature: MA Experiment ID: 20001904 Result: Down-regulated in Transcription
  misc_feature: MA Experiment 20001904 PARAMETER Experiment Name: At_Drought_Reproduction_P Parameter: Age (day) Value: 37
  misc_feature: MA Experiment 20001904 PARAMETER Experiment Name: At_Drought_Reproduction_P Parameter: Organism Value: A. thaliana
  misc_feature: MA Experiment 20001904 PARAMETER Experiment Name: At_Drought_Reproduction_P Parameter: Plant Line Value: WS
  misc_feature: MA Experiment 20001904 PARAMETER Experiment Name: At_Drought_Reproduction_P Parameter: Timepoint (day) Value: 7
  misc_feature: MA Experiment 20001904 PARAMETER Experiment Name: At_Drought_Reproduction_P Parameter: Tissue Value: Rosettes
  misc_feature: MA Experiment 20001904 PARAMETER Experiment Name: At_Drought_Reproduction_P Parameter: Treatment Value: Drought vs. No Drought
  misc_feature: MA Experiment ID: 20001905 Result: Down-regulated in Transcription
  misc_feature: MA Experiment 20001905 PARAMETER Experiment Name: At_Drought_Reproduction_P Parameter: Age (day) Value: 40
  misc_feature: MA Experiment 20001905 PARAMETER Experiment Name: At_Drought_Reproduction_P Parameter: Organism Value: A. thaliana
  misc_feature: MA Experiment 20001905 PARAMETER Experiment Name: At_Drought_Reproduction_P Parameter: Plant Line Value: WS
  misc_feature: MA Experiment 20001905 PARAMETER Experiment Name: At_Drought_Reproduction_P Parameter: Timepoint (day) Value: 10
  misc_feature: MA Experiment 20001905 PARAMETER Experiment Name: At_Drought_Reproduction_P Parameter: Tissue Value: Rosettes
  misc_feature: MA Experiment 20001905 PARAMETER Experiment Name: At_Drought_Reproduction_P Parameter: Treatment Value: Drought vs. No Drought
  misc_feature: MA Experiment ID: 20001906 Result: Down-regulated in Transcription
  misc_feature: MA Experiment 20001906 PARAMETER Experiment Name: At_Drought_Reproduction_P Parameter: Age (day) Value: 35
  misc_feature: MA Experiment 20001906 PARAMETER Experiment Name: At_Drought_Reproduction_P Parameter: Organism Value: A. thaliana
  misc_feature: MA Experiment 20001906 PARAMETER Experiment Name: At_Drought_Reproduction_P Parameter: Plant Line Value: WS
  misc_feature: MA Experiment 20001906 PARAMETER Experiment Name: At_Drought_Reproduction_P Parameter: Timepoint (day) Value: 5
  misc_feature: MA Experiment 20001906 PARAMETER Experiment Name: At_Drought_Reproduction_P Parameter: Tissue Value: Siliques
  misc_feature: MA Experiment 20001906 PARAMETER Experiment Name: At_Drought_Reproduction_P Parameter: Treatment Value: Drought vs. No Drought
  misc_feature: MA Experiment ID: 20001908 Result: Down-regulated in Transcription
  misc_feature: MA Experiment 20001908 PARAMETER Experiment Name: At_Drought_Reproduction_P Parameter: Age (day) Value: 40
  misc_feature: MA Experiment 20001908 PARAMETER Experiment Name: At_Drought_Reproduction_P Parameter: Organism Value: A. thaliana
  misc_feature: MA Experiment 20001908 PARAMETER Experiment Name: At_Drought_Reproduction_P Parameter: Plant Line Value: WS
  misc_feature: MA Experiment 20001908 PARAMETER Experiment Name: At_Drought_Reproduction_P Parameter: Timepoint (day) Value: 10
  misc_feature: MA Experiment 20001908 PARAMETER Experiment Name: At_Drought_Reproduction_P Parameter: Tissue Value: Siliques
  misc_feature: MA Experiment 20001908 PARAMETER Experiment Name: At_Drought_Reproduction_P Parameter: Treatment Value: Drought vs. No Drought
  misc_feature: MA Experiment ID: 20001911 Result: Down-regulated in Transcription
  misc_feature: MA Experiment 20001911 PARAMETER Experiment Name: At_Drought_Reproduction_P Parameter: Age (day) Value: 40
  misc_feature: MA Experiment 20001911 PARAMETER Experiment Name: At_Drought_Reproduction_P Parameter: Organism Value: A. thaliana
  misc_feature: MA Experiment 20001911 PARAMETER Experiment Name: At_Drought_Reproduction_P Parameter: Plant Line Value: WS
  misc_feature: MA Experiment 20001911 PARAMETER Experiment Name: At_Drought_Reproduction_P Parameter: Timepoint (day) Value: 10
  misc_feature: MA Experiment 20001911 PARAMETER Experiment Name: At_Drought_Reproduction_P Parameter: Tissue Value: Flowers
  misc_feature: MA Experiment 20001911 PARAMETER Experiment Name: At_Drought_Reproduction_P Parameter: Treatment Value: Drought vs. No Drought

SEQ ID NO: 34041 - protein, 247 aa, Arabidopsis thaliana; identical to SEQ ID NO: 30451
  peptide (1)..(247): Ceres Seq. ID no. 13492463
  misc_feature (2)..(107): Pfam Name: Protein of unknown function DUF260 Pfam Description: Protein of unknown function DUF260
  misc_feature (1)..(111): Homolog of NCBI NO: 34895540 NR Description: unnamed protein product [Oryza sativa (japonica
  misc_feature (1)..(193): Homolog of NCBI NO: 15219829 NR Description: lateral organ boundaries (LOB) domain family
  misc_feature (1)..(247): Homolog of NCBI NO: 40539088 NR Description: expressed protein [Oryza sativa (japonica
  misc_feature (1)..(216): Homolog of NCBI NO: 34394489 NR Description: putative lateral organ boundaries (LOB) domain
  misc_feature (1)..(246): Homolog of NCBI NO: 15235604 NR Description: lateral organ boundaries (LOB) domain family
  misc_feature (1)..(246): Homolog of NCBI NO: 21592894 NR Description: unknown [Arabidopsis thaliana]
  misc_feature (1)..(246): Homolog of NCBI NO: 21593577 NR Description: unknown [Arabidopsis thaliana]
  misc_feature (1)..(246): Homolog of NCBI NO: 15240739 NR Description: lateral organ boundaries (LOB) domain protein 37
  misc_feature (1)..(247): Homolog of NCBI NO: 21553886 NR Description: unknown [Arabidopsis thaliana]
  misc_feature (1)..(247): Homolog of NCBI NO: 15229644 NR Description: lateral organ boundaries (LOB) domain protein,

SEQ ID NO: 34042 - protein, 199 aa, Arabidopsis thaliana; identical to SEQ ID NO: 30452
  peptide (1)..(199): Ceres Seq. ID no. 13492464
  misc_feature (1)..(59): Pfam Name: Protein of unknown function DUF260 Pfam Description: Protein of unknown function DUF260
  misc_feature (1)..(63): Homolog of NCBI NO: 34895540 NR Description: unnamed protein product [Oryza sativa (japonica
  misc_feature (1)..(145): Homolog of NCBI NO: 15219829 NR Description: lateral organ boundaries (LOB) domain family
  misc_feature (1)..(199): Homolog of NCBI NO: 40539088 NR Description: expressed protein [Oryza sativa (japonica
  misc_feature (1)..(168): Homolog of NCBI NO: 34394489 NR Description: putative lateral organ boundaries (LOB) domain
  misc_feature (1)..(198): Homolog of NCBI NO: 15235604 NR Description: lateral organ boundaries (LOB) domain family
  misc_feature (1)..(198): Homolog of NCBI NO: 21592894 NR Description: unknown [Arabidopsis thaliana]
  misc_feature (1)..(198): Homolog of NCBI NO: 21593577 NR Description: unknown [Arabidopsis thaliana]
  misc_feature (1)..(198): Homolog of NCBI NO: 15240739 NR Description: lateral organ boundaries (LOB) domain protein 37
  misc_feature (1)..(199): Homolog of NCBI NO: 21553886 NR Description: unknown [Arabidopsis thaliana]
  misc_feature (1)..(199): Homolog of NCBI NO: 15229644 NR Description: lateral organ boundaries (LOB) domain protein,

SEQ ID NO: 34043 - DNA, 662 bp, Arabidopsis thaliana; identical to SEQ ID NO: 30453
  misc_feature (1)..(662): Ceres Seq. ID no. 12579870
  misc_feature: MA Experiment ID: 108434 Result: Down-regulated in Transcription
  misc_feature: MA Experiment 108434 PARAMETER Experiment Name: At_Root_Tips_cDNA_P Parameter: Tissue Value: Root Tips
  misc_feature: MA Experiment ID: 108435 Result: Down-regulated in Transcription
  misc_feature: MA Experiment 108435 PARAMETER Experiment Name: At_stm_Mutants_cDNA_P Parameter: Plant Line Value: wt Landsburg vs stm
  misc_feature: MA Experiment 108435 PARAMETER Experiment Name: At_stm_Mutants_cDNA_P Parameter: Tissue Value: Shoot Apical Meristem Region
  misc_feature: MA Experiment ID: 108464 Result: Up-regulated in Transcription
  misc_feature: MA Experiment 108464 PARAMETER Experiment Name: At_Germinating_Seeds_cDNA_P Parameter: Age (day) Value: 4 vs. 0
  misc_feature: MA Experiment 108464 PARAMETER Experiment Name: At_Germinating_Seeds_cDNA_P Parameter: Tissue Value: Germinating Seeds
  misc_feature: MA Experiment ID: 108488 Result: Down-regulated in Transcription
  misc_feature: MA Experiment ID: 108501 Result: Down-regulated in Transcription
  misc_feature: MA Experiment 108501 PARAMETER Experiment Name: At_ap2_floral_buds_cDNA_P Parameter: Plant Line Value: ap2 (Ler.)
  misc_feature: MA Experiment 108501 PARAMETER Experiment Name: At_ap2_floral_buds_cDNA_P Parameter: Tissue Value: Closed Flower
  misc_feature: MA Experiment ID: 108573 Result: Up-regulated in Transcription
  misc_feature: MA Experiment 108573 PARAMETER Experiment Name: At_Drought_cDNA_P Parameter: Timepoint (hr) Value: 6
  misc_feature: MA Experiment 108573 PARAMETER Experiment Name: At_Drought_cDNA_P Parameter: Tissue Value: Aerial
  misc_feature: MA Experiment 108573 PARAMETER Experiment Name: At_Drought_cDNA_P Parameter: Treatment Value: Drought vs. No Drought
  misc_feature: MA Experiment ID: 108574 Result: Down-regulated in Transcription
  misc_feature: MA Experiment 108574 PARAMETER Experiment Name: At_Wounding__cDNA_P Parameter: Timepoint (hr) Value: 1
  misc_feature: MA Experiment 108574 PARAMETER Experiment Name: At_Wounding__cDNA_P Parameter: Tissue Value: Aerial
  misc_feature: MA Experiment 108574 PARAMETER Experiment Name: At_Wounding__cDNA_P Parameter: Treatment Value: Wounding vs. No Wounding
  misc_feature: MA Experiment ID: 108579 Result: Down-regulated in Transcription
  misc_feature: MA Experiment 108579 PARAMETER Experiment Name: At_4deg_Cold_cDNA_P Parameter: Temperature (deg C) Value: 4 vs. 22
  misc_feature: MA Experiment 108579 PARAMETER Experiment Name: At_4deg_Cold_cDNA_P Parameter: Timepoint (hr) Value: 6
  misc_feature: MA Experiment 108579 PARAMETER Experiment Name: At_4deg_Cold_cDNA_P Parameter: Tissue Value: Aerial
  misc_feature: MA Experiment ID: 20000111 Result: Down-regulated in Transcription
  misc_feature: MA Experiment 20000111 PARAMETER Experiment Name: At_42deg_Heat_cDNA_P Parameter: Temperature (deg C) Value: 42 vs. 22
  misc_feature: MA Experiment 20000111 PARAMETER Experiment Name: At_42deg_Heat_cDNA_P Parameter: Timepoint (hr) Value: 6
  misc_feature: MA Experiment 20000111 PARAMETER Experiment Name: At_42deg_Heat_cDNA_P Parameter: Tissue Value: Aerial
  misc_feature: MA Experiment ID: 20000213 Result: Down-regulated in Transcription
  misc_feature: MA Experiment 20000213 PARAMETER Experiment Name: At_4deg_Cold_P Parameter: Timepoint (hr) Value: 2
  misc_feature: MA Experiment ID: 20000224 Result: Down-regulated in Transcription
  misc_feature: MA Experiment ID: 20000234 Result: Down-regulated in Transcription
  misc_feature: MA Experiment 20000234 PARAMETER Experiment Name: At_Siliques_P Parameter: Age (day) Value: 21
  misc_feature: MA Experiment 20000234 PARAMETER Experiment Name: At_Siliques_P Parameter: Organism Value: A. thaliana
  misc_feature: MA Experiment 20000234 PARAMETER Experiment Name: At_Siliques_P Parameter: Plant Line Value: WS
  misc_feature: MA Experiment 20000234 PARAMETER Experiment Name: At_Siliques_P Parameter: Tissue Value: Less Than 5mm Siliques vs. Whole Plant
  misc_feature: MA Experiment ID: 20000286 Result: Down-regulated in Transcription
  misc_feature: MA Experiment 20000286 PARAMETER Experiment Name: At_Open_Flower_P Parameter: Age (day) Value: 21
  misc_feature: MA Experiment 20000286 PARAMETER Experiment Name: At_Open_Flower_P Parameter: Plant Line Value: WS
  misc_feature: MA Experiment 20000286 PARAMETER Experiment Name: At_Open_Flower_P Parameter: Tissue Value: Half Open vs. Whole Plant
  misc_feature: MA Experiment ID: 20001248 Result: Up-regulated in Transcription
  misc_feature: MA Experiment 20001248 PARAMETER Experiment Name: At_Far-red-induction_P Parameter: Age (day) Value: 7
  misc_feature: MA Experiment 20001248 PARAMETER Experiment Name: At_Far-red-induction_P Parameter: Light Value: Far-red vs. White
  misc_feature: MA Experiment 20001248 PARAMETER Experiment Name: At_Far-red-induction_P Parameter: Organism Value: A. thaliana
  misc_feature: MA Experiment 20001248 PARAMETER Experiment Name: At_Far-red-induction_P Parameter: Plant Line Value: Columbia
  misc_feature: MA Experiment 20001248 PARAMETER Experiment Name: At_Far-red-induction_P Parameter: Timepoint (hr) Value: 4
  misc_feature: MA Experiment 20001248 PARAMETER Experiment Name: At_Far-red-induction_P Parameter: Tissue Value: Whole Plant
  misc_feature: MA Experiment ID: 20001450 Result: Up-regulated in Transcription
  misc_feature: MA Experiment 20001450 PARAMETER Experiment Name: At_Far-red-induction_P Parameter: Age (day) Value: 7
  misc_feature: MA Experiment 20001450 PARAMETER Experiment Name: At_Far-red-induction_P Parameter: Light Value: Far-red vs. White
  misc_feature: MA Experiment 20001450 PARAMETER Experiment Name: At_Far-red-induction_P Parameter: Organism Value: A. thaliana
  misc_feature: MA Experiment 20001450 PARAMETER Experiment Name: At_Far-red-induction_P Parameter: Plant Line Value: Columbia
  misc_feature: MA Experiment 20001450 PARAMETER Experiment Name: At_Far-red-induction_P Parameter: Timepoint (hr) Value: 8
  misc_feature: MA Experiment 20001450 PARAMETER Experiment Name: At_Far-red-induction_P Parameter: Tissue Value: Whole Plant
  misc_feature: MA Experiment ID: 20001557 Result: Down-regulated in Transcription
  misc_feature: MA Experiment 20001557 PARAMETER Experiment Name: At_Drought_Soil_Dry_P Parameter: Age (day) Value: 27
  misc_feature: MA Experiment 20001557 PARAMETER Experiment Name: At_Drought_Soil_Dry_P Parameter: Organism Value: A. thaliana
  misc_feature: MA Experiment 20001557 PARAMETER Experiment Name: At_Drought_Soil_Dry_P Parameter: Plant Line Value: WS
  misc_feature: MA Experiment 20001557 PARAMETER Experiment Name: At_Drought_Soil_Dry_P Parameter: Post Timepoint (hr) Value: 3
  misc_feature: MA Experiment 20001557 PARAMETER Experiment Name: At_Drought_Soil_Dry_P Parameter: Post-Treatment Value: Re-Water vs. No Drought
  misc_feature: MA Experiment 20001557 PARAMETER Experiment Name: At_Drought_Soil_Dry_P Parameter: Timepoint (day) Value: 13
  misc_feature: MA Experiment 20001557 PARAMETER Experiment Name: At_Drought_Soil_Dry_P Parameter: Treatment Value: Drought vs. No Drought
  misc_feature: MA Experiment ID: 20001558 Result: Down-regulated in Transcription
  misc_feature: MA Experiment 20001558 PARAMETER Experiment Name: At_Drought_Soil_Dry_P Parameter: Age (day) Value: 27
  misc_feature: MA Experiment 20001558 PARAMETER Experiment Name: At_Drought_Soil_Dry_P Parameter: Organism Value: A. thaliana
  misc_feature: MA Experiment 20001558 PARAMETER Experiment Name: At_Drought_Soil_Dry_P Parameter: Plant Line Value: WS
  misc_feature: MA Experiment 20001558 PARAMETER Experiment Name: At_Drought_Soil_Dry_P Parameter: Post Timepoint (hr) Value: 6
  misc_feature: MA Experiment 20001558 PARAMETER Experiment Name: At_Drought_Soil_Dry_P Parameter: Post-Treatment Value: Re-Water vs. No Drought
  misc_feature: MA Experiment 20001558 PARAMETER Experiment Name: At_Drought_Soil_Dry_P Parameter: Timepoint (day) Value: 13
  misc_feature: MA Experiment 20001558 PARAMETER Experiment Name: At_Drought_Soil_Dry_P Parameter: Treatment Value: Drought vs. No Drought
  misc_feature: MA Experiment ID: 20001560 Result: Down-regulated in Transcription
  misc_feature: MA Experiment 20001560 PARAMETER Experiment Name: At_Drought_Soil_Dry_P Parameter: Age (day) Value: 28
  misc_feature: MA Experiment 20001560 PARAMETER Experiment Name: At_Drought_Soil_Dry_P Parameter: Organism Value: A. thaliana
  misc_feature: MA Experiment 20001560 PARAMETER Experiment Name: At_Drought_Soil_Dry_P Parameter: Plant Line Value: WS
  misc_feature: MA Experiment 20001560 PARAMETER Experiment Name: At_Drought_Soil_Dry_P Parameter: Post Timepoint (hr) Value: None
  misc_feature: MA Experiment 20001560 PARAMETER Experiment Name: At_Drought_Soil_Dry_P Parameter: Post-Treatment Value: None
  misc_feature: MA Experiment 20001560 PARAMETER Experiment Name: At_Drought_Soil_Dry_P Parameter: Timepoint (day) Value: 14
  misc_feature: MA Experiment 20001560 PARAMETER Experiment Name: At_Drought_Soil_Dry_P Parameter: Treatment Value: Drought vs. No Drought
  misc_feature: MA Experiment ID: 20001911 Result: Up-regulated in Transcription
  misc_feature: MA Experiment 20001911 PARAMETER Experiment Name: At_Drought_Reproduction_P Parameter: Age (day) Value: 40
  misc_feature: MA Experiment 20001911 PARAMETER Experiment Name: At_Drought_Reproduction_P Parameter: Organism Value: A. thaliana
  misc_feature: MA Experiment 20001911 PARAMETER Experiment Name: At_Drought_Reproduction_P Parameter: Plant Line Value: WS
  misc_feature: MA Experiment 20001911 PARAMETER Experiment Name: At_Drought_Reproduction_P Parameter: Timepoint (day) Value: 10
  misc_feature: MA Experiment 20001911 PARAMETER Experiment Name: At_Drought_Reproduction_P Parameter: Tissue Value: Flowers
  misc_feature: MA Experiment 20001911 PARAMETER Experiment Name: At_Drought_Reproduction_P Parameter: Treatment Value: Drought vs. No Drought

SEQ ID NO: 34044 - protein, 109 aa, Arabidopsis thaliana; identical to SEQ ID NO: 30454
  peptide (1)..(109): Ceres Seq. ID no. 12579871
  misc_feature (14)..(109): Pfam Name: Microtubule associated protein 1A/1B, light chain 3 Pfam Description: Microtubule associated protein 1A/1B, light
  misc_feature (1)..(109): Homolog of NCBI NO: 38344173 NR Description: OSJNBa0053K19.12 [Oryza sativa (japonica
  misc_feature (1)..(109): Homolog of NCBI NO: 34595981 NR Description: microtubule-associated protein 1 light chain 3
  misc_feature (1)..(109): Homolog of NCBI NO: 15224577 NR Description: putative microtubule-associated protein
  misc_feature (1)..(109): Homolog of NCBI NO: 21592920 NR Description: putative microtubule-associated protein
  misc_feature (1)..(109): Homolog of NCBI NO: 15232387 NR Description: putative protein
  misc_feature (1)..(109): Homolog of NCBI NO: 40253647 NR Description: putative microtubial binding protein
  misc_feature (1)..(109): Homolog of NCBI NO: 15225418 NR Description: putative microtubule-associated protein
  misc_feature (1)..(109): Homolog of NCBI NO: 15724332 NR Description: At2g45170/T14P1.2 [Arabidopsis thaliana]
  misc_feature (1)..(109): Homolog of NCBI NO: 21615419 NR Description: microtubule associated protein [Cicer arietinum]
  misc_feature (1)..(109): Homolog of NCBI NO: 18414683 NR Description: symbiosis-related like protein

SEQ ID NO: 34045 - protein, 62 aa, Arabidopsis thaliana; identical to SEQ ID NO: 30455
  peptide (1)..(62): Ceres Seq. ID no. 12579872
  misc_feature (1)..(62): Homolog of NCBI NO: 7446943 NR Description: hypothetical protein - Arabidopsis thaliana

SEQ ID NO: 34046 - DNA, 737 bp, Arabidopsis thaliana; identical to SEQ ID NO: 30456
  misc_feature (1)..(737): Ceres Seq. ID no. 13653789
  misc_feature: MA Experiment ID: 20000171 Result: Up-regulated in Transcription
  misc_feature: MA Experiment 20000171 PARAMETER Experiment Name: At_42deg_Heat_P Parameter: Age (day) Value: 14
  misc_feature: MA Experiment 20000171 PARAMETER Experiment Name: At_42deg_Heat_P Parameter: Organism Value: A. thaliana
  misc_feature: MA Experiment 20000171 PARAMETER Experiment Name: At_42deg_Heat_P Parameter: Plant Line Value: WS
  misc_feature: MA Experiment 20000171 PARAMETER Experiment Name: At_42deg_Heat_P Parameter: Temperature (deg C) Value: 42 vs. 22
  misc_feature: MA Experiment 20000171 PARAMETER Experiment Name: At_42deg_Heat_P Parameter: Timepoint (hr) Value: 1
  misc_feature: MA Experiment 20000171 PARAMETER Experiment Name: At_42deg_Heat_P Parameter: Tissue Value: Aerial
  misc_feature: MA Experiment ID: 20000173 Result: Up-regulated in Transcription
  misc_feature: MA Experiment 20000173 PARAMETER Experiment Name: At_42deg_Heat_P Parameter: Age (day) Value: 14
  misc_feature: MA Experiment 20000173 PARAMETER Experiment Name: At_42deg_Heat_P Parameter: Organism Value: A. thaliana
  misc_feature: MA Experiment 20000173 PARAMETER Experiment Name: At_42deg_Heat_P Parameter: Plant Line Value: WS
  misc_feature: MA Experiment 20000173 PARAMETER Experiment Name: At_42deg_Heat_P Parameter: Temperature (deg C) Value: 42 vs. 22
  misc_feature: MA Experiment 20000173 PARAMETER Experiment Name: At_42deg_Heat_P Parameter: Timepoint (hr) Value: 6
  misc_feature: MA Experiment 20000173 PARAMETER Experiment Name: At_42deg_Heat_P Parameter: Tissue Value: Aerial
  misc_feature: MA Experiment ID: 20000214 Result: Down-regulated in Transcription
  misc_feature: MA Experiment 20000214 PARAMETER Experiment Name: At_4deg_Cold_P Parameter: Timepoint (hr) Value: 6
  misc_feature: MA Experiment ID: 20000794 Result: Up-regulated in Transcription
  misc_feature: MA Experiment 20000794 PARAMETER Experiment Name: At_Petals_P Parameter: Age (day) Value: 23-25 days
  misc_feature: MA Experiment 20000794 PARAMETER Experiment Name: At_Petals_P Parameter: Plant Line Value: WS
  misc_feature: MA Experiment 20000794 PARAMETER Experiment Name: At_Petals_P Parameter: Tissue Value: Petals vs. Whole plant
  misc_feature: MA Experiment ID: 20001554 Result: Up-regulated in Transcription
  misc_feature: MA Experiment 20001554 PARAMETER Experiment Name: At_Drought_Soil_Dry_P Parameter: Age (day) Value: 21
  misc_feature: MA Experiment 20001554 PARAMETER Experiment Name: At_Drought_Soil_Dry_P Parameter: Organism Value: A. thaliana
  misc_feature: MA Experiment 20001554 PARAMETER Experiment Name: At_Drought_Soil_Dry_P Parameter: Plant Line Value: WS
  misc_feature: MA Experiment 20001554 PARAMETER Experiment Name: At_Drought_Soil_Dry_P Parameter: Post Timepoint (hr) Value: None
  misc_feature: MA Experiment 20001554 PARAMETER Experiment Name: At_Drought_Soil_Dry_P Parameter: Post-Treatment Value: None
  misc_feature: MA Experiment 20001554 PARAMETER Experiment Name: At_Drought_Soil_Dry_P Parameter: Timepoint (day) Value: 7
  misc_feature: MA Experiment 20001554 PARAMETER Experiment Name: At_Drought_Soil_Dry_P Parameter: Treatment Value: Drought vs. No Drought
  misc_feature: MA Experiment ID: 20001555 Result: Up-regulated in Transcription
  misc_feature: MA Experiment 20001555 PARAMETER Experiment Name: At_Drought_Soil_Dry_P Parameter: Age (day) Value: 24
  misc_feature: MA Experiment 20001555 PARAMETER Experiment Name: At_Drought_Soil_Dry_P Parameter: Organism Value: A. thaliana
  misc_feature: MA Experiment 20001555 PARAMETER Experiment Name: At_Drought_Soil_Dry_P Parameter: Plant Line Value: WS
  misc_feature: MA Experiment 20001555 PARAMETER Experiment Name: At_Drought_Soil_Dry_P Parameter: Post Timepoint (hr) Value: None
  misc_feature: MA Experiment 20001555 PARAMETER Experiment Name: At_Drought_Soil_Dry_P Parameter: Post-Treatment Value: None
  misc_feature: MA Experiment 20001555 PARAMETER Experiment Name: At_Drought_Soil_Dry_P Parameter: Timepoint (day) Value: 10
  misc_feature: MA Experiment 20001555 PARAMETER Experiment Name: At_Drought_Soil_Dry_P Parameter: Treatment Value: Drought vs. No Drought

SEQ ID NO: 34047 - protein, 162 aa, Arabidopsis thaliana; identical to SEQ ID NO: 30457
  peptide (1)..(162): Ceres Seq. ID no. 13653790
  misc_feature (6)..(160): Pfam Name: AhpC/TSA family Pfam Description: AhpC/TSA family
  misc_feature (1)..(162): Homolog of NCBI NO: 19548660 NR Description: peroxiredoxin [Populus tremula x Populus
  misc_feature (1)..(162): Homolog of NCBI NO: 18654477 NR Description: thioredoxin peroxidase [Capsicum annuum]
  misc_feature (1)..(162): Homolog of NCBI NO: 30841938 NR Description: thioredoxin peroxidase 1 [Lycopersicon esculentum]
  misc_feature (1)..(162): Homolog of NCBI NO: 21553913 NR Description: peroxiredoxin, putative [Arabidopsis thaliana]
  misc_feature (1)..(162): Homolog of NCBI NO: 4704732 NR Description: peroxiredoxin TPx2 [Arabidopsis thaliana]
  misc_feature (1)..(162): Homolog of NCBI NO: 18406870 NR Description: peroxiredoxin -related [Arabidopsis thaliana]
  misc_feature (1)..(162): Homolog of NCBI NO: 15218876 NR Description: type 2 peroxiredoxin -related [Arabidopsis
  misc_feature (1)..(162): Homolog of NCBI NO: 21593881 NR Description: type 2 peroxiredoxin, putative [Arabidopsis
  misc_feature (1)..(162): Homolog of NCBI NO: 4928472 NR Description: type 2 peroxiredoxin [Brassica rapa subsp.
  misc_feature (1)..(162): Homolog of NCBI NO: 15218877 NR Description: type 2 peroxiredoxin -related [Arabidopsis

SEQ ID NO: 34048 - protein, 110 aa, Arabidopsis thaliana; identical to SEQ ID NO: 30458
  peptide (1)..(110): Ceres Seq. ID no. 13653791
  misc_feature (1)..(108): Pfam Name: AhpC/TSA family Pfam Description: AhpC/TSA family
  misc_feature (1)..(110): Homolog of NCBI NO: 19548660 NR Description: peroxiredoxin [Populus tremula x Populus
  misc_feature (1)..(110): Homolog of NCBI NO: 18654477 NR Description: thioredoxin peroxidase [Capsicum annuum]
  misc_feature (1)..(110): Homolog of NCBI NO: 30841938 NR Description: thioredoxin peroxidase 1 [Lycopersicon esculentum]
  misc_feature (1)..(110): Homolog of NCBI NO: 21553913 NR Description: peroxiredoxin, putative [Arabidopsis thaliana]
  misc_feature (1)..(110): Homolog of NCBI NO: 4704732 NR Description: peroxiredoxin TPx2 [Arabidopsis thaliana]
  misc_feature (1)..(110): Homolog of NCBI NO: 18406870 NR Description: peroxiredoxin -related [Arabidopsis thaliana]
  misc_feature (1)..(110): Homolog of NCBI NO: 15218876 NR Description: type 2 peroxiredoxin -related [Arabidopsis
  misc_feature (1)..(110): Homolog of NCBI NO: 21593881 NR Description: type 2 peroxiredoxin, putative [Arabidopsis
  misc_feature (1)..(110): Homolog of NCBI NO: 4928472 NR Description: type 2 peroxiredoxin [Brassica rapa subsp.
  misc_feature (1)..(110): Homolog of NCBI NO: 15218877 NR Description: type 2 peroxiredoxin -related [Arabidopsis

SEQ ID NO: 34049 - DNA, 706 bp, Arabidopsis thaliana; identical to SEQ ID NO: 30459
  misc_feature (1)..(706): Ceres Seq. ID no. 12325438
  misc_feature: MA Experiment ID: 108464 Result: Up-regulated in Transcription
  misc_feature: MA Experiment 108464 PARAMETER Experiment Name: At_Germinating_Seeds_cDNA_P Parameter: Age (day) Value: 4 vs. 0
  misc_feature: MA Experiment 108464 PARAMETER Experiment Name: At_Germinating_Seeds_cDNA_P Parameter: Tissue Value: Germinating Seeds
  misc_feature: MA Experiment ID: 20000111 Result: Down-regulated in Transcription
  misc_feature: MA Experiment 20000111 PARAMETER Experiment Name: At_42deg_Heat_cDNA_P Parameter: Temperature (deg C) Value: 42 vs. 22
  misc_feature: MA Experiment 20000111 PARAMETER Experiment Name: At_42deg_Heat_cDNA_P Parameter: Timepoint (hr) Value: 6
  misc_feature: MA Experiment 20000111 PARAMETER Experiment Name: At_42deg_Heat_cDNA_P Parameter: Tissue Value: Aerial
  misc_feature: MA Experiment ID: 20000180 Result: Up-regulated in Transcription
  misc_feature: MA Experiment 20000180 PARAMETER Experiment Name: At_Germinating_Seeds_P Parameter: Age (hr) Value: 24 vs. 0
  misc_feature: MA Experiment 20000180 PARAMETER Experiment Name: At_Germinating_Seeds_P Parameter: Tissue Value: Germinating Seeds

SEQ ID NO: 34050 - protein, 157 aa, Arabidopsis thaliana; identical to SEQ ID NO: 30460
  peptide (1)..(157): Ceres Seq. ID no. 12325439
  misc_feature (24)..(152): Pfam Name: Dual specificity phosphatase, catalytic domain Pfam Description: Dual specificity phosphatase, catalytic domain
  misc_feature (24)..(58): Homolog of NCBI NO: 24643158 NR Description: CG7378-PA [Drosophila melanogaster]
  misc_feature (74)..(154): Homolog of NCBI NO: 24643158 NR Description: CG7378-PA [Drosophila melanogaster]
  misc_feature (20)..(151): Homolog of NCBI NO: 24643332 NR Description: CG14211-PB [Drosophila melanogaster]
  misc_feature (24)..(58): Homolog of NCBI NO: 19528569 NR Description: RH25447p [Drosophila melanogaster]
  misc_feature (74)..(154): Homolog of NCBI NO: 19528569 NR Description: RH25447p [Drosophila melanogaster]
  misc_feature (28)..(155): Homolog of NCBI NO: 34905574 NR Description: hypothetical protein~similar to Arabidopsis
  misc_feature (26)..(154): Homolog of NCBI NO: 15229482 NR Description: dual-specificity protein phosphatase; protein id:
  misc_feature (26)..(154): Homolog of NCBI NO: 9294518 NR Description: dual-specificity protein phosphatase-like protein
  misc_feature (1)..(157): Homolog of NCBI NO: 30679726 NR Description: dual-specificity protein phosphatase -related
  misc_feature (1)..(157): Homolog of NCBI NO: 18397475 NR Description: putative dual-specificity protein phosphatase

SEQ ID NO: 34051 - DNA, 904 bp, Arabidopsis thaliana; identical to SEQ ID NO: 30461
  misc_feature (1)..(904): Ceres Seq. ID no. 12323499
  misc_feature: MA Experiment ID: 108488 Result: Down-regulated in Transcription
  misc_feature: MA Experiment ID: 108573 Result: Up-regulated in Transcription
  misc_feature: MA Experiment 108573 PARAMETER Experiment Name: At_Drought_cDNA_P Parameter: Timepoint (hr) Value: 6
  misc_feature: MA Experiment 108573 PARAMETER Experiment Name: At_Drought_cDNA_P Parameter: Tissue Value: Aerial
  misc_feature: MA Experiment 108573 PARAMETER Experiment Name: At_Drought_cDNA_P Parameter: Treatment Value: Drought vs. No Drought
  misc_feature: MA Experiment ID: 108605 Result: Up-regulated in Transcription
  misc_feature: MA Experiment 108605 PARAMETER Experiment Name: At_100uM_ABA_cDNA_P Parameter: Timepoint (hr) Value: 6
  misc_feature: MA Experiment 108605 PARAMETER Experiment Name: At_100uM_ABA_cDNA_P Parameter: Tissue Value: Aerial
  misc_feature: MA Experiment 108605 PARAMETER Experiment Name: At_100uM_ABA_cDNA_P Parameter: Treatment Value: 100uM ABA vs. No Treatment
  misc_feature: MA Experiment ID: 20000185 Result: Up-regulated in Transcription
  misc_feature: MA Experiment 20000185 PARAMETER Experiment Name: At_Roots__P Parameter: Age (day) Value: 7 vs. 21
  misc_feature: MA Experiment 20000185 PARAMETER Experiment Name: At_Roots__P Parameter: Organism Value: A. thaliana
  misc_feature: MA Experiment 20000185 PARAMETER Experiment Name: At_Roots__P Parameter: Tissue Value: Roots vs. Whole Plant
  misc_feature: MA Experiment ID: 20000794 Result: Up-regulated in Transcription
  misc_feature: MA Experiment 20000794 PARAMETER Experiment Name: At_Petals_P Parameter: Age (day) Value: 23-25 days
  misc_feature: MA Experiment 20000794 PARAMETER Experiment Name: At_Petals_P Parameter: Plant Line Value: WS
  misc_feature: MA Experiment 20000794 PARAMETER Experiment Name: At_Petals_P Parameter: Tissue Value: Petals vs. Whole plant

SEQ ID NO: 34052 - protein, 252 aa, Arabidopsis thaliana; identical to SEQ ID NO: 30462
  peptide (1)..(252): Ceres Seq. ID no. 12323500
  misc_feature (42)..(225): Pfam Name: AMMECR1 Pfam Description: AMMECR1
  misc_feature (39)..(231): Homolog of NCBI NO: 39597428 NR Description: Hypothetical protein CBG03076 [Caenorhabditis
  misc_feature (39)..(241): Homolog of NCBI NO: 17535669 NR Description: Putative cytoplasmic protein of ancient origin
  misc_feature (45)..(242): Homolog of NCBI NO: 24649478 NR Description: CG5902-PA [Drosophila melanogaster]
  misc_feature (45)..(230): Homolog of NCBI NO: 34878672 NR Description: similar to hypothetical protein MGC32132 [Rattus
  misc_feature (45)..(230): Homolog of NCBI NO: 23943793 NR Description: hypothetical protein MGC32132 [Mus musculus]
  misc_feature (39)..(231): Homolog of NCBI NO: 34784081 NR Description: Similar to AMMECR1 protein [Danio rerio]
  misc_feature (39)..(231): Homolog of NCBI NO: 9506383 NR Description: AMMECR1 protein [Mus musculus]
  misc_feature (39)..(231): Homolog of NCBI NO: 7669554 NR Description: AMMECR1 protein [Homo sapiens]
  misc_feature (39)..(245): Homolog of NCBI NO: 37537060 NR Description: unknown protein [Oryza sativa (japonica
  misc_feature (39)..(252): Homolog of NCBI NO: 18404840 NR Description: expressed protein

SEQ ID NO: 34053 - protein, 214 aa, Arabidopsis thaliana; identical to SEQ ID NO: 30463
  peptide (1)..(214): Ceres Seq. ID no. 12323501
  misc_feature (4)..(187): Pfam Name: AMMECR1 Pfam Description: AMMECR1
  misc_feature (1)..(193): Homolog of NCBI NO: 39597428 NR Description: Hypothetical protein CBG03076 [Caenorhabditis
  misc_feature (1)..(203): Homolog of NCBI NO: 17535669 NR Description: Putative cytoplasmic protein of ancient origin
  misc_feature (7)..(204): Homolog of NCBI NO: 24649478 NR Description: CG5902-PA [Drosophila melanogaster]
  misc_feature (7)..(192): Homolog of NCBI NO: 34878672 NR Description: similar to hypothetical protein MGC32132 [Rattus
  misc_feature (7)..(192): Homolog of NCBI NO: 23943793 NR Description: hypothetical protein MGC32132 [Mus musculus]
  misc_feature (1)..(193): Homolog of NCBI NO: 34784081 NR Description: Similar to AMMECR1 protein [Danio rerio]
  misc_feature (1)..(193): Homolog of NCBI NO: 9506383 NR Description: AMMECR1 protein [Mus musculus]
  misc_feature (1)..(193): Homolog of NCBI NO: 7669554 NR Description: AMMECR1 protein [Homo sapiens]
  misc_feature (1)..(207): Homolog of NCBI NO: 37537060 NR Description: unknown protein [Oryza sativa (japonica
  misc_feature (1)..(214): Homolog of NCBI NO: 18404840 NR Description: expressed protein

SEQ ID NO: 34054 - protein, 207 aa, Arabidopsis thaliana; identical to SEQ ID NO: 30464
  peptide (1)..(207): Ceres Seq. ID no. 12323502
  misc_feature (1)..(180): Pfam Name: AMMECR1 Pfam Description: AMMECR1
  misc_feature (1)..(186): Homolog of NCBI NO: 39597428 NR Description: Hypothetical protein CBG03076 [Caenorhabditis
  misc_feature (1)..(196): Homolog of NCBI NO: 17535669 NR Description: Putative cytoplasmic protein of ancient origin
  misc_feature (1)..(197): Homolog of NCBI NO: 24649478 NR Description: CG5902-PA [Drosophila melanogaster]
  misc_feature (1)..(185): Homolog of NCBI NO: 34878672 NR Description: similar to hypothetical protein MGC32132 [Rattus
  misc_feature (1)..(185): Homolog of NCBI NO: 23943793 NR Description: hypothetical protein MGC32132 [Mus musculus]
  misc_feature (1)..(186): Homolog of NCBI NO: 34784081 NR Description: Similar to AMMECR1 protein [Danio rerio]
  misc_feature (1)..(186): Homolog of NCBI NO: 9506383 NR Description: AMMECR1 protein [Mus musculus]
  misc_feature (1)..(186): Homolog of NCBI NO: 7669554 NR Description: AMMECR1 protein [Homo sapiens]
  misc_feature (1)..(200): Homolog of NCBI NO: 37537060 NR Description: unknown protein [Oryza sativa (japonica
  misc_feature (1)..(207): Homolog of NCBI NO: 18404840 NR Description: expressed protein

SEQ ID NO: 34055 - DNA, 1243 bp, Arabidopsis thaliana; identical to SEQ ID NO: 20950
  misc_feature (1)..(1243): Ceres Seq. ID no. 12394450
  misc_feature: MA Experiment ID: 108434 Result: Down-regulated in Transcription
  misc_feature: MA Experiment 108434 PARAMETER Experiment Name: At_Root_Tips_cDNA_P Parameter: Tissue Value: Root Tips
  misc_feature: MA Experiment ID: 108461 Result: Up-regulated in Transcription
  misc_feature: MA Experiment 108461 PARAMETER Experiment Name: At_Germinating_Seeds_cDNA_P Parameter: Age (day) Value: 1 vs. 0
  misc_feature: MA Experiment 108461 PARAMETER Experiment Name: At_Germinating_Seeds_cDNA_P Parameter: Tissue Value: Germinating Seeds
  misc_feature: MA Experiment ID: 108462 Result: Up-regulated in Transcription
  misc_feature: MA Experiment 108462 PARAMETER Experiment Name: At_Germinating_Seeds_cDNA_P Parameter: Age (day) Value: 2 vs. 0
  misc_feature: MA Experiment 108462 PARAMETER Experiment Name: At_Germinating_Seeds_cDNA_P Parameter: Tissue Value: Germinating Seeds
  misc_feature: MA Experiment ID: 108463 Result: Up-regulated in Transcription
  misc_feature: MA Experiment 108463 PARAMETER Experiment Name: At_Germinating_Seeds_cDNA_P Parameter: Age (day) Value: 3 vs. 0
  misc_feature: MA Experiment 108463 PARAMETER Experiment Name: At_Germinating_Seeds_cDNA_P Parameter: Tissue Value: Germinating Seeds
  misc_feature: MA Experiment ID: 108464 Result: Up-regulated in Transcription
  misc_feature: MA Experiment 108464 PARAMETER Experiment Name: At_Germinating_Seeds_cDNA_P Parameter: Age (day) Value: 4 vs. 0
  misc_feature: MA Experiment 108464 PARAMETER Experiment Name: At_Germinating_Seeds_cDNA_P Parameter: Tissue Value: Germinating Seeds
  misc_feature: MA Experiment ID: 108474 Result: Down-regulated in Transcription
  misc_feature: MA Experiment 108474 PARAMETER Experiment Name: At_Drought_Flowers_cDNA_P Parameter: Timepoint (hr) Value: null
  misc_feature: MA Experiment 108474 PARAMETER Experiment Name: At_Drought_Flowers_cDNA_P Parameter: Treatment Value: Drought vs. No Drought
  misc_feature: MA Experiment ID: 108594 Result: Down-regulated in Transcription
  misc_feature: MA Experiment 108594 PARAMETER Experiment Name: At_Ler-rhl_Root_cDNA_P Parameter: Plant Line Value: null
  misc_feature: MA Experiment ID: 108609 Result: Up-regulated in Transcription
  misc_feature: MA Experiment 108609 PARAMETER Experiment Name: At_100uM_ABA_cDNA_P Parameter: Timepoint (hr) Value: 24
  misc_feature: MA Experiment 108609 PARAMETER Experiment Name: At_100uM_ABA_cDNA_P Parameter: Tissue Value: Aerial
  misc_feature: MA Experiment 108609 PARAMETER Experiment Name: At_100uM_ABA_cDNA_P Parameter: Treatment Value: 100uM ABA vs. No Treatment
  misc_feature: MA Experiment ID: 20000071 Result: Up-regulated in Transcription
  misc_feature: MA Experiment 20000071 PARAMETER Experiment Name: At_100uM_ABA_Mutants_cDNA_P Parameter: Plant Line Value: CS8104
  misc_feature: MA Experiment 20000071 PARAMETER Experiment Name: At_100uM_ABA_Mutants_cDNA_P Parameter: Timepoint (hr) Value: 6
  misc_feature: MA Experiment 20000071 PARAMETER Experiment Name: At_100uM_ABA_Mutants_cDNA_P Parameter: Tissue Value: Aerial
  misc_feature: MA Experiment 20000071 PARAMETER Experiment Name: At_100uM_ABA_Mutants_cDNA_P Parameter: Treatment Value: 100uM ABA vs. No Treatment
  misc_feature: MA Experiment ID: 20000087 Result: Up-regulated in Transcription
  misc_feature: MA Experiment 20000087 PARAMETER Experiment Name: At_100uM_ABA_Mutants_cDNA_P Parameter: Plant Line Value: WS
  misc_feature: MA Experiment 20000087 PARAMETER Experiment Name: At_100uM_ABA_Mutants_cDNA_P Parameter: Timepoint (hr) Value: 6
  misc_feature: MA Experiment 20000087 PARAMETER Experiment Name: At_100uM_ABA_Mutants_cDNA_P Parameter: Tissue Value: Aerial
  misc_feature: MA Experiment 20000087 PARAMETER Experiment Name: At_100uM_ABA_Mutants_cDNA_P Parameter: Treatment Value: 100uM ABA vs. No Treatment
  misc_feature: MA Experiment ID: 20000184 Result: Up-regulated in Transcription
  misc_feature: MA Experiment 20000184 PARAMETER Experiment Name: At_Shoots__P Parameter: Age (day) Value: 7
  misc_feature: MA Experiment 20000184 PARAMETER Experiment Name: At_Shoots__P Parameter: Tissue Value: Shoots vs. Whole Plant
  misc_feature: MA Experiment ID: 20000185 Result: Up-regulated in Transcription
  misc_feature: MA Experiment 20000185 PARAMETER Experiment Name: At_Roots__P Parameter: Age (day) Value: 7 vs. 21
  misc_feature: MA Experiment 20000185 PARAMETER Experiment Name: At_Roots__P Parameter: Organism Value: A. thaliana
  misc_feature: MA Experiment 20000185 PARAMETER Experiment Name: At_Roots__P Parameter: Tissue Value: Roots vs. Whole Plant
  misc_feature: MA Experiment ID: 20000234 Result: Up-regulated in Transcription
  misc_feature: MA Experiment 20000234 PARAMETER Experiment Name: At_Siliques_P Parameter: Age (day) Value: 21
  misc_feature: MA Experiment 20000234 PARAMETER Experiment Name: At_Siliques_P Parameter: Organism Value: A. thaliana
  misc_feature: MA Experiment 20000234 PARAMETER Experiment Name: At_Siliques_P Parameter: Plant Line Value: WS
  misc_feature: MA Experiment 20000234 PARAMETER Experiment Name: At_Siliques_P Parameter: Tissue Value: Less Than 5mm Siliques vs. Whole Plant
  misc_feature: MA Experiment ID: 20000235 Result: Up-regulated in Transcription
  misc_feature: MA Experiment 20000235 PARAMETER Experiment Name: At_Siliques_P Parameter: Age (day) Value: 21
  misc_feature: MA Experiment 20000235 PARAMETER Experiment Name: At_Siliques_P Parameter: Organism Value: A. thaliana
  misc_feature: MA Experiment 20000235 PARAMETER Experiment Name: At_Siliques_P Parameter: Plant Line Value: WS
  misc_feature: MA Experiment 20000235 PARAMETER Experiment Name: At_Siliques_P Parameter: Tissue Value: 5-10mm Siliques vs. Whole Plant
  misc_feature: MA Experiment ID: 20000286 Result: Up-regulated in Transcription
  misc_feature: MA Experiment 20000286 PARAMETER Experiment Name: At_Open_Flower_P Parameter: Age (day) Value: 21
  misc_feature: MA Experiment 20000286 PARAMETER Experiment Name: At_Open_Flower_P Parameter: Plant Line Value: WS
  misc_feature: MA Experiment 20000286 PARAMETER Experiment Name: At_Open_Flower_P Parameter: Tissue Value: Half Open vs. Whole Plant
  misc_feature: MA Experiment ID: 20000436 Result: Up-regulated in Transcription
  misc_feature: MA Experiment 20000436 PARAMETER Experiment Name: At_Drought_P Parameter: Age (day) Value: 7
  misc_feature: MA Experiment 20000436 PARAMETER Experiment Name: At_Drought_P Parameter: Organism Value: A. thaliana
  misc_feature: MA Experiment 20000436 PARAMETER Experiment Name: At_Drought_P Parameter: Plant Line Value: WS
  misc_feature: MA Experiment 20000436 PARAMETER Experiment Name: At_Drought_P Parameter: Timepoint (hr) Value: 12
  misc_feature: MA Experiment 20000436 PARAMETER Experiment Name: At_Drought_P Parameter: Tissue Value: Whole Plant
  misc_feature: MA Experiment 20000436 PARAMETER Experiment Name: At_Drought_P Parameter: Treatment Value: Drought vs. No Drought
  misc_feature: MA Experiment ID: 20000439 Result: Up-regulated in Transcription
  misc_feature: MA Experiment 20000439 PARAMETER Experiment Name: At_Roots__P Parameter: Age (day) Value: 14 vs. 21
  misc_feature: MA Experiment 20000439 PARAMETER Experiment Name: At_Roots__P Parameter: Organism Value: A. thaliana
  misc_feature: MA Experiment 20000439 PARAMETER Experiment Name: At_Roots__P Parameter: Tissue Value: Roots vs. Whole Plant
  misc_feature: MA Experiment ID: 20000453 Result: Up-regulated in Transcription
  misc_feature: MA Experiment 20000453 PARAMETER Experiment Name: At_100uM_ABA_P Parameter: Age (day) Value: 15
  misc_feature: MA Experiment 20000453 PARAMETER Experiment Name: At_100uM_ABA_P Parameter: Organism Value: A. thaliana
  misc_feature: MA Experiment 20000453 PARAMETER Experiment Name: At_100uM_ABA_P Parameter: Plant Line Value: WS
  misc_feature: MA Experiment 20000453 PARAMETER Experiment Name: At_100uM_ABA_P Parameter: Timepoint (hr) Value: 24
  misc_feature: MA Experiment 20000453 PARAMETER Experiment Name: At_100uM_ABA_P Parameter: Tissue Value: Aerial
  misc_feature: MA Experiment 20000453 PARAMETER Experiment Name: At_100uM_ABA_P Parameter: Treatment Value: 100uM ABA vs. No Treatment
  misc_feature: MA Experiment ID: 20000794 Result: Down-regulated in Transcription
  misc_feature: MA Experiment 20000794 PARAMETER Experiment Name: At_Petals_P Parameter: Age (day) Value: 23-25 days
  misc_feature: MA Experiment 20000794 PARAMETER Experiment Name: At_Petals_P Parameter: Plant Line Value: WS
  misc_feature: MA Experiment 20000794 PARAMETER Experiment Name: At_Petals_P Parameter: Tissue Value: Petals vs. Whole plant
  misc_feature: MA Experiment ID: 20001248 Result: Down-regulated in Transcription
  misc_feature: MA Experiment 20001248 PARAMETER Experiment Name: At_Far-red-induction_P Parameter: Age (day) Value: 7
  misc_feature: MA Experiment 20001248 PARAMETER Experiment Name: At_Far-red-induction_P Parameter: Light Value: Far-red vs. White
  misc_feature: MA Experiment 20001248 PARAMETER Experiment Name: At_Far-red-induction_P Parameter: Organism Value: A. thaliana
  misc_feature: MA Experiment 20001248 PARAMETER Experiment Name: At_Far-red-induction_P Parameter: Plant Line Value: Columbia
  misc_feature: MA Experiment 20001248 PARAMETER Experiment Name: At_Far-red-induction_P Parameter: Timepoint (hr) Value: 4
  misc_feature: MA Experiment 20001248 PARAMETER Experiment Name: At_Far-red-induction_P Parameter: Tissue Value: Whole Plant
  misc_feature: MA Experiment ID: 20001450 Result: Down-regulated in Transcription
  misc_feature: MA Experiment 20001450 PARAMETER Experiment Name: At_Far-red-induction_P Parameter: Age (day) Value: 7
  misc_feature: MA Experiment 20001450 PARAMETER Experiment Name: At_Far-red-induction_P Parameter: Light Value: Far-red vs. White
  misc_feature: MA Experiment 20001450 PARAMETER Experiment Name: At_Far-red-induction_P Parameter: Organism Value: A. thaliana
  misc_feature: MA Experiment 20001450 PARAMETER Experiment Name: At_Far-red-induction_P Parameter: Plant Line Value: Columbia
  misc_feature: MA Experiment 20001450 PARAMETER Experiment Name: At_Far-red-induction_P Parameter: Timepoint (hr) Value: 8
  misc_feature: MA Experiment 20001450 PARAMETER Experiment Name: At_Far-red-induction_P Parameter: Tissue Value: Whole Plant
  misc_feature: MA Experiment ID: 20001557 Result: Down-regulated in Transcription
  misc_feature: MA Experiment 20001557 PARAMETER Experiment Name: At_Drought_Soil_Dry_P Parameter: Age (day) Value: 27
  misc_feature: MA Experiment 20001557 PARAMETER Experiment Name: At_Drought_Soil_Dry_P Parameter: Organism Value: A. thaliana
  misc_feature: MA Experiment 20001557 PARAMETER Experiment Name: At_Drought_Soil_Dry_P Parameter: Plant Line Value: WS
  misc_feature: MA Experiment 20001557 PARAMETER Experiment Name: At_Drought_Soil_Dry_P Parameter: Post Timepoint (hr) Value: 3
  misc_feature: MA Experiment 20001557 PARAMETER Experiment Name: At_Drought_Soil_Dry_P Parameter: Post-Treatment Value: Re-Water vs. No Drought
  misc_feature: MA Experiment 20001557 PARAMETER Experiment Name: At_Drought_Soil_Dry_P Parameter: Timepoint (day) Value: 13
  misc_feature: MA Experiment 20001557 PARAMETER Experiment Name: At_Drought_Soil_Dry_P Parameter: Treatment Value: Drought vs. No Drought
  misc_feature: MA Experiment ID: 20001558 Result: Down-regulated in Transcription
  misc_feature: MA Experiment 20001558 PARAMETER Experiment Name: At_Drought_Soil_Dry_P Parameter: Age (day) Value: 27
  misc_feature: MA Experiment 20001558 PARAMETER Experiment Name: At_Drought_Soil_Dry_P Parameter: Organism Value: A. thaliana
  misc_feature: MA Experiment 20001558 PARAMETER Experiment Name: At_Drought_Soil_Dry_P Parameter: Plant Line Value: WS
  misc_feature: MA Experiment 20001558 PARAMETER Experiment Name: At_Drought_Soil_Dry_P Parameter: Post Timepoint (hr) Value: 6
  misc_feature: MA Experiment 20001558 PARAMETER Experiment Name: At_Drought_Soil_Dry_P Parameter: Post-Treatment Value: Re-Water vs. No Drought
  misc_feature: MA Experiment 20001558 PARAMETER Experiment Name: At_Drought_Soil_Dry_P Parameter: Timepoint (day) Value: 13
  misc_feature: MA Experiment 20001558 PARAMETER Experiment Name: At_Drought_Soil_Dry_P Parameter: Treatment Value: Drought vs. No Drought

SEQ ID NO: 34056 - protein, 345 aa, Arabidopsis thaliana; identical to SEQ ID NO: 20951
  peptide (1)..(345): Ceres Seq. ID no. 12394451
  misc_feature (65)..(311): Pfam Name: Peroxidase Pfam Description: Peroxidase
  misc_feature (65)..(311): Pfam Name: Peroxidase Pfam Description: Peroxidase
  misc_feature (142)..(345): Homolog of NCBI NO: 1890319 NR Description: peroxidase ATP27a [Arabidopsis thaliana]
  misc_feature (64)..(345): Homolog of NCBI NO: 2956707 NR Description: peroxidase [Spinacia oleracea]
  misc_feature (142)..(345): Homolog of NCBI NO: 1890319 NR Description: peroxidase ATP27a [Arabidopsis thaliana]
  misc_feature (47)..(345): Homolog of NCBI NO: 7484677 NR Description: peroxidase (EC 1.11.1.7) prx11 precursor - spinach
  misc_feature (24)..(345): Homolog of NCBI NO: 15242213 NR Description: peroxidase, putative
  misc_feature (64)..(345): Homolog of NCBI NO: 2956707 NR Description: peroxidase [Spinacia oleracea]
  misc_feature (47)..(345): Homolog of NCBI NO: 7484677 NR Description: peroxidase (EC 1.11.1.7) prx11 precursor - spinach
  misc_feature (24)..(345): Homolog of NCBI NO: 15242213 NR Description: peroxidase, putative

SEQ ID NO: 34057 - protein, 322 aa, Arabidopsis thaliana; identical to SEQ ID NO: 20952
  peptide (1)..(322): Ceres Seq. ID no. 12394452
  misc_feature (42)..(288): Pfam Name: Peroxidase Pfam Description: Peroxidase
  misc_feature (42)..(288): Pfam Name: Peroxidase Pfam Description: Peroxidase
  misc_feature (119)..(322): Homolog of NCBI NO: 1890319 NR Description: peroxidase ATP27a [Arabidopsis thaliana]
  misc_feature (41)..(322): Homolog of NCBI NO: 2956707 NR Description: peroxidase [Spinacia oleracea]
  misc_feature (119)..(322): Homolog of NCBI NO: 1890319 NR Description: peroxidase ATP27a [Arabidopsis thaliana]
  misc_feature (24)..(322): Homolog of NCBI NO: 7484677 NR Description: peroxidase (EC 1.11.1.7) prx11 precursor - spinach
  misc_feature (1)..(322): Homolog of NCBI NO: 15242213 NR Description: peroxidase, putative
  misc_feature (41)..(322): Homolog of NCBI NO: 2956707 NR Description: peroxidase [Spinacia oleracea]
  misc_feature (24)..(322): Homolog of NCBI NO: 7484677 NR Description: peroxidase (EC 1.11.1.7) prx11 precursor - spinach
  misc_feature (1)..(322): Homolog of NCBI NO: 15242213 NR Description: peroxidase, putative

SEQ ID NO: 34058 - protein, 312 aa, Arabidopsis thaliana; identical to SEQ ID NO: 20953
  peptide (1)..(312): Ceres Seq. ID no. 12394453
  misc_feature (32)..(278): Pfam Name: Peroxidase Pfam Description: Peroxidase
  misc_feature (32)..(278): Pfam Name: Peroxidase Pfam Description: Peroxidase
  misc_feature (109)..(312): Homolog of NCBI NO: 1890319 NR Description: peroxidase ATP27a [Arabidopsis thaliana]
  misc_feature (31)..(312): Homolog of NCBI NO: 2956707 NR Description: peroxidase [Spinacia oleracea]
  misc_feature (31)..(312): Homolog of NCBI NO: 2956707 NR Description: peroxidase [Spinacia oleracea]
  misc_feature (1)..(312): Homolog of NCBI NO: 15242213 NR Description: peroxidase, putative
  misc_feature (14)..(312): Homolog of NCBI NO: 7484677 NR Description: peroxidase (EC 1.11.1.7) prx11 precursor - spinach
  misc_feature (109)..(312): Homolog of NCBI NO: 1890319 NR Description: peroxidase ATP27a [Arabidopsis thaliana]
  misc_feature (14)..(312): Homolog of NCBI NO: 7484677 NR Description: peroxidase (EC 1.11.1.7) prx11 precursor - spinach
  misc_feature (1)..(312): Homolog of NCBI NO: 15242213 NR Description: peroxidase, putative

SEQ ID NO: 34059 - DNA, 950 bp, Arabidopsis thaliana; identical to SEQ ID NO: 30469
  misc_feature (1)..(950): Ceres Seq. ID no. 13499517
  misc_feature: MA Experiment ID: 108434 Result: Down-regulated in Transcription
  misc_feature: MA Experiment 108434 PARAMETER Experiment Name: At_Root_Tips_cDNA_P Parameter: Tissue Value: Root Tips
  misc_feature: MA Experiment ID: 108473 Result: Up-regulated in Transcription
  misc_feature: MA Experiment 108473 PARAMETER Experiment Name: At_Drought_Flowers_cDNA_P Parameter: Timepoint (hr) Value: 7 d
  misc_feature: MA Experiment 108473 PARAMETER Experiment Name: At_Drought_Flowers_cDNA_P Parameter: Tissue Value: Flower
  misc_feature: MA Experiment 108473 PARAMETER Experiment Name: At_Drought_Flowers_cDNA_P Parameter: Treatment Value: Drought vs. No Drought
  misc_feature: MA Experiment ID: 108474 Result: Up-regulated in Transcription
  misc_feature: MA Experiment 108474 PARAMETER Experiment Name: At_Drought_Flowers_cDNA_P Parameter: Timepoint (hr) Value: null
  misc_feature: MA Experiment 108474 PARAMETER Experiment Name: At_Drought_Flowers_cDNA_P Parameter: Treatment Value: Drought vs. No Drought
  misc_feature: MA Experiment ID: 108489 Result: Up-regulated in Transcription
  misc_feature: MA Experiment ID: 108501 Result: Down-regulated in Transcription
  misc_feature: MA Experiment 108501 PARAMETER Experiment Name: At_ap2_floral_buds_cDNA_P Parameter: Plant Line Value: ap2 (Ler.)
  misc_feature: MA Experiment 108501 PARAMETER Experiment Name: At_ap2_floral_buds_cDNA_P Parameter: Tissue Value: Closed Flower
  misc_feature: MA Experiment ID: 108595 Result: Up-regulated in Transcription
  misc_feature: MA Experiment 108595 PARAMETER Experiment Name: At_Ler-pi_Ovule_cDNA_P Parameter: Plant Line Value: null
  misc_feature: MA Experiment ID: 108609 Result: Up-regulated in Transcription
  misc_feature: MA Experiment 108609 PARAMETER Experiment Name: At_100uM_ABA_cDNA_P Parameter: Timepoint (hr) Value: 24
  misc_feature: MA Experiment 108609 PARAMETER Experiment Name: At_100uM_ABA_cDNA_P Parameter: Tissue Value: Aerial
  misc_feature: MA Experiment 108609 PARAMETER Experiment Name: At_100uM_ABA_cDNA_P Parameter: Treatment Value: 100uM ABA vs. No Treatment
  misc_feature: MA Experiment ID: 20000069 Result: Up-regulated in Transcription
  misc_feature: MA Experiment 20000069 PARAMETER Experiment Name: At_100uM_ABA_Mutants_cDNA_P Parameter: Plant Line Value: CS23
  misc_feature: MA Experiment 20000069 PARAMETER Experiment Name: At_100uM_ABA_Mutants_cDNA_P Parameter: Timepoint (hr) Value: 6
  misc_feature: MA Experiment 20000069 PARAMETER Experiment Name: At_100uM_ABA_Mutants_cDNA_P Parameter: Tissue Value: Aerial
  misc_feature: MA Experiment 20000069 PARAMETER Experiment Name: At_100uM_ABA_Mutants_cDNA_P Parameter: Treatment Value: 100uM ABA vs. No Treatment
  misc_feature: MA Experiment ID: 20000070 Result: Up-regulated in Transcription
  misc_feature: MA Experiment 20000070 PARAMETER Experiment Name: At_100uM_ABA_Mutants_cDNA_P Parameter: Plant Line Value: CS24
  misc_feature: MA Experiment 20000070 PARAMETER Experiment Name: At_100uM_ABA_Mutants_cDNA_P Parameter: Timepoint (hr) Value: 6
  misc_feature: MA Experiment 20000070 PARAMETER Experiment Name: At_100uM_ABA_Mutants_cDNA_P Parameter: Tissue Value: Aerial
  misc_feature: MA Experiment 20000070 PARAMETER Experiment Name: At_100uM_ABA_Mutants_cDNA_P Parameter: Treatment Value: 100uM ABA vs. No Treatment
  misc_feature: MA Experiment ID: 20000071 Result: Up-regulated in Transcription
  misc_feature: MA Experiment 20000071 PARAMETER Experiment Name: At_100uM_ABA_Mutants_cDNA_P Parameter: Plant Line Value: CS8104
  misc_feature: MA Experiment 20000071 PARAMETER Experiment Name: At_100uM_ABA_Mutants_cDNA_P Parameter: Timepoint (hr) Value: 6
  misc_feature: MA Experiment 20000071 PARAMETER Experiment Name: At_100uM_ABA_Mutants_cDNA_P Parameter: Tissue Value: Aerial
  misc_feature: MA Experiment 20000071 PARAMETER Experiment Name: At_100uM_ABA_Mutants_cDNA_P Parameter: Treatment Value: 100uM ABA vs. No Treatment
  misc_feature: MA Experiment ID: 20000072 Result: Up-regulated in Transcription
  misc_feature: MA Experiment 20000072 PARAMETER Experiment Name: At_100uM_ABA_Mutants_cDNA_P Parameter: Plant Line Value: CS8105
  misc_feature: MA Experiment 20000072 PARAMETER Experiment Name: At_100uM_ABA_Mutants_cDNA_P Parameter: Timepoint (hr) Value: 6
  misc_feature: MA Experiment 20000072 PARAMETER Experiment Name: At_100uM_ABA_Mutants_cDNA_P Parameter: Tissue Value: Aerial
  misc_feature: MA Experiment 20000072 PARAMETER Experiment Name: At_100uM_ABA_Mutants_cDNA_P Parameter: Treatment Value: 100uM ABA vs. No Treatment
  misc_feature: MA Experiment ID: 20000117 Result: Up-regulated in Transcription
  misc_feature: MA Experiment 20000117 PARAMETER Experiment Name: At_100uM_ABA_Mutants_cDNA_P Parameter: Plant Line Value: Columbia
  misc_feature: MA Experiment 20000117 PARAMETER Experiment Name: At_100uM_ABA_Mutants_cDNA_P Parameter: Timepoint (hr) Value: 6
  misc_feature: MA Experiment 20000117 PARAMETER Experiment Name: At_100uM_ABA_Mutants_cDNA_P Parameter: Tissue Value: Aerial
  misc_feature: MA Experiment 20000117 PARAMETER Experiment Name: At_100uM_ABA_Mutants_cDNA_P Parameter: Treatment Value: 100uM ABA vs. No Treatment
  misc_feature: MA Experiment ID: 20000185 Result: Down-regulated in Transcription
  misc_feature: MA Experiment 20000185 PARAMETER Experiment Name: At_Roots__P Parameter: Age (day) Value: 7 vs. 21
  misc_feature: MA Experiment 20000185 PARAMETER Experiment Name: At_Roots__P Parameter: Organism Value: A. thaliana
  misc_feature: MA Experiment 20000185 PARAMETER Experiment Name: At_Roots__P Parameter: Tissue Value: Roots vs. Whole Plant
  misc_feature: MA Experiment ID: 20000227 Result: Down-regulated in Transcription
  misc_feature: MA Experiment 20000227 PARAMETER Experiment Name: At_Root-Tips-vs-Tops_P Parameter: Tissue Value: Root Tips vs. Root Tops
  misc_feature: MA Experiment ID: 20000234 Result: Up-regulated in Transcription
  misc_feature: MA Experiment 20000234 PARAMETER Experiment Name: At_Siliques_P Parameter: Age (day) Value: 21
  misc_feature: MA Experiment 20000234 PARAMETER Experiment Name: At_Siliques_P Parameter: Organism Value: A. thaliana
  misc_feature: MA Experiment 20000234 PARAMETER Experiment Name: At_Siliques_P Parameter: Plant Line Value: WS
  misc_feature: MA Experiment 20000234 PARAMETER Experiment Name: At_Siliques_P Parameter: Tissue Value: Less Than 5mm Siliques vs. Whole Plant
  misc_feature: MA Experiment ID: 20000265 Result: Up-regulated in Transcription
  misc_feature: MA Experiment 20000265 PARAMETER Experiment Name: At_Open_Flower_P Parameter: Age (day) Value: 21
  misc_feature: MA Experiment 20000265 PARAMETER Experiment Name: At_Open_Flower_P Parameter: Plant Line Value: WS
  misc_feature: MA Experiment 20000265 PARAMETER Experiment Name: At_Open_Flower_P Parameter: Tissue Value: Closed Flower vs. Whole Plant
  misc_feature: MA Experiment ID: 20000267 Result: Up-regulated in Transcription
  misc_feature: MA Experiment 20000267 PARAMETER Experiment Name: At_Drought_P Parameter: Age (day) Value: 7
  misc_feature: MA Experiment 20000267 PARAMETER Experiment Name: At_Drought_P Parameter: Organism Value: A. thaliana
  misc_feature: MA Experiment 20000267 PARAMETER Experiment Name: At_Drought_P Parameter: Plant Line Value: WS
  misc_feature: MA Experiment 20000267 PARAMETER Experiment Name: At_Drought_P Parameter: Timepoint (hr) Value: 6
  misc_feature: MA Experiment 20000267 PARAMETER Experiment Name: At_Drought_P Parameter: Tissue Value: Whole Plant
  misc_feature: MA Experiment 20000267 PARAMETER Experiment Name: At_Drought_P Parameter: Treatment Value: Drought vs. No Drought
  misc_feature: MA Experiment ID: 20000268 Result: Up-regulated in Transcription
  misc_feature: MA Experiment 20000268 PARAMETER Experiment Name: At_100mM_NaCl__P Parameter: Age (day) Value: 14
  misc_feature: MA Experiment 20000268 PARAMETER Experiment Name: At_100mM_NaCl__P Parameter: Organism Value: A. thaliana
  misc_feature: MA Experiment 20000268 PARAMETER Experiment Name: At_100mM_NaCl__P Parameter: Plant Line Value: WS
  misc_feature: MA Experiment 20000268 PARAMETER Experiment Name: At_100mM_NaCl__P Parameter: Timepoint (hr) Value: 6
  misc_feature: MA Experiment 20000268 PARAMETER Experiment Name: At_100mM_NaCl__P Parameter: Tissue Value: Whole Plant
  misc_feature: MA Experiment 20000268 PARAMETER Experiment Name: At_100mM_NaCl__P Parameter: Treatment Value: 100mM NaCl vs. No Treatment
  misc_feature: MA Experiment ID: 20000436 Result: Up-regulated in Transcription
  misc_feature: MA Experiment 20000436 PARAMETER Experiment Name: At_Drought_P Parameter: Age (day) Value: 7
  misc_feature: MA Experiment 20000436 PARAMETER Experiment Name: At_Drought_P Parameter: Organism Value: A. thaliana
  misc_feature: MA Experiment 20000436 PARAMETER Experiment Name: At_Drought_P Parameter: Plant Line Value: WS
  misc_feature: MA Experiment 20000436 PARAMETER Experiment Name: At_Drought_P Parameter: Timepoint (hr) Value: 12
  misc_feature: MA Experiment 20000436 PARAMETER Experiment Name: At_Drought_P Parameter: Tissue Value: Whole Plant
  misc_feature: MA Experiment 20000436 PARAMETER Experiment Name: At_Drought_P Parameter: Treatment Value: Drought vs. No Drought
  misc_feature: MA Experiment ID: 20000437 Result: Up-regulated in Transcription
  misc_feature: MA Experiment 20000437 PARAMETER Experiment Name: At_Drought_P Parameter: Age (day) Value: 8
  misc_feature: MA Experiment 20000437 PARAMETER Experiment Name: At_Drought_P Parameter: Organism Value: A. thaliana
  misc_feature: MA Experiment 20000437 PARAMETER Experiment Name: At_Drought_P Parameter: Plant Line Value: WS
  misc_feature: MA Experiment 20000437 PARAMETER Experiment Name: At_Drought_P Parameter: Timepoint (hr) Value: 24
  misc_feature: MA Experiment 20000437 PARAMETER Experiment Name: At_Drought_P Parameter: Tissue Value: Whole Plant
  misc_feature: MA Experiment 20000437 PARAMETER Experiment Name: At_Drought_P Parameter: Treatment Value: Drought vs. No Drought
  misc_feature: MA Experiment ID: 20000441 Result: Down-regulated in Transcription
  misc_feature: MA Experiment 20000441 PARAMETER Experiment Name: At_1uM_BR-BRZ__P Parameter: Tissue Value: Shoot Apices
  misc_feature: MA Experiment 20000441 PARAMETER Experiment Name: At_1uM_BR-BRZ__P Parameter: Treatment Value: 1uM BR vs. No Treatment
  misc_feature: MA Experiment ID: 20000443 Result: Down-regulated in Transcription
  misc_feature: MA Experiment 20000443 PARAMETER Experiment Name: At_1uM_BR-BRZ__P Parameter: Tissue Value: Shoot Apices
  misc_feature: MA Experiment 20000443 PARAMETER Experiment Name: At_1uM_BR-BRZ__P Parameter: Treatment Value: 1uM BRZ vs. No Treatment
  misc_feature: MA Experiment ID: 20000453 Result: Up-regulated in Transcription
  misc_feature: MA Experiment 20000453 PARAMETER Experiment Name: At_100uM_ABA_P Parameter: Age (day) Value: 15
  misc_feature: MA Experiment 20000453 PARAMETER Experiment Name: At_100uM_ABA_P Parameter: Organism Value: A. thaliana
  misc_feature: MA Experiment 20000453 PARAMETER Experiment Name: At_100uM_ABA_P Parameter: Plant Line Value: WS
  misc_feature: MA Experiment 20000453 PARAMETER Experiment Name: At_100uM_ABA_P Parameter: Timepoint (hr) Value: 24
  misc_feature: MA Experiment 20000453 PARAMETER Experiment Name: At_100uM_ABA_P Parameter: Tissue Value: Aerial
  misc_feature: MA Experiment 20000453 PARAMETER Experiment Name: At_100uM_ABA_P Parameter: Treatment Value: 100uM ABA vs. No Treatment
  misc_feature: MA Experiment ID: 20000709 Result: Down-regulated in Transcription
  misc_feature: MA Experiment 20000709 PARAMETER Experiment Name: At_15mM_NH4NO3_L-to-H_P Parameter: Age (hr) Value: 14
  misc_feature: MA Experiment 20000709 PARAMETER Experiment Name: At_15mM_NH4NO3_L-to-H_P Parameter: Organism Value: A. thaliana
  misc_feature: MA Experiment 20000709 PARAMETER Experiment Name: At_15mM_NH4NO3_L-to-H_P Parameter: Plant Line Value: WS
  misc_feature: MA Experiment 20000709 PARAMETER Experiment Name: At_15mM_NH4NO3_L-to-H_P Parameter: Timepoint (hr) Value: 4
  misc_feature: MA Experiment 20000709 PARAMETER Experiment Name: At_15mM_NH4NO3_L-to-H_P Parameter: Tissue Value: Aerial
  misc_feature: MA Experiment 20000709 PARAMETER Experiment Name: At_15mM_NH4NO3_L-to-H_P Parameter: Treatment Value: 15mM NH4NO3 vs. 30mM Mannitol
  misc_feature: MA Experiment ID: 20001554 Result: Up-regulated in Transcription
  misc_feature: MA Experiment 20001554 PARAMETER Experiment Name: At_Drought_Soil_Dry_P Parameter: Age (day) Value: 21
  misc_feature: MA Experiment 20001554 PARAMETER Experiment Name: At_Drought_Soil_Dry_P Parameter: Organism Value: A. thaliana
  misc_feature: MA Experiment 20001554 PARAMETER Experiment Name: At_Drought_Soil_Dry_P Parameter: Plant Line Value: WS
  misc_feature: MA Experiment 20001554 PARAMETER Experiment Name: At_Drought_Soil_Dry_P Parameter: Post Timepoint (hr) Value: None
  misc_feature: MA Experiment 20001554 PARAMETER Experiment Name: At_Drought_Soil_Dry_P Parameter: Post-Treatment Value: None
  misc_feature: MA Experiment 20001554 PARAMETER Experiment Name: At_Drought_Soil_Dry_P Parameter: Timepoint (day) Value: 7
  misc_feature: MA Experiment 20001554 PARAMETER Experiment Name: At_Drought_Soil_Dry_P Parameter: Treatment Value: Drought vs. No Drought
  misc_feature: MA Experiment ID: 20001555 Result: Up-regulated in Transcription
  misc_feature: MA Experiment 20001555 PARAMETER Experiment Name: At_Drought_Soil_Dry_P Parameter: Age (day) Value: 24
  misc_feature: MA Experiment 20001555 PARAMETER Experiment Name: At_Drought_Soil_Dry_P Parameter: Organism Value: A. thaliana
  misc_feature: MA Experiment 20001555 PARAMETER Experiment Name: At_Drought_Soil_Dry_P Parameter: Plant Line Value: WS
  misc_feature: MA Experiment 20001555 PARAMETER Experiment Name: At_Drought_Soil_Dry_P Parameter: Post Timepoint (hr) Value: None
  misc_feature: MA Experiment 20001555 PARAMETER Experiment Name: At_Drought_Soil_Dry_P Parameter: Post-Treatment Value: None
  misc_feature: MA Experiment 20001555 PARAMETER Experiment Name: At_Drought_Soil_Dry_P Parameter: Timepoint (day) Value: 10
  misc_feature: MA Experiment 20001555 PARAMETER Experiment Name: At_Drought_Soil_Dry_P Parameter: Treatment Value: Drought vs. No Drought
  misc_feature: MA Experiment ID: 20001556 Result: Up-regulated in Transcription
  misc_feature: MA Experiment 20001556 PARAMETER Experiment Name: At_Drought_Soil_Dry_P Parameter: Age (day) Value: 26
  misc_feature: MA Experiment 20001556 PARAMETER Experiment Name: At_Drought_Soil_Dry_P Parameter: Organism Value: A. thaliana
  misc_feature: MA Experiment 20001556 PARAMETER Experiment Name: At_Drought_Soil_Dry_P Parameter: Plant Line Value: WS
  misc_feature: MA Experiment 20001556 PARAMETER Experiment Name: At_Drought_Soil_Dry_P Parameter: Post Timepoint (hr) Value: None
  misc_feature: MA Experiment 20001556 PARAMETER Experiment Name: At_Drought_Soil_Dry_P Parameter: Post-Treatment Value: None
  misc_feature: MA Experiment 20001556 PARAMETER Experiment Name: At_Drought_Soil_Dry_P Parameter: Timepoint (day) Value: 12
  misc_feature: MA Experiment 20001556 PARAMETER Experiment Name: At_Drought_Soil_Dry_P Parameter: Treatment Value: Drought vs. No Drought
  misc_feature: MA Experiment ID: 20001905 Result: Up-regulated in Transcription
  misc_feature: MA Experiment 20001905 PARAMETER Experiment Name: At_Drought_Reproduction_P Parameter: Age (day) Value: 40
  misc_feature: MA Experiment 20001905 PARAMETER Experiment Name: At_Drought_Reproduction_P Parameter: Organism Value: A. thaliana
  misc_feature: MA Experiment 20001905 PARAMETER Experiment Name: At_Drought_Reproduction_P Parameter: Plant Line Value: WS
  misc_feature: MA Experiment 20001905 PARAMETER Experiment Name: At_Drought_Reproduction_P Parameter: Timepoint (day) Value: 10
  misc_feature: MA Experiment 20001905 PARAMETER Experiment Name: At_Drought_Reproduction_P Parameter: Tissue Value: Rosettes
  misc_feature: MA Experiment 20001905 PARAMETER Experiment Name: At_Drought_Reproduction_P Parameter: Treatment Value: Drought vs. No Drought
  misc_feature: MA Experiment ID: 20001906 Result: Up-regulated in Transcription
  misc_feature: MA Experiment 20001906 PARAMETER Experiment Name: At_Drought_Reproduction_P Parameter: Age (day) Value: 35
  misc_feature: MA Experiment 20001906 PARAMETER Experiment Name: At_Drought_Reproduction_P Parameter: Organism Value: A. thaliana
  misc_feature: MA Experiment 20001906 PARAMETER Experiment Name: At_Drought_Reproduction_P Parameter: Plant Line Value: WS
  misc_feature: MA Experiment 20001906 PARAMETER Experiment Name: At_Drought_Reproduction_P Parameter: Timepoint (day) Value: 5
  misc_feature: MA Experiment 20001906 PARAMETER Experiment Name: At_Drought_Reproduction_P Parameter: Tissue Value: Siliques
  misc_feature: MA Experiment 20001906 PARAMETER Experiment Name: At_Drought_Reproduction_P Parameter: Treatment Value: Drought vs. No Drought
  misc_feature: MA Experiment ID: 20001910 Result: Up-regulated in Transcription
  misc_feature: MA Experiment 20001910 PARAMETER Experiment Name: At_Drought_Reproduction_P Parameter: Age (day) Value: 37
  misc_feature: MA Experiment 20001910 PARAMETER Experiment Name: At_Drought_Reproduction_P Parameter: Organism Value: A. thaliana
  misc_feature: MA Experiment 20001910 PARAMETER Experiment Name: At_Drought_Reproduction_P Parameter: Plant Line Value: WS
  misc_feature: MA Experiment 20001910 PARAMETER Experiment Name: At_Drought_Reproduction_P Parameter: Timepoint (day) Value: 7
  misc_feature: MA Experiment 20001910 PARAMETER Experiment Name: At_Drought_Reproduction_P Parameter: Tissue Value: Flowers
  misc_feature: MA Experiment 20001910 PARAMETER Experiment Name: At_Drought_Reproduction_P Parameter: Treatment Value: Drought vs. No Drought
  misc_feature: MA Experiment ID: 20001911 Result: Up-regulated in Transcription
  misc_feature: MA Experiment 20001911 PARAMETER Experiment Name: At_Drought_Reproduction_P Parameter: Age (day) Value: 40
  misc_feature: MA Experiment 20001911 PARAMETER Experiment Name: At_Drought_Reproduction_P Parameter: Organism Value: A. thaliana
  misc_feature: MA Experiment 20001911 PARAMETER Experiment Name: At_Drought_Reproduction_P Parameter: Plant Line Value: WS
  misc_feature: MA Experiment 20001911 PARAMETER Experiment Name: At_Drought_Reproduction_P Parameter: Timepoint (day) Value: 10
  misc_feature: MA Experiment 20001911 PARAMETER Experiment Name: At_Drought_Reproduction_P Parameter: Tissue Value: Flowers
  misc_feature: MA Experiment 20001911 PARAMETER Experiment Name: At_Drought_Reproduction_P Parameter: Treatment Value: Drought vs. No Drought

SEQ ID NO: 34060 - protein, 195 aa, Arabidopsis thaliana; identical to SEQ ID NO: 30470
  peptide (1)..(195): Ceres Seq. ID no. 13499518
  misc_feature (3)..(165): Homolog of NCBI NO: 10798750 NR Description: Elicitor inducible gene product Nt-SubE80
  misc_feature (1)..(193): Homolog of NCBI NO: 15232407 NR Description: photoassimilate-responsive protein PAR-1b
  misc_feature (1)..(194): Homolog of NCBI NO: 1362109 NR Description: PAR-1a protein - common tobacco
  misc_feature (1)..(194): Homolog of NCBI NO: 2129957 NR Description: photoassimilate-responsive protein precursor
  misc_feature (1)..(194): Homolog of NCBI NO: 2129955 NR Description: photoassimilate-responsive protein PAR-1b
  misc_feature (2)..(169): Homolog of NCBI NO: 2129956 NR Description: photoassimilate-responsive protein PAR-1c
  misc_feature (1)..(195): Homolog of NCBI NO: 21553901 NR Description: photoassimilate-responsive protein PAR-like
  misc_feature (1)..(195): Homolog of NCBI NO: 15237149 NR Description: photoassimilate-responsive protein PAR-related

SEQ ID NO: 34061 - protein, 185 aa, Arabidopsis thaliana; identical to SEQ ID NO: 30471
  peptide (1)..(185): Ceres Seq. ID no. 13499519
  misc_feature (1)..(155): Homolog of NCBI NO: 10798750 NR Description: Elicitor inducible gene product Nt-SubE80
  misc_feature (1)..(183): Homolog of NCBI NO: 15232407 NR Description: photoassimilate-responsive protein PAR-1b
  misc_feature (1)..(184): Homolog of NCBI NO: 1362109 NR Description: PAR-1a protein - common tobacco
  misc_feature (1)..(184): Homolog of NCBI NO: 2129957 NR Description: photoassimilate-responsive protein precursor
  misc_feature (1)..(184): Homolog of NCBI NO: 2129955 NR Description: photoassimilate-responsive protein PAR-1b
  misc_feature (1)..(159): Homolog of NCBI NO: 2129956 NR Description: photoassimilate-responsive protein PAR-1c
  misc_feature (1)..(185): Homolog of NCBI NO: 21553901 NR Description: photoassimilate-responsive protein PAR-like
  misc_feature (1)..(185): Homolog of NCBI NO: 15237149 NR Description: photoassimilate-responsive protein PAR-related

SEQ ID NO: 34062 - protein, 143 aa, Arabidopsis thaliana; identical to SEQ ID NO: 30472
  peptide (1)..(143): Ceres Seq. ID no. 13499520
  misc_feature (1)..(113): Homolog of NCBI NO: 10798750 NR Description: Elicitor inducible gene product Nt-SubE80
  misc_feature (1)..(141): Homolog of NCBI NO: 15232407 NR Description: photoassimilate-responsive protein PAR-1b
  misc_feature (1)..(142): Homolog of NCBI NO: 1362109 NR Description: PAR-1a protein - common tobacco
  misc_feature (1)..(142): Homolog of NCBI NO: 2129957 NR Description: photoassimilate-responsive protein precursor
  misc_feature (1)..(142): Homolog of NCBI NO: 2129955 NR Description: photoassimilate-responsive protein PAR-1b
  misc_feature (1)..(117): Homolog of NCBI NO: 2129956 NR Description: photoassimilate-responsive protein PAR-1c
  misc_feature (1)..(143): Homolog of NCBI NO: 21553901 NR Description: photoassimilate-responsive protein PAR-like
  misc_feature (1)..(143): Homolog of NCBI NO: 15237149 NR Description: photoassimilate-responsive protein PAR-related

SEQ ID NO: 34063 - DNA, 687 bp, Arabidopsis thaliana; identical to SEQ ID NO: 30473
  misc_feature (1)..(687): Ceres Seq. ID no. 12580320
  misc_feature: MA Experiment ID: 108473 Result: Down-regulated in Transcription
  misc_feature: MA Experiment 108473 PARAMETER Experiment Name: At_Drought_Flowers_cDNA_P Parameter: Timepoint (hr) Value: 7 d
  misc_feature: MA Experiment 108473 PARAMETER Experiment Name: At_Drought_Flowers_cDNA_P Parameter: Tissue Value: Flower
  misc_feature: MA Experiment 108473 PARAMETER Experiment Name: At_Drought_Flowers_cDNA_P Parameter: Treatment Value: Drought vs. No Drought
  misc_feature: MA Experiment ID: 108501 Result: Down-regulated in Transcription
  misc_feature: MA Experiment 108501 PARAMETER Experiment Name: At_ap2_floral_buds_cDNA_P Parameter: Plant Line Value: ap2 (Ler.)
  misc_feature: MA Experiment 108501 PARAMETER Experiment Name: At_ap2_floral_buds_cDNA_P Parameter: Tissue Value: Closed Flower
  misc_feature: MA Experiment ID: 108569 Result: Down-regulated in Transcription
  misc_feature: MA Experiment 108569 PARAMETER Experiment Name: At_0.001%_MeJA__cDNA_P Parameter: Timepoint (hr) Value: 6
  misc_feature: MA Experiment 108569 PARAMETER Experiment Name: At_0.001%_MeJA__cDNA_P Parameter: Tissue Value: Aerial
  misc_feature: MA Experiment 108569 PARAMETER Experiment Name: At_0.001%_MeJA__cDNA_P Parameter: Treatment Value: 0.001% MeJA vs. No Treatment
  misc_feature: MA Experiment ID: 108595 Result: Up-regulated in Transcription
  misc_feature: MA Experiment 108595 PARAMETER Experiment Name: At_Ler-pi_Ovule_cDNA_P Parameter: Plant Line Value: null
  misc_feature: MA Experiment ID: 20000265 Result: Up-regulated in Transcription
  misc_feature: MA Experiment 20000265 PARAMETER Experiment Name: At_Open_Flower_P Parameter: Age (day) Value: 21
  misc_feature: MA Experiment 20000265 PARAMETER Experiment Name: At_Open_Flower_P Parameter: Plant Line Value: WS
  misc_feature: MA Experiment 20000265 PARAMETER Experiment Name: At_Open_Flower_P Parameter: Tissue Value: Closed Flower vs. Whole Plant
  misc_feature: MA Experiment ID: 20000286 Result: Up-regulated in Transcription
  misc_feature: MA Experiment 20000286 PARAMETER Experiment Name: At_Open_Flower_P Parameter: Age (day) Value: 21
  misc_feature: MA Experiment 20000286 PARAMETER Experiment Name: At_Open_Flower_P Parameter: Plant Line Value: WS
  misc_feature: MA Experiment 20000286 PARAMETER Experiment Name: At_Open_Flower_P Parameter: Tissue Value: Half Open vs. Whole Plant
  misc_feature: MA Experiment ID: 20001910 Result: Down-regulated in Transcription
  misc_feature: MA Experiment 20001910 PARAMETER Experiment Name: At_Drought_Reproduction_P Parameter: Age (day) Value: 37
  misc_feature: MA Experiment 20001910 PARAMETER Experiment Name: At_Drought_Reproduction_P Parameter: Organism Value: A. thaliana
  misc_feature: MA Experiment 20001910 PARAMETER Experiment Name: At_Drought_Reproduction_P Parameter: Plant Line Value: WS
  misc_feature: MA Experiment 20001910 PARAMETER Experiment Name: At_Drought_Reproduction_P Parameter: Timepoint (day) Value: 7
  misc_feature: MA Experiment 20001910 PARAMETER Experiment Name: At_Drought_Reproduction_P Parameter: Tissue Value: Flowers
  misc_feature: MA Experiment 20001910 PARAMETER Experiment Name: At_Drought_Reproduction_P Parameter: Treatment Value: Drought vs. No Drought

SEQ ID NO: 34064 - protein, 95 aa, Arabidopsis thaliana; identical to SEQ ID NO: 30474
  peptide (1)..(95): Ceres Seq. ID no. 12580321
  misc_feature (13)..(89): Pfam Name: Protein of unknown function, DUF538 Pfam Description: Protein of unknown function, DUF538
  misc_feature (13)..(89): Pfam Name: Protein of unknown function, DUF538 Pfam Description: Protein of unknown function, DUF538
  misc_feature (13)..(89): Pfam Name: Protein of unknown function, DUF538 Pfam Description: Protein of unknown function, DUF538
  misc_feature (48)..(88): Homolog of NCBI NO: 37536100 NR Description: hypothetical protein [Oryza sativa (japonica
  misc_feature (23)..(87): Homolog of NCBI NO: 33146557 NR Description: unknown protein [Oryza sativa (japonica
  misc_feature (23)..(89): Homolog of NCBI NO: 18405887 NR Description: expressed protein
  misc_feature (23)..(87): Homolog of NCBI NO: 34915422 NR Description: hypothetical protein~similar to Arabidopsis
  misc_feature (23)..(87): Homolog of NCBI NO: 34915426 NR Description: hypothetical protein~similar to Arabidopsis
  misc_feature (48)..(88): Homolog of NCBI NO: 37536100 NR Description: hypothetical protein [Oryza sativa (japonica
  misc_feature (23)..(89): Homolog of NCBI NO: 18405887 NR Description: expressed protein
  misc_feature (23)..(87): Homolog of NCBI NO: 34915426 NR Description: hypothetical protein~similar to Arabidopsis
  misc_feature (23)..(87): Homolog of NCBI NO: 34915422 NR Description: hypothetical protein~similar to Arabidopsis
  misc_feature (23)..(89): Homolog of NCBI NO: 18405887 NR Description: expressed protein
  misc_feature (23)..(87): Homolog of NCBI NO: 33146557 NR Description: unknown protein [Oryza sativa (japonica
  misc_feature (48)..(88): Homolog of NCBI NO: 37536100 NR Description: hypothetical protein [Oryza sativa (japonica
  misc_feature (9)..(89): Homolog of NCBI NO: 15220641 NR Description: unknown protein; protein id: At1g30020.1
  misc_feature (9)..(89): Homolog of NCBI NO: 18422648 NR Description: expressed protein
  misc_feature (23)..(87): Homolog of NCBI NO: 34903866 NR Description: unnamed protein product [Oryza sativa (japonica
  misc_feature (23)..(89): Homolog of NCBI NO: 18391006 NR Description: expressed protein
  misc_feature (23)..(87): Homolog of NCBI NO: 34915376 NR Description: hypothetical protein~similar to Oryza sativa
  misc_feature (9)..(89): Homolog of NCBI NO: 15220641 NR Description: unknown protein; protein id: At1g30020.1
  misc_feature (9)..(89): Homolog of NCBI NO: 18422648 NR Description: expressed protein
  misc_feature (23)..(87): Homolog of NCBI NO: 34903866 NR Description: unnamed protein product [Oryza sativa (japonica
  misc_feature (23)..(89): Homolog of NCBI NO: 18391006 NR Description: expressed protein
  misc_feature (23)..(87): Homolog of NCBI NO: 34915376 NR Description: hypothetical protein~similar to Oryza sativa
  misc_feature (23)..(87): Homolog of NCBI NO: 34915426 NR Description: hypothetical protein~similar to Arabidopsis
  misc_feature (23)..(87): Homolog of NCBI NO: 34915422 NR Description: hypothetical protein~similar to Arabidopsis
  misc_feature (23)..(87): Homolog of NCBI NO: 33146557 NR Description: unknown protein [Oryza sativa (japonica
  misc_feature (23)..(87): Homolog of NCBI NO: 34915376 NR Description: hypothetical protein~similar to Oryza sativa
  misc_feature (23)..(89): Homolog of NCBI NO: 18391006 NR Description: expressed protein
  misc_feature (23)..(87): Homolog of NCBI NO: 34903866 NR Description: unnamed protein product [Oryza sativa (japonica
  misc_feature (9)..(89): Homolog of NCBI NO: 18422648 NR Description: expressed protein
  misc_feature (9)..(89): Homolog of NCBI NO: 15220641 NR Description: unknown protein; protein id: At1g30020.1

SEQ ID NO: 34065 - protein, 87 aa, Arabidopsis thaliana; identical to SEQ ID NO: 30475
  peptide (1)..(87): Ceres Seq. ID no. 12580322
  misc_feature (5)..(81): Pfam Name: Protein of unknown function, DUF538 Pfam Description: Protein of unknown function, DUF538
  misc_feature (5)..(81): Pfam Name: Protein of unknown function, DUF538 Pfam Description: Protein of unknown function, DUF538
  misc_feature (5)..(81): Pfam Name: Protein of unknown function, DUF538 Pfam Description: Protein of unknown function, DUF538
  misc_feature (40)..(80): Homolog of NCBI NO: 37536100 NR Description: hypothetical protein [Oryza sativa (japonica
  misc_feature (15)..(79): Homolog of NCBI NO: 33146557 NR Description: unknown protein [Oryza sativa (japonica
  misc_feature (15)..(81): Homolog of NCBI NO: 18405887 NR Description: expressed protein
  misc_feature (15)..(79): Homolog of NCBI NO: 34915422 NR Description: hypothetical protein~similar to Arabidopsis
  misc_feature (15)..(79): Homolog of NCBI NO: 34915426 NR Description: hypothetical protein~similar to Arabidopsis
  misc_feature (40)..(80): Homolog of NCBI NO: 37536100 NR Description: hypothetical protein [Oryza sativa (japonica
  misc_feature (15)..(81): Homolog of NCBI NO: 18405887 NR Description: expressed protein
  misc_feature (15)..(79): Homolog of NCBI NO: 34915426 NR Description: hypothetical protein~similar to Arabidopsis
  misc_feature (15)..(79): Homolog of NCBI NO: 34915422 NR Description: hypothetical protein~similar to Arabidopsis
  misc_feature (15)..(81): Homolog of NCBI NO: 18405887 NR Description: expressed protein
  misc_feature (15)..(79): Homolog of NCBI NO: 33146557 NR Description: unknown protein [Oryza sativa (japonica
  misc_feature (40)..(80): Homolog of NCBI NO: 37536100 NR Description: hypothetical protein [Oryza sativa (japonica
  misc_feature (1)..(81): Homolog of NCBI NO: 15220641 NR Description: unknown protein; protein id: At1g30020.1
  misc_feature (1)..(81): Homolog of NCBI NO: 18422648 NR Description: expressed protein
  misc_feature (15)..(79): Homolog of NCBI NO: 34903866 NR Description: unnamed protein product [Oryza sativa (japonica
  misc_feature (15)..(81): Homolog of NCBI NO: 18391006 NR Description: expressed protein
  misc_feature (15)..(79): Homolog of NCBI NO: 34915376 NR Description: hypothetical protein~similar to Oryza sativa
  misc_feature (1)..(81): Homolog of NCBI NO: 15220641 NR Description: unknown protein; protein id: At1g30020.1
  misc_feature (1)..(81): Homolog of NCBI NO: 18422648 NR Description: expressed protein
  misc_feature (15)..(79): Homolog of NCBI NO: 34903866 NR Description: unnamed protein product [Oryza sativa (japonica
  misc_feature (15)..(81): Homolog of NCBI NO: 18391006 NR Description: expressed protein
  misc_feature (15)..(79): Homolog of NCBI NO: 34915376 NR Description: hypothetical protein~similar to Oryza sativa
  misc_feature (15)..(79): Homolog of NCBI NO: 34915426 NR Description: hypothetical protein~similar to Arabidopsis
  misc_feature (15)..(79): Homolog of NCBI NO: 34915422 NR Description: hypothetical protein~similar to Arabidopsis
  misc_feature (15)..(79): Homolog of NCBI NO: 33146557 NR Description: unknown protein [Oryza sativa (japonica
  misc_feature (15)..(79): Homolog of NCBI NO: 34915376 NR Description: hypothetical protein~similar to Oryza sativa
  misc_feature (15)..(81): Homolog of NCBI NO: 18391006 NR Description: expressed protein
  misc_feature (15)..(79): Homolog of NCBI NO: 34903866 NR Description: unnamed protein product [Oryza sativa (japonica
  misc_feature (1)..(81): Homolog of NCBI NO: 18422648 NR Description: expressed protein
  misc_feature (1)..(81): Homolog of NCBI NO: 15220641 NR Description: unknown protein; protein id: At1g30020.1

SEQ ID NO: 34066 - protein, 82 aa, Arabidopsis thaliana; identical to SEQ ID NO: 30476
  peptide (1)..(82): Ceres Seq. ID no. 12580323
  misc_feature (1)..(76): Pfam Name: Protein of unknown function, DUF538 Pfam Description: Protein of unknown function, DUF538
  misc_feature (1)..(76): Pfam Name: Protein of unknown function, DUF538 Pfam Description: Protein of unknown function, DUF538
  misc_feature (1)..(76): Pfam Name: Protein of unknown function, DUF538 Pfam Description: Protein of unknown function, DUF538
  misc_feature (35)..(75): Homolog of NCBI NO: 37536100 NR Description: hypothetical protein [Oryza sativa (japonica
  misc_feature (10)..(74): Homolog of NCBI NO: 33146557 NR Description: unknown protein [Oryza sativa (japonica
  misc_feature (10)..(76): Homolog of NCBI NO: 18405887 NR Description: expressed protein
  misc_feature (10)..(74): Homolog of NCBI NO: 34915422 NR Description: hypothetical protein~similar to Arabidopsis
  misc_feature (10)..(74): Homolog of NCBI NO: 34915426 NR Description: hypothetical protein~similar to Arabidopsis
  misc_feature (35)..(75): Homolog of NCBI NO: 37536100 NR Description: hypothetical protein [Oryza sativa (japonica
  misc_feature (10)..(76): Homolog of NCBI NO: 18405887 NR Description: expressed protein
  misc_feature (10)..(74): Homolog of NCBI NO: 34915426 NR Description: hypothetical protein~similar to Arabidopsis
  misc_feature (10)..(74): Homolog of NCBI NO: 34915422 NR Description: hypothetical protein~similar to Arabidopsis
  misc_feature (10)..(76): Homolog of NCBI NO: 18405887 NR Description: expressed protein
  misc_feature (10)..(74): Homolog of NCBI NO: 33146557 NR Description: unknown protein [Oryza sativa (japonica
  misc_feature (35)..(75): Homolog of NCBI NO: 37536100 NR Description: hypothetical protein [Oryza sativa (japonica
  misc_feature (1)..(76): Homolog of NCBI NO: 15220641 NR Description: unknown protein; protein id: At1g30020.1
  misc_feature (1)..(76): Homolog of NCBI NO: 18422648 NR Description: expressed protein
  misc_feature (10)..(74): Homolog of NCBI NO: 34903866 NR Description: unnamed protein product [Oryza sativa (japonica
  misc_feature (10)..(76): Homolog of NCBI NO: 18391006 NR Description: expressed protein
  misc_feature (10)..(74): Homolog of NCBI NO: 34915376 NR Description: hypothetical protein~similar to Oryza sativa
  misc_feature (1)..(76): Homolog of NCBI NO: 15220641 NR Description: unknown protein; protein id: At1g30020.1
  misc_feature (1)..(76): Homolog of NCBI NO: 18422648 NR Description: expressed protein
  misc_feature (10)..(74): Homolog of NCBI NO: 34903866 NR Description: unnamed protein product [Oryza sativa (japonica
  misc_feature (10)..(76): Homolog of NCBI NO: 18391006 NR Description: expressed protein
  misc_feature (10)..(74): Homolog of NCBI NO: 34915376 NR Description: hypothetical protein~similar to Oryza sativa
  misc_feature (10)..(74): Homolog of NCBI NO: 34915426 NR Description: hypothetical protein~similar to Arabidopsis
  misc_feature (10)..(74): Homolog of NCBI NO: 34915422 NR Description: hypothetical protein~similar to Arabidopsis
  misc_feature (10)..(74): Homolog of NCBI NO: 33146557 NR Description: unknown protein [Oryza sativa (japonica
  misc_feature (10)..(74): Homolog of NCBI NO: 34915376 NR Description: hypothetical protein~similar to Oryza sativa
  misc_feature (10)..(76): Homolog of NCBI NO: 18391006 NR Description: expressed protein
  misc_feature (10)..(74): Homolog of NCBI NO: 34903866 NR Description: unnamed protein product [Oryza sativa (japonica
  misc_feature (1)..(76): Homolog of NCBI NO: 18422648 NR Description: expressed protein
  misc_feature (1)..(76): Homolog of NCBI NO: 15220641 NR Description: unknown protein; protein id: At1g30020.1

SEQ ID NO: 34067 - DNA, 2852 bp, Arabidopsis thaliana; identical to SEQ ID NO: 30477
  misc_feature (1)..(2852): Ceres Seq. ID no. 12422999
  misc_feature: MA Experiment ID: 108573 Result: Up-regulated in Transcription
  misc_feature: MA Experiment 108573 PARAMETER Experiment Name: At_Drought_cDNA_P Parameter: Timepoint (hr) Value: 6
  misc_feature: MA Experiment 108573 PARAMETER Experiment Name: At_Drought_cDNA_P Parameter: Tissue Value: Aerial
  misc_feature: MA Experiment 108573 PARAMETER Experiment Name: At_Drought_cDNA_P Parameter: Treatment Value: Drought vs. No Drought
  misc_feature: MA Experiment ID: 20000111 Result: Down-regulated in Transcription
  misc_feature: MA Experiment 20000111 PARAMETER Experiment Name: At_42deg_Heat_cDNA_P Parameter: Temperature (deg C) Value: 42 vs. 22
  misc_feature: MA Experiment 20000111 PARAMETER Experiment Name: At_42deg_Heat_cDNA_P Parameter: Timepoint (hr) Value: 6
  misc_feature: MA Experiment 20000111 PARAMETER Experiment Name: At_42deg_Heat_cDNA_P Parameter: Tissue Value: Aerial
  misc_feature: MA Experiment ID: 20000113 Result: Down-regulated in Transcription
  misc_feature: MA Experiment 20000113 PARAMETER Experiment Name: At_42deg_Heat_cDNA_P Parameter: Temperature (deg C) Value: 42 vs. 22
  misc_feature: MA Experiment 20000113 PARAMETER Experiment Name: At_42deg_Heat_cDNA_P Parameter: Timepoint (hr) Value: 8
  misc_feature: MA Experiment 20000113 PARAMETER Experiment Name: At_42deg_Heat_cDNA_P Parameter: Tissue Value: Aerial
  misc_feature: MA Experiment ID: 20000173 Result: Down-regulated in Transcription
  misc_feature: MA Experiment 20000173 PARAMETER Experiment Name: At_42deg_Heat_P Parameter: Age (day) Value: 14
  misc_feature: MA Experiment 20000173 PARAMETER Experiment Name: At_42deg_Heat_P Parameter: Organism Value: A. thaliana
  misc_feature: MA Experiment 20000173 PARAMETER Experiment Name: At_42deg_Heat_P Parameter: Plant Line Value: WS
  misc_feature: MA Experiment 20000173 PARAMETER Experiment Name: At_42deg_Heat_P Parameter: Temperature (deg C) Value: 42 vs. 22
  misc_feature: MA Experiment 20000173 PARAMETER Experiment Name: At_42deg_Heat_P Parameter: Timepoint (hr) Value: 6
  misc_feature: MA Experiment 20000173 PARAMETER Experiment Name: At_42deg_Heat_P Parameter: Tissue Value: Aerial
  misc_feature: MA Experiment ID: 20000184 Result: Down-regulated in Transcription
  misc_feature: MA Experiment 20000184 PARAMETER Experiment Name: At_Shoots__P Parameter: Age (day) Value: 7
  misc_feature: MA Experiment 20000184 PARAMETER Experiment Name: At_Shoots__P Parameter: Tissue Value: Shoots vs. Whole Plant

SEQ ID NO: 34068 - protein, 752 aa, Arabidopsis thaliana; identical to SEQ ID NO: 30478
  peptide (1)..(752): Ceres Seq. ID no. 12423000
  misc_feature (1)..(220): Homolog of NCBI NO: 19922552 NR Description: CG5341-PA [Drosophila melanogaster]
  misc_feature (6)..(447): Homolog of NCBI NO: 7498734 NR Description: hypothetical protein F09E5.6 - Caenorhabditis
  misc_feature (6)..(466): Homolog of NCBI NO: 39596858 NR Description: Hypothetical protein CBG02377 [Caenorhabditis
  misc_feature (6)..(466): Homolog of NCBI NO: 25149395 NR Description: Putative cytoplasmic protein, with a coiled coil
  misc_feature (268)..(718): Homolog of NCBI NO: 19074839 NR Description: hypothetical protein [Encephalitozoon cuniculi]
  misc_feature (18)..(492): Homolog of NCBI NO: 25466279 NR Description: related to protein transport protein SEC6
  misc_feature (11)..(483): Homolog of NCBI NO: 40744733 NR Description: hypothetical protein AN1988.2 [Aspergillus

SEQ ID NO: 34069 - protein, 751 aa, Arabidopsis thaliana; identical to SEQ ID NO: 30479
  peptide (1)..(751): Ceres Seq. ID no. 12423001
  misc_feature (1)..(219): Homolog of NCBI NO: 19922552 NR Description: CG5341-PA [Drosophila melanogaster]
  misc_feature (5)..(446): Homolog of NCBI NO: 7498734 NR Description: hypothetical protein F09E5.6 - Caenorhabditis
  misc_feature (5)..(465): Homolog of NCBI NO: 39596858 NR Description: Hypothetical protein CBG02377 [Caenorhabditis
  misc_feature (5)..(465): Homolog of NCBI NO: 25149395 NR Description: Putative cytoplasmic protein, with a coiled coil
  misc_feature (267)..(717): Homolog of NCBI NO: 19074839 NR Description: hypothetical protein [Encephalitozoon cuniculi]
  misc_feature (17)..(491): Homolog of NCBI NO: 25466279 NR Description: related to protein transport protein SEC6
  misc_feature (10)..(482): Homolog of NCBI NO: 40744733 NR Description: hypothetical protein AN1988.2 [Aspergillus

SEQ ID NO: 34070 - protein, 701 aa, Arabidopsis thaliana; identical to SEQ ID NO: 30480
  peptide (1)..(701): Ceres Seq. ID no. 12423002
  misc_feature (1)..(169): Homolog of NCBI NO: 19922552 NR Description: CG5341-PA [Drosophila melanogaster]
  misc_feature (1)..(396): Homolog of NCBI NO: 7498734 NR Description: hypothetical protein F09E5.6 - Caenorhabditis
  misc_feature (1)..(415): Homolog of NCBI NO: 39596858 NR Description: Hypothetical protein CBG02377 [Caenorhabditis
  misc_feature (1)..(415): Homolog of NCBI NO: 25149395 NR Description: Putative cytoplasmic protein, with a coiled coil
  misc_feature (217)..(667): Homolog of NCBI NO: 19074839 NR Description: hypothetical protein [Encephalitozoon cuniculi]
  misc_feature (1)..(441): Homolog of NCBI NO: 25466279 NR Description: related to protein transport protein SEC6
  misc_feature (1)..(432): Homolog of NCBI NO: 40744733 NR Description: hypothetical protein AN1988.2 [Aspergillus

SEQ ID NO: 34071 - DNA, 2330 bp, Arabidopsis thaliana; identical to SEQ ID NO: 30481
  misc_feature (1)..(2330): Ceres Seq. ID no. 13494306
  misc_feature: MA Experiment ID: 108434 Result: Down-regulated in Transcription
  misc_feature: MA Experiment 108434 PARAMETER Experiment Name: At_Root_Tips_cDNA_P Parameter: Tissue Value: Root Tips
  misc_feature: MA Experiment ID: 108488 Result: Down-regulated in Transcription
  misc_feature: MA Experiment ID: 20000495 Result: Down-regulated in Transcription
  misc_feature: MA Experiment 20000495 PARAMETER Experiment Name: At_Guard_Cells_P Parameter: Harvest Date Value: 8/2/2002
  misc_feature: MA Experiment 20000495 PARAMETER Experiment Name: At_Guard_Cells_P Parameter: Organism Value: A. thaliana
  misc_feature: MA Experiment 20000495 PARAMETER Experiment Name: At_Guard_Cells_P Parameter: Tissue Value: Guard Cells vs. Leaves

SEQ ID NO: 34072 - protein, 652 aa, Arabidopsis thaliana; identical to SEQ ID NO: 30482
  peptide (1)..(652): Ceres Seq. ID no. 13494307
  misc_feature (280)..(479): Pfam Name: Protein kinase domain Pfam Description: Protein kinase domain
  misc_feature (179)..(259): Homolog of NCBI NO: 15230108 NR Description: protein kinase -related [Arabidopsis thaliana]
  misc_feature (5)..(147): Homolog of NCBI NO: 15230108 NR Description: protein kinase -related [Arabidopsis thaliana]
  misc_feature (17)..(133): Homolog of NCBI NO: 15230108 NR Description: protein kinase -related [Arabidopsis thaliana]
  misc_feature (5)..(129): Homolog of NCBI NO: 15230108 NR Description: protein kinase -related [Arabidopsis thaliana]
  misc_feature (5)..(133): Homolog of NCBI NO: 15230108 NR Description: protein kinase -related [Arabidopsis thaliana]
  misc_feature (4)..(137): Homolog of NCBI NO: 15230108 NR Description: protein kinase -related [Arabidopsis thaliana]
  misc_feature (1)..(132): Homolog of NCBI NO: 15230108 NR Description: protein kinase -related [Arabidopsis thaliana]
  misc_feature (3)..(221): Homolog of NCBI NO: 15230108 NR Description: protein kinase -related [Arabidopsis thaliana]
  misc_feature (218)..(647): Homolog of NCBI NO: 15230108 NR Description: protein kinase -related [Arabidopsis thaliana]
  misc_feature (1)..(652): Homolog of NCBI NO: 13447449 NR Description: receptor protein kinase PERK1 [Brassica napus]

SEQ ID NO: 34073 - protein, 415 aa, Arabidopsis thaliana; identical to SEQ ID NO: 30483
  peptide (1)..(415): Ceres Seq. ID no. 13494308
  misc_feature (43)..(242): Pfam Name: Protein kinase domain Pfam Description: Protein kinase domain
  misc_feature (1)..(408): Homolog of NCBI NO: 30690042 NR Description: serine threonine protein kinase -related
  misc_feature (1)..(391): Homolog of NCBI NO: 9293906 NR Description: somatic embryogenesis receptor kinase-like
  misc_feature (1)..(391): Homolog of NCBI NO: 15222081 NR Description: hypothetical protein [Arabidopsis thaliana]
  misc_feature (1)..(382): Homolog of NCBI NO: 15224182 NR Description: protein kinase -related [Arabidopsis thaliana]
  misc_feature (1)..(391): Homolog of NCBI NO: 15230209 NR Description: protein kinase -related [Arabidopsis thaliana]
  misc_feature (1)..(410): Homolog of NCBI NO: 11994703 NR Description: somatic embryogenesis receptor kinase-like
  misc_feature (1)..(22): Homolog of NCBI NO: 15230108 NR Description: protein kinase -related [Arabidopsis thaliana]
  misc_feature (1)..(22): Homolog of NCBI NO: 15230108 NR Description: protein kinase -related [Arabidopsis thaliana]
  misc_feature (1)..(410): Homolog of NCBI NO: 15230108 NR Description: protein kinase -related [Arabidopsis thaliana]
  misc_feature (1)..(415): Homolog of NCBI NO: 13447449 NR Description: receptor protein kinase PERK1 [Brassica napus]

SEQ ID NO: 34074 - DNA, 750 bp, Arabidopsis thaliana; identical to SEQ ID NO: 30484
  misc_feature (1)..(750): Ceres Seq. ID no. 13497622
  misc_feature: MA Experiment ID: 108434 Result: Up-regulated in Transcription
  misc_feature: MA Experiment 108434 PARAMETER Experiment Name: At_Root_Tips_cDNA_P Parameter: Tissue Value: Root Tips
  misc_feature: MA Experiment ID: 108462 Result: Down-regulated in Transcription
  misc_feature: MA Experiment 108462 PARAMETER Experiment Name: At_Germinating_Seeds_cDNA_P Parameter: Age (day) Value: 2 vs. 0
  misc_feature: MA Experiment 108462 PARAMETER Experiment Name: At_Germinating_Seeds_cDNA_P Parameter: Tissue Value: Germinating Seeds
  misc_feature: MA Experiment ID: 108463 Result: Down-regulated in Transcription
  misc_feature: MA Experiment 108463 PARAMETER Experiment Name: At_Germinating_Seeds_cDNA_P Parameter: Age (day) Value: 3 vs. 0
  misc_feature: MA Experiment 108463 PARAMETER Experiment Name: At_Germinating_Seeds_cDNA_P Parameter: Tissue Value: Germinating Seeds
  misc_feature: MA Experiment ID: 108464 Result: Down-regulated in Transcription
  misc_feature: MA Experiment 108464 PARAMETER Experiment Name: At_Germinating_Seeds_cDNA_P Parameter: Age (day) Value: 4 vs. 0
  misc_feature: MA Experiment 108464 PARAMETER Experiment Name: At_Germinating_Seeds_cDNA_P Parameter: Tissue Value: Germinating Seeds
  misc_feature: MA Experiment ID: 108488 Result: Up-regulated in Transcription
  misc_feature: MA Experiment ID: 108561 Result: Down-regulated in Transcription
  misc_feature: MA Experiment 108561 PARAMETER Experiment Name: At_100uM_ABA_cDNA_P Parameter: Timepoint (hr) Value: 6
  misc_feature: MA Experiment 108561 PARAMETER Experiment Name: At_100uM_ABA_cDNA_P Parameter: Tissue Value: Aerial
  misc_feature: MA Experiment 108561 PARAMETER Experiment Name: At_100uM_ABA_cDNA_P Parameter: Treatment Value: 100uM ABA vs. No Treatment
  misc_feature: MA Experiment ID: 108579 Result: Up-regulated in Transcription
  misc_feature: MA Experiment 108579 PARAMETER Experiment Name: At_4deg_Cold_cDNA_P Parameter: Temperature (deg C) Value: 4 vs. 22
  misc_feature: MA Experiment 108579 PARAMETER Experiment Name: At_4deg_Cold_cDNA_P Parameter: Timepoint (hr) Value: 6
  misc_feature: MA Experiment 108579 PARAMETER Experiment Name: At_4deg_Cold_cDNA_P Parameter: Tissue Value: Aerial
  misc_feature: MA Experiment ID: 108585 Result: Down-regulated in Transcription
  misc_feature: MA Experiment 108585 PARAMETER Experiment Name: At_5mM_NaNP_cDNA_P Parameter: Timepoint (hr) Value: 6
  misc_feature: MA Experiment 108585 PARAMETER Experiment Name: At_5mM_NaNP_cDNA_P Parameter: Tissue Value: Aerial
  misc_feature: MA Experiment 108585 PARAMETER Experiment Name: At_5mM_NaNP_cDNA_P Parameter: Treatment Value: null
  misc_feature: MA Experiment ID: 108595 Result: Down-regulated in Transcription
  misc_feature: MA Experiment 108595 PARAMETER Experiment Name: At_Ler-pi_Ovule_cDNA_P Parameter: Plant Line Value: null
  misc_feature: MA Experiment ID: 108605 Result: Down-regulated in Transcription
  misc_feature: MA Experiment 108605 PARAMETER Experiment Name: At_100uM_ABA_cDNA_P Parameter: Timepoint (hr) Value: 6
  misc_feature: MA Experiment 108605 PARAMETER Experiment Name: At_100uM_ABA_cDNA_P Parameter: Tissue Value: Aerial
  misc_feature: MA Experiment 108605 PARAMETER Experiment Name: At_100uM_ABA_cDNA_P Parameter: Treatment Value: 100uM ABA vs. No Treatment
  misc_feature: MA Experiment ID: 108607 Result: Down-regulated in Transcription
  misc_feature: MA Experiment 108607 PARAMETER Experiment Name: At_100uM_ABA_cDNA_P Parameter: Timepoint (hr) Value: 4
  misc_feature: MA Experiment 108607 PARAMETER Experiment Name: At_100uM_ABA_cDNA_P Parameter: Tissue Value: Aerial
  misc_feature: MA Experiment 108607 PARAMETER Experiment Name: At_100uM_ABA_cDNA_P Parameter: Treatment Value: 100uM ABA vs. No Treatment
  misc_feature: MA Experiment ID: 108668 Result: Down-regulated in Transcription
  misc_feature: MA Experiment 108668 PARAMETER Experiment Name: At_2mM_SA_cDNA_P Parameter: Plant Line Value: WS
  misc_feature: MA Experiment 108668 PARAMETER Experiment Name: At_2mM_SA_cDNA_P Parameter: Timepoint (hr) Value: 6
  misc_feature: MA Experiment 108668 PARAMETER Experiment Name: At_2mM_SA_cDNA_P Parameter: Treatment Value: 2mM SA vs. No Treatment
  misc_feature: MA Experiment ID: 20000069 Result: Down-regulated in Transcription
  misc_feature: MA Experiment 20000069 PARAMETER Experiment Name: At_100uM_ABA_Mutants_cDNA_P Parameter: Plant Line Value: CS23
  misc_feature: MA Experiment 20000069 PARAMETER Experiment Name: At_100uM_ABA_Mutants_cDNA_P Parameter: Timepoint (hr) Value: 6
  misc_feature: MA Experiment 20000069 PARAMETER Experiment Name: At_100uM_ABA_Mutants_cDNA_P Parameter: Tissue Value: Aerial
  misc_feature: MA Experiment 20000069 PARAMETER Experiment Name: At_100uM_ABA_Mutants_cDNA_P Parameter: Treatment Value: 100uM ABA vs. No Treatment
  misc_feature: MA Experiment ID: 20000070 Result: Down-regulated in Transcription
  misc_feature: MA Experiment 20000070 PARAMETER Experiment Name: At_100uM_ABA_Mutants_cDNA_P Parameter: Plant Line Value: CS24
  misc_feature: MA Experiment 20000070 PARAMETER Experiment Name: At_100uM_ABA_Mutants_cDNA_P Parameter: Timepoint (hr) Value: 6
  misc_feature: MA Experiment 20000070 PARAMETER Experiment Name: At_100uM_ABA_Mutants_cDNA_P Parameter: Tissue Value: Aerial
  misc_feature: MA Experiment 20000070 PARAMETER Experiment Name: At_100uM_ABA_Mutants_cDNA_P Parameter: Treatment Value: 100uM ABA vs. No Treatment
  misc_feature: MA Experiment ID: 20000071 Result: Down-regulated in Transcription
  misc_feature: MA Experiment 20000071 PARAMETER Experiment Name: At_100uM_ABA_Mutants_cDNA_P Parameter: Plant Line Value: CS8104
  misc_feature: MA Experiment 20000071 PARAMETER Experiment Name: At_100uM_ABA_Mutants_cDNA_P Parameter: Timepoint (hr) Value: 6
  misc_feature: MA Experiment 20000071 PARAMETER Experiment Name: At_100uM_ABA_Mutants_cDNA_P Parameter: Tissue Value: Aerial
  misc_feature: MA Experiment 20000071 PARAMETER Experiment Name: At_100uM_ABA_Mutants_cDNA_P Parameter: Treatment Value: 100uM ABA vs. No Treatment
  misc_feature: MA Experiment ID: 20000072 Result: Down-regulated in Transcription
  misc_feature: MA Experiment 20000072 PARAMETER Experiment Name: At_100uM_ABA_Mutants_cDNA_P Parameter: Plant Line Value: CS8105
  misc_feature: MA Experiment 20000072 PARAMETER Experiment Name: At_100uM_ABA_Mutants_cDNA_P Parameter: Timepoint (hr) Value: 6
  misc_feature: MA Experiment 20000072 PARAMETER Experiment Name: At_100uM_ABA_Mutants_cDNA_P Parameter: Tissue Value: Aerial
  misc_feature: MA Experiment 20000072 PARAMETER Experiment Name: At_100uM_ABA_Mutants_cDNA_P Parameter: Treatment Value: 100uM ABA vs. No Treatment
  misc_feature: MA Experiment ID: 20000087 Result: Down-regulated in Transcription
  misc_feature: MA Experiment 20000087 PARAMETER Experiment Name: At_100uM_ABA_Mutants_cDNA_P Parameter: Plant Line Value: WS
  misc_feature: MA Experiment 20000087 PARAMETER Experiment Name: At_100uM_ABA_Mutants_cDNA_P Parameter: Timepoint (hr) Value: 6
  misc_feature: MA Experiment 20000087 PARAMETER Experiment Name: At_100uM_ABA_Mutants_cDNA_P Parameter: Tissue Value: Aerial
  misc_feature: MA Experiment 20000087 PARAMETER Experiment Name: At_100uM_ABA_Mutants_cDNA_P Parameter: Treatment Value: 100uM ABA vs. No Treatment
  misc_feature: MA Experiment ID: 20000113 Result: Up-regulated in Transcription
  misc_feature: MA Experiment 20000113 PARAMETER Experiment Name: At_42deg_Heat_cDNA_P Parameter: Temperature (deg C) Value: 42 vs. 22
  misc_feature: MA Experiment 20000113 PARAMETER Experiment Name: At_42deg_Heat_cDNA_P Parameter: Timepoint (hr) Value: 8
  misc_feature: MA Experiment 20000113 PARAMETER Experiment Name: At_42deg_Heat_cDNA_P Parameter: Tissue Value: Aerial
  misc_feature: MA Experiment ID: 20000117 Result: Down-regulated in Transcription
  misc_feature: MA Experiment 20000117 PARAMETER Experiment Name: At_100uM_ABA_Mutants_cDNA_P Parameter: Plant Line Value: Columbia
  misc_feature: MA Experiment 20000117 PARAMETER Experiment Name: At_100uM_ABA_Mutants_cDNA_P Parameter: Timepoint (hr) Value: 6
  misc_feature: MA Experiment 20000117 PARAMETER Experiment Name: At_100uM_ABA_Mutants_cDNA_P Parameter: Tissue Value: Aerial
  misc_feature: MA Experiment 20000117 PARAMETER Experiment Name: At_100uM_ABA_Mutants_cDNA_P Parameter: Treatment Value: 100uM ABA vs. No Treatment
  misc_feature: MA Experiment ID: 20000179 Result: Down-regulated in Transcription
  misc_feature: MA Experiment 20000179 PARAMETER Experiment Name: At_Germinating_Seeds_P Parameter: Age (hr) Value: 6 vs. 0
  misc_feature: MA Experiment 20000179 PARAMETER Experiment Name: At_Germinating_Seeds_P Parameter: Tissue Value: Germinating Seeds
  misc_feature: MA Experiment ID: 20000182 Result: Down-regulated in Transcription
  misc_feature: MA Experiment 20000182 PARAMETER Experiment Name: At_2mM_SA_P Parameter: Age (day) Value: 14
  misc_feature: MA Experiment 20000182 PARAMETER Experiment Name: At_2mM_SA_P Parameter: Organism Value: A. thaliana
  misc_feature: MA Experiment 20000182 PARAMETER Experiment Name: At_2mM_SA_P Parameter: Plant Line Value: WS
  misc_feature: MA Experiment 20000182 PARAMETER Experiment Name: At_2mM_SA_P Parameter: Timepoint (hr) Value: 6
  misc_feature: MA Experiment 20000182 PARAMETER Experiment Name: At_2mM_SA_P Parameter: Tissue Value: Aerial
  misc_feature: MA Experiment 20000182 PARAMETER Experiment Name: At_2mM_SA_P Parameter: Treatment Value: 2mM SA vs. No Treatment
  misc_feature: MA Experiment ID: 20000184 Result: Up-regulated in Transcription
  misc_feature: MA Experiment 20000184 PARAMETER Experiment Name: At_Shoots__P Parameter: Age (day) Value: 7
  misc_feature: MA Experiment 20000184 PARAMETER Experiment Name: At_Shoots__P Parameter: Tissue Value: Shoots vs. Whole Plant
  misc_feature: MA Experiment ID: 20000185 Result: Down-regulated in Transcription
  misc_feature: MA Experiment 20000185 PARAMETER Experiment Name: At_Roots__P Parameter: Age (day) Value: 7 vs. 21
  misc_feature: MA Experiment 20000185 PARAMETER Experiment Name: At_Roots__P Parameter: Organism Value: A. thaliana
  misc_feature: MA Experiment 20000185 PARAMETER Experiment Name: At_Roots__P Parameter: Tissue Value: Roots vs. Whole Plant
  misc_feature: MA Experiment ID: 20000234 Result: Up-regulated in Transcription
  misc_feature: MA Experiment 20000234 PARAMETER Experiment Name: At_Siliques_P Parameter: Age (day) Value: 21
  misc_feature: MA Experiment 20000234 PARAMETER Experiment Name: At_Siliques_P Parameter: Organism Value: A. thaliana
  misc_feature: MA Experiment 20000234 PARAMETER Experiment Name: At_Siliques_P Parameter: Plant Line Value: WS
  misc_feature: MA Experiment 20000234 PARAMETER Experiment Name: At_Siliques_P Parameter: Tissue Value: Less Than 5mm Siliques vs. Whole Plant
  misc_feature: MA Experiment ID: 20000264 Result: Up-regulated in Transcription
  misc_feature: MA Experiment 20000264 PARAMETER Experiment Name: At_Open_Flower_P Parameter: Age (day) Value: 21
  misc_feature: MA Experiment 20000264 PARAMETER Experiment Name: At_Open_Flower_P Parameter: Plant Line Value: WS
  misc_feature: MA Experiment 20000264 PARAMETER Experiment Name: At_Open_Flower_P Parameter: Tissue Value: Open Flower vs. Whole Plant
  misc_feature: MA Experiment ID: 20000436 Result: Down-regulated in Transcription
  misc_feature: MA Experiment 20000436 PARAMETER Experiment Name: At_Drought_P Parameter: Age (day) Value: 7
  misc_feature: MA Experiment 20000436 PARAMETER Experiment Name: At_Drought_P Parameter: Organism Value: A. thaliana
  misc_feature: MA Experiment 20000436 PARAMETER Experiment Name: At_Drought_P Parameter: Plant Line Value: WS
  misc_feature: MA Experiment 20000436 PARAMETER Experiment Name: At_Drought_P Parameter: Timepoint (hr) Value: 12
  misc_feature: MA Experiment 20000436 PARAMETER Experiment Name: At_Drought_P Parameter: Tissue Value: Whole Plant
  misc_feature: MA Experiment 20000436 PARAMETER Experiment Name: At_Drought_P Parameter: Treatment Value: Drought vs. No Drought
  misc_feature: MA Experiment ID: 20000437 Result: Down-regulated in Transcription
  misc_feature: MA Experiment 20000437 PARAMETER Experiment Name: At_Drought_P Parameter: Age (day) Value: 8
  misc_feature: MA Experiment 20000437 PARAMETER Experiment Name: At_Drought_P Parameter: Organism Value: A. thaliana
  misc_feature: MA Experiment 20000437 PARAMETER Experiment Name: At_Drought_P Parameter: Plant Line Value: WS
  misc_feature: MA Experiment 20000437 PARAMETER Experiment Name: At_Drought_P Parameter: Timepoint (hr) Value: 24
  misc_feature: MA Experiment 20000437 PARAMETER Experiment Name: At_Drought_P Parameter: Tissue Value: Whole Plant
  misc_feature: MA Experiment 20000437 PARAMETER Experiment Name: At_Drought_P Parameter: Treatment Value: Drought vs. No Drought
  misc_feature: MA Experiment ID: 20000439 Result: Down-regulated in Transcription
  misc_feature: MA Experiment 20000439 PARAMETER Experiment Name: At_Roots__P Parameter: Age (day) Value: 14 vs. 21
  misc_feature: MA Experiment 20000439 PARAMETER Experiment Name: At_Roots__P Parameter: Organism Value: A. thaliana
  misc_feature: MA Experiment 20000439 PARAMETER Experiment Name: At_Roots__P Parameter: Tissue Value: Roots vs. Whole Plant
  misc_feature: MA Experiment ID: 20000445 Result: Down-regulated in Transcription
  misc_feature: MA Experiment 20000445 PARAMETER Experiment Name: At_100uM_NAA__P Parameter: Age (day) Value: 14
  misc_feature: MA Experiment 20000445 PARAMETER Experiment Name: At_100uM_NAA__P Parameter: Organism Value: A. thaliana
  misc_feature: MA Experiment 20000445 PARAMETER Experiment Name: At_100uM_NAA__P Parameter: Plant Line Value: WS
  misc_feature: MA Experiment 20000445 PARAMETER Experiment Name: At_100uM_NAA__P Parameter: Timepoint (hr) Value: 6
  misc_feature: MA Experiment 20000445 PARAMETER Experiment Name: At_100uM_NAA__P Parameter: Tissue Value: Aerial
  misc_feature: MA Experiment 20000445 PARAMETER Experiment Name: At_100uM_NAA__P Parameter: Treatment Value: 100uM NAA vs. No Treatment
  misc_feature: MA Experiment ID: 20000453 Result: Down-regulated in Transcription
  misc_feature: MA Experiment 20000453 PARAMETER Experiment Name: At_100uM_ABA_P Parameter: Age (day) Value: 15
  misc_feature: MA Experiment 20000453 PARAMETER Experiment Name: At_100uM_ABA_P Parameter: Organism Value: A. thaliana
  misc_feature: MA Experiment 20000453 PARAMETER Experiment Name: At_100uM_ABA_P Parameter: Plant Line Value: WS
  misc_feature: MA Experiment 20000453 PARAMETER Experiment Name: At_100uM_ABA_P Parameter: Timepoint (hr) Value: 24
  misc_feature: MA Experiment 20000453 PARAMETER Experiment Name: At_100uM_ABA_P Parameter: Tissue Value: Aerial
  misc_feature: MA Experiment 20000453 PARAMETER Experiment Name: At_100uM_ABA_P Parameter: Treatment Value: 100uM ABA vs. No Treatment
  misc_feature: MA Experiment ID: 20000794 Result: Down-regulated in Transcription
  misc_feature: MA Experiment 20000794 PARAMETER Experiment Name: At_Petals_P Parameter: Age (day) Value: 23-25 days
  misc_feature: MA Experiment 20000794 PARAMETER Experiment Name: At_Petals_P Parameter: Plant Line Value: WS
  misc_feature: MA Experiment 20000794 PARAMETER Experiment Name: At_Petals_P Parameter: Tissue Value: Petals vs. Whole plant
  misc_feature: MA Experiment ID: 20001248 Result: Down-regulated in Transcription
  misc_feature: MA Experiment 20001248 PARAMETER Experiment Name: At_Far-red-induction_P Parameter: Age (day) Value: 7
  misc_feature: MA Experiment 20001248 PARAMETER Experiment Name: At_Far-red-induction_P Parameter: Light Value: Far-red vs. White
  misc_feature: MA Experiment 20001248 PARAMETER Experiment Name: At_Far-red-induction_P Parameter: Organism Value: A. thaliana
  misc_feature: MA Experiment 20001248 PARAMETER Experiment Name: At_Far-red-induction_P Parameter: Plant Line Value: Columbia
  misc_feature: MA Experiment 20001248 PARAMETER Experiment Name: At_Far-red-induction_P Parameter: Timepoint (hr) Value: 4
  misc_feature: MA Experiment 20001248 PARAMETER Experiment Name: At_Far-red-induction_P Parameter: Tissue Value: Whole Plant
  misc_feature: MA Experiment ID: 20001450 Result: Down-regulated in Transcription
  misc_feature: MA Experiment 20001450 PARAMETER Experiment Name: At_Far-red-induction_P Parameter: Age (day) Value: 7
  misc_feature: MA Experiment 20001450 PARAMETER Experiment Name: At_Far-red-induction_P Parameter: Light Value: Far-red vs. White
  misc_feature: MA Experiment 20001450 PARAMETER Experiment Name: At_Far-red-induction_P Parameter: Organism Value: A. thaliana
  misc_feature: MA Experiment 20001450 PARAMETER Experiment Name: At_Far-red-induction_P Parameter: Plant Line Value: Columbia
  misc_feature: MA Experiment 20001450 PARAMETER Experiment Name: At_Far-red-induction_P Parameter: Timepoint (hr) Value: 8
  misc_feature: MA Experiment 20001450 PARAMETER Experiment Name: At_Far-red-induction_P Parameter: Tissue Value: Whole Plant
  misc_feature: MA Experiment ID: 20001556 Result: Up-regulated in Transcription
  misc_feature: MA Experiment 20001556 PARAMETER Experiment Name: At_Drought_Soil_Dry_P Parameter: Age (day) Value: 26
  misc_feature: MA Experiment 20001556 PARAMETER Experiment Name: At_Drought_Soil_Dry_P Parameter: Organism Value: A. thaliana
  misc_feature: MA Experiment 20001556 PARAMETER Experiment Name: At_Drought_Soil_Dry_P Parameter: Plant Line Value: WS
  misc_feature: MA Experiment 20001556 PARAMETER Experiment Name: At_Drought_Soil_Dry_P Parameter: Post Timepoint (hr) Value: None
  misc_feature: MA Experiment 20001556 PARAMETER Experiment Name: At_Drought_Soil_Dry_P Parameter: Post-Treatment Value: None
  misc_feature: MA Experiment 20001556 PARAMETER Experiment Name: At_Drought_Soil_Dry_P Parameter: Timepoint (day) Value: 12
  misc_feature: MA Experiment 20001556 PARAMETER Experiment Name: At_Drought_Soil_Dry_P Parameter: Treatment Value: Drought vs. No Drought
  misc_feature: MA Experiment ID: 20001558 Result: Up-regulated in Transcription
  misc_feature: MA Experiment 20001558 PARAMETER Experiment Name: At_Drought_Soil_Dry_P Parameter: Age (day) Value: 27
  misc_feature: MA Experiment 20001558 PARAMETER Experiment Name: At_Drought_Soil_Dry_P Parameter: Organism Value: A. thaliana
  misc_feature: MA Experiment 20001558 PARAMETER Experiment Name: At_Drought_Soil_Dry_P Parameter: Plant Line Value: WS
  misc_feature: MA Experiment 20001558 PARAMETER Experiment Name: At_Drought_Soil_Dry_P Parameter: Post Timepoint (hr) Value: 6
  misc_feature: MA Experiment 20001558 PARAMETER Experiment Name: At_Drought_Soil_Dry_P Parameter: Post-Treatment Value: Re-Water vs. No Drought
  misc_feature: MA Experiment 20001558 PARAMETER Experiment Name: At_Drought_Soil_Dry_P Parameter: Timepoint (day) Value: 13
  misc_feature: MA Experiment 20001558 PARAMETER Experiment Name: At_Drought_Soil_Dry_P Parameter: Treatment Value: Drought vs. No Drought
  misc_feature: MA Experiment ID: 20001757 Result: Up-regulated in Transcription
  misc_feature: MA Experiment 20001757 PARAMETER Experiment Name: At_50mM_NH4NO3_L-to-H_P Parameter: Timepoint (hr) Value: 6
  misc_feature: MA Experiment 20001757 PARAMETER Experiment Name: At_50mM_NH4NO3_L-to-H_P Parameter: Tissue Value: Leaf
  misc_feature: MA Experiment 20001757 PARAMETER Experiment Name: At_50mM_NH4NO3_L-to-H_P Parameter: Treatment Value: 50mM NH4NO3 vs 100mM Mannitol

SEQ ID NO: 34075 - protein, 161 aa, Arabidopsis thaliana; identical to SEQ ID NO: 30485
  peptide (1)..(161): Ceres Seq. ID no. 13497623
  misc_feature (85)..(161): Pfam Name: SWIB/MDM2 domain Pfam Description: SWIB/MDM2 domain
  misc_feature (85)..(161): Pfam Name: SWIB/MDM2 domain Pfam Description: SWIB/MDM2 domain
  misc_feature (39)..(161): Homolog of NCBI NO: 18396594 NR Description: expressed protein [Arabidopsis thaliana]
  misc_feature (35)..(161): Homolog of NCBI NO: 21593643 NR Description: unknown [Arabidopsis thaliana]
  misc_feature (45)..(160): Homolog of NCBI NO: 33667910 NR Description: SWIb domain-containing protein [Solanum chacoense]
  misc_feature (39)..(161): Homolog of NCBI NO: 14488372 NR Description: hypothetical protein [Oryza sativa (japonica
  misc_feature (18)..(161): Homolog of NCBI NO: 21593713 NR Description: unknown [Arabidopsis thaliana]
  misc_feature (39)..(161): Homolog of NCBI NO: 18396594 NR Description: expressed protein [Arabidopsis thaliana]
  misc_feature (45)..(160): Homolog of NCBI NO: 33667910 NR Description: SWIb domain-containing protein [Solanum chacoense]
  misc_feature (18)..(161): Homolog of NCBI NO: 21593713 NR Description: unknown [Arabidopsis thaliana]
  misc_feature (18)..(161): Homolog of NCBI NO: 15235320 NR Description: expressed protein [Arabidopsis thaliana]
  misc_feature (18)..(161): Homolog of NCBI NO: 14423526 NR Description: putative protein [Arabidopsis thaliana]
  misc_feature (18)..(161): Homolog of NCBI NO: 21553903 NR Description: unknown [Arabidopsis thaliana]
  misc_feature (18)..(161): Homolog of NCBI NO: 18397658 NR Description: expressed protein [Arabidopsis thaliana]
  misc_feature (18)..(161): Homolog of NCBI NO: 19698859 NR Description: unknown protein [Arabidopsis thaliana]
  misc_feature (39)..(161): Homolog of NCBI NO: 14488372 NR Description: hypothetical protein [Oryza sativa (japonica
  misc_feature (35)..(161): Homolog of NCBI NO: 21593643 NR Description: unknown [Arabidopsis thaliana]
  misc_feature (18)..(161): Homolog of NCBI NO: 19698859 NR Description: unknown protein [Arabidopsis thaliana]
  misc_feature (18)..(161): Homolog of NCBI NO: 18397658 NR Description: expressed protein [Arabidopsis thaliana]
  misc_feature (18)..(161): Homolog of NCBI NO: 21553903 NR Description: unknown [Arabidopsis thaliana]
  misc_feature (18)..(161): Homolog of NCBI NO: 14423526 NR Description: putative protein [Arabidopsis thaliana]
  misc_feature (18)..(161): Homolog of NCBI NO: 15235320 NR Description: expressed protein [Arabidopsis thaliana]

SEQ ID NO: 34076 - protein, 144 aa, Arabidopsis thaliana; identical to SEQ ID NO: 30486
  peptide (1)..(144): Ceres Seq. ID no. 13497624
  misc_feature (68)..(144): Pfam Name: SWIB/MDM2 domain Pfam Description: SWIB/MDM2 domain
  misc_feature (68)..(144): Pfam Name: SWIB/MDM2 domain Pfam Description: SWIB/MDM2 domain
  misc_feature (22)..(144): Homolog of NCBI NO: 18396594 NR Description: expressed protein [Arabidopsis thaliana]
  misc_feature (18)..(144): Homolog of NCBI NO: 21593643 NR Description: unknown [Arabidopsis thaliana]
  misc_feature (28)..(143): Homolog of NCBI NO: 33667910 NR Description: SWIb domain-containing protein [Solanum chacoense]
  misc_feature (22)..(144): Homolog of NCBI NO: 14488372 NR Description: hypothetical protein [Oryza sativa (japonica
  misc_feature (1)..(144): Homolog of NCBI NO: 21593713 NR Description: unknown [Arabidopsis thaliana]
  misc_feature (22)..(144): Homolog of NCBI NO: 18396594 NR Description: expressed protein [Arabidopsis thaliana]
  misc_feature (28)..(143): Homolog of NCBI NO: 33667910 NR Description: SWIb domain-containing protein [Solanum chacoense]
  misc_feature (1)..(144): Homolog of NCBI NO: 21593713 NR Description: unknown [Arabidopsis thaliana]
  misc_feature (1)..(144): Homolog of NCBI NO: 15235320 NR Description: expressed protein [Arabidopsis thaliana]
  misc_feature (1)..(144): Homolog of NCBI NO: 14423526 NR Description: putative protein [Arabidopsis thaliana]
  misc_feature (1)..(144): Homolog of NCBI NO: 21553903 NR Description: unknown [Arabidopsis thaliana]
  misc_feature (1)..(144): Homolog of NCBI NO: 18397658 NR Description: expressed protein [Arabidopsis thaliana]
  misc_feature (1)..(144): Homolog of NCBI NO: 19698859 NR Description: unknown protein [Arabidopsis thaliana]
  misc_feature (22)..(144): Homolog of NCBI NO: 14488372 NR Description: hypothetical protein [Oryza sativa (japonica
  misc_feature (18)..(144): Homolog of NCBI NO: 21593643 NR Description: unknown [Arabidopsis thaliana]
  misc_feature (1)..(144): Homolog of NCBI NO: 19698859 NR Description: unknown protein [Arabidopsis thaliana]
  misc_feature (1)..(144): Homolog of NCBI NO: 18397658 NR Description: expressed protein [Arabidopsis thaliana]
  misc_feature (1)..(144): Homolog of NCBI NO: 21553903 NR Description: unknown [Arabidopsis thaliana]
  misc_feature (1)..(144): Homolog of NCBI NO: 14423526 NR Description: putative protein [Arabidopsis thaliana]
  misc_feature (1)..(144): Homolog of NCBI NO: 15235320 NR Description: expressed protein [Arabidopsis thaliana]

SEQ ID NO: 34077 - protein, 121 aa, Arabidopsis thaliana; identical to SEQ ID NO: 30487
  peptide (1)..(121): Ceres Seq. ID no. 13497625
  misc_feature (45)..(121): Pfam Name: SWIB/MDM2 domain Pfam Description: SWIB/MDM2 domain
  misc_feature (45)..(121): Pfam Name: SWIB/MDM2 domain Pfam Description: SWIB/MDM2 domain
  misc_feature (1)..(121): Homolog of NCBI NO: 18396594 NR Description: expressed protein [Arabidopsis thaliana]
  misc_feature (1)..(121): Homolog of NCBI NO: 21593643 NR Description: unknown [Arabidopsis thaliana]
  misc_feature (5)..(120): Homolog of NCBI NO: 33667910 NR Description: SWIb domain-containing protein [Solanum chacoense]
  misc_feature (1)..(121): Homolog of NCBI NO: 14488372 NR Description: hypothetical protein [Oryza sativa (japonica
  misc_feature (1)..(121): Homolog of NCBI NO: 21593713 NR Description: unknown [Arabidopsis thaliana]
  misc_feature (1)..(121): Homolog of NCBI NO: 18396594 NR Description: expressed protein [Arabidopsis thaliana]
  misc_feature (5)..(120): Homolog of NCBI NO: 33667910 NR Description: SWIb domain-containing protein [Solanum chacoense]
  misc_feature (1)..(121): Homolog of NCBI NO: 21593713 NR Description: unknown [Arabidopsis thaliana]
  misc_feature (1)..(121): Homolog of NCBI NO: 15235320 NR Description: expressed protein [Arabidopsis thaliana]
  misc_feature (1)..(121): Homolog of NCBI NO: 14423526 NR Description: putative protein [Arabidopsis thaliana]
  misc_feature (1)..(121): Homolog of NCBI NO: 21553903 NR Description: unknown [Arabidopsis thaliana]
  misc_feature (1)..(121): Homolog of NCBI NO: 18397658 NR Description: expressed protein [Arabidopsis thaliana]
  misc_feature (1)..(121): Homolog of NCBI NO: 19698859 NR Description: unknown protein [Arabidopsis thaliana]
  misc_feature (1)..(121): Homolog of NCBI NO: 14488372 NR Description: hypothetical protein [Oryza sativa (japonica
  misc_feature (1)..(121): Homolog of NCBI NO: 21593643 NR Description: unknown [Arabidopsis thaliana]
  misc_feature (1)..(121): Homolog of NCBI NO: 19698859 NR Description: unknown protein [Arabidopsis thaliana]
  misc_feature (1)..(121): Homolog of NCBI NO: 18397658 NR Description: expressed protein [Arabidopsis thaliana]
  misc_feature (1)..(121): Homolog of NCBI NO: 21553903 NR Description: unknown [Arabidopsis thaliana]
  misc_feature (1)..(121): Homolog of NCBI NO: 14423526 NR Description: putative protein [Arabidopsis thaliana]
  misc_feature (1)..(121): Homolog of NCBI NO: 15235320 NR Description: expressed protein [Arabidopsis thaliana]

SEQ ID NO: 34078 - DNA, 1386 bp, Arabidopsis thaliana; identical to SEQ ID NO: 30488
  misc_feature (1)..(1386): Ceres Seq. ID no. 12337305
  misc_feature: MA Experiment ID: 108434 Result: Up-regulated in Transcription
  misc_feature: MA Experiment 108434 PARAMETER Experiment Name: At_Root_Tips_cDNA_P Parameter: Tissue Value: Root Tips
  misc_feature: MA Experiment ID: 108462 Result: Up-regulated in Transcription
  misc_feature: MA Experiment 108462 PARAMETER Experiment Name: At_Germinating_Seeds_cDNA_P Parameter: Age (day) Value: 2 vs. 0
  misc_feature: MA Experiment 108462 PARAMETER Experiment Name: At_Germinating_Seeds_cDNA_P Parameter: Tissue Value: Germinating Seeds
  misc_feature: MA Experiment ID: 108464 Result: Up-regulated in Transcription
  misc_feature: MA Experiment 108464 PARAMETER Experiment Name: At_Germinating_Seeds_cDNA_P Parameter: Age (day) Value: 4 vs. 0
  misc_feature: MA Experiment 108464 PARAMETER Experiment Name: At_Germinating_Seeds_cDNA_P Parameter: Tissue Value: Germinating Seeds
  misc_feature: MA Experiment ID: 108473 Result: Down-regulated in Transcription
  misc_feature: MA Experiment 108473 PARAMETER Experiment Name: At_Drought_Flowers_cDNA_P Parameter: Timepoint (hr) Value: 7 d
  misc_feature: MA Experiment 108473 PARAMETER Experiment Name: At_Drought_Flowers_cDNA_P Parameter: Tissue Value: Flower
  misc_feature: MA Experiment 108473 PARAMETER Experiment Name: At_Drought_Flowers_cDNA_P Parameter: Treatment Value: Drought vs. No Drought
  misc_feature: MA Experiment ID: 108561 Result: Down-regulated in Transcription
  misc_feature: MA Experiment 108561 PARAMETER Experiment Name: At_100uM_ABA_cDNA_P Parameter: Timepoint (hr) Value: 6
  misc_feature: MA Experiment 108561 PARAMETER Experiment Name: At_100uM_ABA_cDNA_P Parameter: Tissue Value: Aerial
  misc_feature: MA Experiment 108561 PARAMETER Experiment Name: At_100uM_ABA_cDNA_P Parameter: Treatment Value: 100uM ABA vs. No Treatment
  misc_feature: MA Experiment ID: 20000171 Result: Down-regulated in Transcription
  misc_feature: MA Experiment 20000171 PARAMETER Experiment Name: At_42deg_Heat_P Parameter: Age (day) Value: 14
  misc_feature: MA Experiment 20000171 PARAMETER Experiment Name: At_42deg_Heat_P Parameter: Organism Value: A. thaliana
  misc_feature: MA Experiment 20000171 PARAMETER Experiment Name: At_42deg_Heat_P Parameter: Plant Line Value: WS
  misc_feature: MA Experiment 20000171 PARAMETER Experiment Name: At_42deg_Heat_P Parameter: Temperature (deg C) Value: 42 vs. 22
  misc_feature: MA Experiment 20000171 PARAMETER Experiment Name: At_42deg_Heat_P Parameter: Timepoint (hr) Value: 1
  misc_feature: MA Experiment 20000171 PARAMETER Experiment Name: At_42deg_Heat_P Parameter: Tissue Value: Aerial
  misc_feature: MA Experiment ID: 20000173 Result: Down-regulated in Transcription
  misc_feature: MA Experiment 20000173 PARAMETER Experiment Name: At_42deg_Heat_P Parameter: Age (day) Value: 14
  misc_feature: MA Experiment 20000173 PARAMETER Experiment Name: At_42deg_Heat_P Parameter: Organism Value: A. thaliana
  misc_feature: MA Experiment 20000173 PARAMETER Experiment Name: At_42deg_Heat_P Parameter: Plant Line Value: WS
  misc_feature: MA Experiment 20000173 PARAMETER Experiment Name: At_42deg_Heat_P Parameter: Temperature (deg C) Value: 42 vs. 22
  misc_feature: MA Experiment 20000173 PARAMETER Experiment Name: At_42deg_Heat_P Parameter: Timepoint (hr) Value: 6
  misc_feature: MA Experiment 20000173 PARAMETER Experiment Name: At_42deg_Heat_P Parameter: Tissue Value: Aerial
  misc_feature: MA Experiment ID: 20000179 Result: Up-regulated in Transcription
  misc_feature: MA Experiment 20000179 PARAMETER Experiment Name: At_Germinating_Seeds_P Parameter: Age (hr) Value: 6 vs. 0
  misc_feature: MA Experiment 20000179 PARAMETER Experiment Name: At_Germinating_Seeds_P Parameter: Tissue Value: Germinating Seeds
  misc_feature: MA Experiment ID: 20000180 Result: Up-regulated in Transcription
  misc_feature: MA Experiment 20000180 PARAMETER Experiment Name: At_Germinating_Seeds_P Parameter: Age (hr) Value: 24 vs. 0
  misc_feature: MA Experiment 20000180 PARAMETER Experiment Name: At_Germinating_Seeds_P Parameter: Tissue Value: Germinating Seeds
  misc_feature: MA Experiment ID: 20000182 Result: Down-regulated in Transcription
  misc_feature: MA Experiment 20000182 PARAMETER Experiment Name: At_2mM_SA_P Parameter: Age (day) Value: 14
  misc_feature: MA Experiment 20000182 PARAMETER Experiment Name: At_2mM_SA_P Parameter: Organism Value: A. thaliana
  misc_feature: MA Experiment 20000182 PARAMETER Experiment Name: At_2mM_SA_P Parameter: Plant Line Value: WS
  misc_feature: MA Experiment 20000182 PARAMETER Experiment Name: At_2mM_SA_P Parameter: Timepoint (hr) Value: 6
  misc_feature: MA Experiment 20000182 PARAMETER Experiment Name: At_2mM_SA_P Parameter: Tissue Value: Aerial
  misc_feature: MA Experiment 20000182 PARAMETER Experiment Name: At_2mM_SA_P Parameter: Treatment Value: 2mM SA vs. No Treatment
  misc_feature: MA Experiment ID: 20000184 Result: Up-regulated in Transcription
  misc_feature: MA Experiment 20000184 PARAMETER Experiment Name: At_Shoots__P Parameter: Age (day) Value: 7
  misc_feature: MA Experiment 20000184 PARAMETER Experiment Name: At_Shoots__P Parameter: Tissue Value: Shoots vs. Whole Plant
  misc_feature: MA Experiment ID: 20000185 Result: Down-regulated in Transcription
  misc_feature: MA Experiment 20000185 PARAMETER Experiment Name: At_Roots__P Parameter: Age (day) Value: 7 vs. 21
  misc_feature: MA Experiment 20000185 PARAMETER Experiment Name: At_Roots__P Parameter: Organism Value: A. thaliana
  misc_feature: MA Experiment 20000185 PARAMETER Experiment Name: At_Roots__P Parameter: Tissue Value: Roots vs. Whole Plant
  misc_feature: MA Experiment ID: 20000227 Result: Down-regulated in Transcription
  misc_feature: MA Experiment 20000227 PARAMETER Experiment Name: At_Root-Tips-vs-Tops_P Parameter: Tissue Value: Root Tips vs. Root Tops
  misc_feature: MA Experiment ID: 20000234 Result: Up-regulated in Transcription
  misc_feature: MA Experiment 20000234 PARAMETER Experiment Name: At_Siliques_P Parameter: Age (day) Value: 21
  misc_feature: MA Experiment 20000234 PARAMETER Experiment Name: At_Siliques_P Parameter: Organism Value: A. thaliana
  misc_feature: MA Experiment 20000234 PARAMETER Experiment Name: At_Siliques_P Parameter: Plant Line Value: WS
  misc_feature: MA Experiment 20000234 PARAMETER Experiment Name: At_Siliques_P Parameter: Tissue Value: Less Than 5mm Siliques vs. Whole Plant
  misc_feature: MA Experiment ID: 20000235 Result: Up-regulated in Transcription
  misc_feature: MA Experiment 20000235 PARAMETER Experiment Name: At_Siliques_P Parameter: Age (day) Value: 21
  misc_feature: MA Experiment 20000235 PARAMETER Experiment Name: At_Siliques_P Parameter: Organism Value: A. thaliana
  misc_feature: MA Experiment 20000235 PARAMETER Experiment Name: At_Siliques_P Parameter: Plant Line Value: WS
  misc_feature: MA Experiment 20000235 PARAMETER Experiment Name: At_Siliques_P Parameter: Tissue Value: 5-10mm Siliques vs. Whole Plant
  misc_feature: MA Experiment ID: 20000265 Result: Up-regulated in Transcription
  misc_feature: MA Experiment 20000265 PARAMETER Experiment Name: At_Open_Flower_P Parameter: Age (day) Value: 21
  misc_feature: MA Experiment 20000265 PARAMETER Experiment Name: At_Open_Flower_P Parameter: Plant Line Value: WS
  misc_feature: MA Experiment 20000265 PARAMETER Experiment Name: At_Open_Flower_P Parameter: Tissue Value: Closed Flower vs. Whole Plant
  misc_feature: MA Experiment ID: 20000286 Result: Up-regulated in Transcription
  misc_feature: MA Experiment 20000286 PARAMETER Experiment Name: At_Open_Flower_P Parameter: Age (day) Value: 21
  misc_feature: MA Experiment 20000286 PARAMETER Experiment Name: At_Open_Flower_P Parameter: Plant Line Value: WS
  misc_feature: MA Experiment 20000286 PARAMETER Experiment Name: At_Open_Flower_P Parameter: Tissue Value: Half Open vs. Whole Plant
  misc_feature: MA Experiment ID: 20000436 Result: Down-regulated in Transcription
  misc_feature: MA Experiment 20000436 PARAMETER Experiment Name: At_Drought_P Parameter: Age (day) Value: 7
  misc_feature: MA Experiment 20000436 PARAMETER Experiment Name: At_Drought_P Parameter: Organism Value: A. thaliana
  misc_feature: MA Experiment 20000436 PARAMETER Experiment Name: At_Drought_P Parameter: Plant Line Value: WS
  misc_feature: MA Experiment 20000436 PARAMETER Experiment Name: At_Drought_P Parameter: Timepoint (hr) Value: 12
  misc_feature: MA Experiment 20000436 PARAMETER Experiment Name: At_Drought_P Parameter: Tissue Value: Whole Plant
  misc_feature: MA Experiment 20000436 PARAMETER Experiment Name: At_Drought_P Parameter: Treatment Value: Drought vs. No Drought
  misc_feature: MA Experiment ID: 20000437 Result: Down-regulated in Transcription
  misc_feature: MA Experiment 20000437 PARAMETER Experiment Name: At_Drought_P Parameter: Age (day) Value: 8
  misc_feature: MA Experiment 20000437 PARAMETER Experiment Name: At_Drought_P Parameter: Organism Value: A. thaliana
  misc_feature: MA Experiment 20000437 PARAMETER Experiment Name: At_Drought_P Parameter: Plant Line Value: WS
  misc_feature: MA Experiment 20000437 PARAMETER Experiment Name: At_Drought_P Parameter: Timepoint (hr) Value: 24
  misc_feature: MA Experiment 20000437 PARAMETER Experiment Name: At_Drought_P Parameter: Tissue Value: Whole Plant
  misc_feature: MA Experiment 20000437 PARAMETER Experiment Name: At_Drought_P Parameter: Treatment Value: Drought vs. No Drought
  misc_feature: MA Experiment ID: 20000438 Result: Up-regulated in Transcription
  misc_feature: MA Experiment 20000438 PARAMETER Experiment Name: At_Shoots__P Parameter: Age (day) Value: 14
  misc_feature: MA Experiment 20000438 PARAMETER Experiment Name: At_Shoots__P Parameter: Tissue Value: Shoots vs. Whole Plant
  misc_feature: MA Experiment ID: 20000439 Result: Down-regulated in Transcription
  misc_feature: MA Experiment 20000439 PARAMETER Experiment Name: At_Roots__P Parameter: Age (day) Value: 14 vs. 21
  misc_feature: MA Experiment 20000439 PARAMETER Experiment Name: At_Roots__P Parameter: Organism Value: A. thaliana
  misc_feature: MA Experiment 20000439 PARAMETER Experiment Name: At_Roots__P Parameter: Tissue Value: Roots vs. Whole Plant
  misc_feature: MA Experiment ID: 20000451 Result: Up-regulated in Transcription
  misc_feature: MA Experiment 20000451 PARAMETER Experiment Name: At_CS6879_Shoots-Roots_P Parameter: Age (day) Value: 14
  misc_feature: MA Experiment 20000451 PARAMETER Experiment Name: At_CS6879_Shoots-Roots_P Parameter: Organism Value: A. thaliana
  misc_feature: MA Experiment 20000451 PARAMETER Experiment Name: At_CS6879_Shoots-Roots_P Parameter: Plant Line Value: CS6879 vs. WS
  misc_feature: MA Experiment 20000451 PARAMETER Experiment Name: At_CS6879_Shoots-Roots_P Parameter: Tissue Value: Roots
  misc_feature: MA Experiment ID: 20000573 Result: Down-regulated in Transcription
  misc_feature: MA Experiment 20000573 PARAMETER Experiment Name: At_100uM_ABA_Mutants__P Parameter: Organism Value: A. thaliana
  misc_feature: MA Experiment 20000573 PARAMETER Experiment Name: At_100uM_ABA_Mutants__P Parameter: Plant Line Value: CS22 vs. Ler wt
  misc_feature: MA Experiment 20000573 PARAMETER Experiment Name: At_100uM_ABA_Mutants__P Parameter: Timepoint (hr) Value: N/A
  misc_feature: MA Experiment 20000573 PARAMETER Experiment Name: At_100uM_ABA_Mutants__P Parameter: Tissue Value: Whole Plant
  misc_feature: MA Experiment 20000573 PARAMETER Experiment Name: At_100uM_ABA_Mutants__P Parameter: Treatment Value: None
  misc_feature: MA Experiment ID: 20000574 Result: Down-regulated in Transcription
  misc_feature: MA Experiment 20000574 PARAMETER Experiment Name: At_100uM_ABA_Mutants__P Parameter: Organism Value: A. thaliana
  misc_feature: MA Experiment 20000574 PARAMETER Experiment Name: At_100uM_ABA_Mutants__P Parameter: Plant Line Value: CS23 vs. Ler wt
  misc_feature: MA Experiment 20000574 PARAMETER Experiment Name: At_100uM_ABA_Mutants__P Parameter: Timepoint (hr) Value: N/A
  misc_feature: MA Experiment 20000574 PARAMETER Experiment Name: At_100uM_ABA_Mutants__P Parameter: Tissue Value: Whole Plant
  misc_feature: MA Experiment 20000574 PARAMETER Experiment Name: At_100uM_ABA_Mutants__P Parameter: Treatment Value: None
  misc_feature: MA Experiment ID: 20000794 Result: Down-regulated in Transcription
  misc_feature: MA Experiment 20000794 PARAMETER Experiment Name: At_Petals_P Parameter: Age (day) Value: 23-25 days
  misc_feature: MA Experiment 20000794 PARAMETER Experiment Name: At_Petals_P Parameter: Plant Line Value: WS
  misc_feature: MA Experiment 20000794 PARAMETER Experiment Name: At_Petals_P Parameter: Tissue Value: Petals vs. Whole plant
  misc_feature: MA Experiment ID: 20001248 Result: Down-regulated in Transcription
  misc_feature: MA Experiment 20001248 PARAMETER Experiment Name: At_Far-red-induction_P Parameter: Age (day) Value: 7
  misc_feature: MA Experiment 20001248 PARAMETER Experiment Name: At_Far-red-induction_P Parameter: Light Value: Far-red vs. White
  misc_feature: MA Experiment 20001248 PARAMETER Experiment Name: At_Far-red-induction_P Parameter: Organism Value: A. thaliana
  misc_feature: MA Experiment 20001248 PARAMETER Experiment Name: At_Far-red-induction_P Parameter: Plant Line Value: Columbia
  misc_feature: MA Experiment 20001248 PARAMETER Experiment Name: At_Far-red-induction_P Parameter: Timepoint (hr) Value: 4
  misc_feature: MA Experiment 20001248 PARAMETER Experiment Name: At_Far-red-induction_P Parameter: Tissue Value: Whole Plant
  misc_feature: MA Experiment ID: 20001451 Result: Down-regulated in Transcription
  misc_feature: MA Experiment 20001451 PARAMETER Experiment Name: At_Far-red-induction_P Parameter: Age (day) Value: 7
  misc_feature: MA Experiment 20001451 PARAMETER Experiment Name: At_Far-red-induction_P Parameter: Light Value: Far-red vs. White
  misc_feature: MA Experiment 20001451 PARAMETER Experiment Name: At_Far-red-induction_P Parameter: Organism Value: A. thaliana
  misc_feature: MA Experiment 20001451 PARAMETER Experiment Name: At_Far-red-induction_P Parameter: Plant Line Value: Columbia
  misc_feature: MA Experiment 20001451 PARAMETER Experiment Name: At_Far-red-induction_P Parameter: Timepoint (hr) Value: 24
  misc_feature: MA Experiment 20001451 PARAMETER Experiment Name: At_Far-red-induction_P Parameter: Tissue Value: Whole Plant
  misc_feature: MA Experiment ID: 20001459 Result: Up-regulated in Transcription
  misc_feature: MA Experiment 20001459 PARAMETER Experiment Name: At_50mM_NH4NO3_L-to-H_P Parameter: Age (day) Value: Undefined
  misc_feature: MA Experiment 20001459 PARAMETER Experiment Name: At_50mM_NH4NO3_L-to-H_P Parameter: Organism Value: Undefined
  misc_feature: MA Experiment 20001459 PARAMETER Experiment Name: At_50mM_NH4NO3_L-to-H_P Parameter: Plant Line Value: Undefined
  misc_feature: MA Experiment 20001459 PARAMETER Experiment Name: At_50mM_NH4NO3_L-to-H_P Parameter: Timepoint (hr) Value: 4
  misc_feature: MA Experiment 20001459 PARAMETER Experiment Name: At_50mM_NH4NO3_L-to-H_P Parameter: Tissue Value: Siliques
  misc_feature: MA Experiment 20001459 PARAMETER Experiment Name: At_50mM_NH4NO3_L-to-H_P Parameter: Treatment Value: 50mM NH4NO3 vs. 100mM Manitol
  misc_feature: MA Experiment ID: 20001554 Result: Down-regulated in Transcription
  misc_feature: MA Experiment 20001554 PARAMETER Experiment Name: At_Drought_Soil_Dry_P Parameter: Age (day) Value: 21
  misc_feature: MA Experiment 20001554 PARAMETER Experiment Name: At_Drought_Soil_Dry_P Parameter: Organism Value: A. thaliana
  misc_feature: MA Experiment 20001554 PARAMETER Experiment Name: At_Drought_Soil_Dry_P Parameter: Plant Line Value: WS
  misc_feature: MA Experiment 20001554 PARAMETER Experiment Name: At_Drought_Soil_Dry_P Parameter: Post Timepoint (hr) Value: None
  misc_feature: MA Experiment 20001554 PARAMETER Experiment Name: At_Drought_Soil_Dry_P Parameter: Post-Treatment Value: None
  misc_feature: MA Experiment 20001554 PARAMETER Experiment Name: At_Drought_Soil_Dry_P Parameter: Timepoint (day) Value: 7
  misc_feature: MA Experiment 20001554 PARAMETER Experiment Name: At_Drought_Soil_Dry_P Parameter: Treatment Value: Drought vs. No Drought
  misc_feature: MA Experiment ID: 20001555 Result: Down-regulated in Transcription
  misc_feature: MA Experiment 20001555 PARAMETER Experiment Name: At_Drought_Soil_Dry_P Parameter: Age (day) Value: 24
  misc_feature: MA Experiment 20001555 PARAMETER Experiment Name: At_Drought_Soil_Dry_P Parameter: Organism Value: A. thaliana
  misc_feature: MA Experiment 20001555 PARAMETER Experiment Name: At_Drought_Soil_Dry_P Parameter: Plant Line Value: WS
  misc_feature: MA Experiment 20001555 PARAMETER Experiment Name: At_Drought_Soil_Dry_P Parameter: Post Timepoint (hr) Value: None
  misc_feature: MA Experiment 20001555 PARAMETER Experiment Name: At_Drought_Soil_Dry_P Parameter: Post-Treatment Value: None
  misc_feature: MA Experiment 20001555 PARAMETER Experiment Name: At_Drought_Soil_Dry_P Parameter: Timepoint (day) Value: 10
  misc_feature: MA Experiment 20001555 PARAMETER Experiment Name: At_Drought_Soil_Dry_P Parameter: Treatment Value: Drought vs. No Drought
  misc_feature: MA Experiment ID: 20001556 Result: Down-regulated in Transcription
  misc_feature: MA Experiment 20001556 PARAMETER Experiment Name: At_Drought_Soil_Dry_P Parameter: Age (day) Value: 26
  misc_feature: MA Experiment 20001556 PARAMETER Experiment Name: At_Drought_Soil_Dry_P Parameter: Organism Value: A. thaliana
  misc_feature: MA Experiment 20001556 PARAMETER Experiment Name: At_Drought_Soil_Dry_P Parameter: Plant Line Value: WS
  misc_feature: MA Experiment 20001556 PARAMETER Experiment Name: At_Drought_Soil_Dry_P Parameter: Post Timepoint (hr) Value: None
  misc_feature: MA Experiment 20001556 PARAMETER Experiment Name: At_Drought_Soil_Dry_P Parameter: Post-Treatment Value: None
  misc_feature: MA Experiment 20001556 PARAMETER Experiment Name: At_Drought_Soil_Dry_P Parameter: Timepoint (day) Value: 12
  misc_feature: MA Experiment 20001556 PARAMETER Experiment Name: At_Drought_Soil_Dry_P Parameter: Treatment Value: Drought vs. No Drought
  misc_feature: MA Experiment ID: 20001558 Result: Up-regulated in Transcription
  misc_feature: MA Experiment 20001558 PARAMETER Experiment Name: At_Drought_Soil_Dry_P Parameter: Age (day) Value: 27
  misc_feature: MA Experiment 20001558 PARAMETER Experiment Name: At_Drought_Soil_Dry_P Parameter: Organism Value: A. thaliana
  misc_feature: MA Experiment 20001558 PARAMETER Experiment Name: At_Drought_Soil_Dry_P Parameter: Plant Line Value: WS
  misc_feature: MA Experiment 20001558 PARAMETER Experiment Name: At_Drought_Soil_Dry_P Parameter: Post Timepoint (hr) Value: 6
  misc_feature: MA Experiment 20001558 PARAMETER Experiment Name: At_Drought_Soil_Dry_P Parameter: Post-Treatment Value: Re-Water vs. No Drought
  misc_feature: MA Experiment 20001558 PARAMETER Experiment Name: At_Drought_Soil_Dry_P Parameter: Timepoint (day) Value: 13
  misc_feature: MA Experiment 20001558 PARAMETER Experiment Name: At_Drought_Soil_Dry_P Parameter: Treatment Value: Drought vs. No Drought
  misc_feature: MA Experiment ID: 20001559 Result: Down-regulated in Transcription
  misc_feature: MA Experiment 20001559 PARAMETER Experiment Name: At_Drought_Soil_Dry_P Parameter: Age (day) Value: 28
  misc_feature: MA Experiment 20001559 PARAMETER Experiment Name: At_Drought_Soil_Dry_P Parameter: Organism Value: A. thaliana
  misc_feature: MA Experiment 20001559 PARAMETER Experiment Name: At_Drought_Soil_Dry_P Parameter: Plant Line Value: WS
  misc_feature: MA Experiment 20001559 PARAMETER Experiment Name: At_Drought_Soil_Dry_P Parameter: Post Timepoint (hr) Value: 29
  misc_feature: MA Experiment 20001559 PARAMETER Experiment Name: At_Drought_Soil_Dry_P Parameter: Post-Treatment Value: Re-Water vs. No Drought
  misc_feature: MA Experiment 20001559 PARAMETER Experiment Name: At_Drought_Soil_Dry_P Parameter: Timepoint (day) Value: 14
  misc_feature: MA Experiment 20001559 PARAMETER Experiment Name: At_Drought_Soil_Dry_P Parameter: Treatment Value: Drought vs. No Drought
  misc_feature: MA Experiment ID: 20001757 Result: Up-regulated in Transcription
  misc_feature: MA Experiment 20001757 PARAMETER Experiment Name: At_50mM_NH4NO3_L-to-H_P Parameter: Timepoint (hr) Value: 6
  misc_feature: MA Experiment 20001757 PARAMETER Experiment Name: At_50mM_NH4NO3_L-to-H_P Parameter: Tissue Value: Leaf
  misc_feature: MA Experiment 20001757 PARAMETER Experiment Name: At_50mM_NH4NO3_L-to-H_P Parameter: Treatment Value: 50mM NH4NO3 vs 100mM Mannitol
  misc_feature: MA Experiment ID: 20001906 Result: Down-regulated in Transcription
  misc_feature: MA Experiment 20001906 PARAMETER Experiment Name: At_Drought_Reproduction_P Parameter: Age (day) Value: 35
  misc_feature: MA Experiment 20001906 PARAMETER Experiment Name: At_Drought_Reproduction_P Parameter: Organism Value: A. thaliana
  misc_feature: MA Experiment 20001906 PARAMETER Experiment Name: At_Drought_Reproduction_P Parameter: Plant Line Value: WS
  misc_feature: MA Experiment 20001906 PARAMETER Experiment Name: At_Drought_Reproduction_P Parameter: Timepoint (day) Value: 5
  misc_feature: MA Experiment 20001906 PARAMETER Experiment Name: At_Drought_Reproduction_P Parameter: Tissue Value: Siliques
  misc_feature: MA Experiment 20001906 PARAMETER Experiment Name: At_Drought_Reproduction_P Parameter: Treatment Value: Drought vs. No Drought
  misc_feature: MA Experiment ID: 20001911 Result: Down-regulated in Transcription
  misc_feature: MA Experiment 20001911 PARAMETER Experiment Name: At_Drought_Reproduction_P Parameter: Age (day) Value: 40
  misc_feature: MA Experiment 20001911 PARAMETER Experiment Name: At_Drought_Reproduction_P Parameter: Organism Value: A. thaliana
  misc_feature: MA Experiment 20001911 PARAMETER Experiment Name: At_Drought_Reproduction_P Parameter: Plant Line Value: WS
  misc_feature: MA Experiment 20001911 PARAMETER Experiment Name: At_Drought_Reproduction_P Parameter: Timepoint (day) Value: 10
  misc_feature: MA Experiment 20001911 PARAMETER Experiment Name: At_Drought_Reproduction_P Parameter: Tissue Value: Flowers
  misc_feature: MA Experiment 20001911 PARAMETER Experiment Name: At_Drought_Reproduction_P Parameter: Treatment Value: Drought vs. No Drought

SEQ ID NO: 34079 - protein, 257 aa, Arabidopsis thaliana; identical to SEQ ID NO: 30489
  peptide (1)..(257): Ceres Seq. ID no. 12337306
  misc_feature (164)..(241): Pfam Name: Pollen allergen Pfam Description: Pollen allergen
  misc_feature (164)..(241): Pfam Name: Pollen allergen Pfam Description: Pollen allergen
  misc_feature (1)..(257): Homolog of NCBI NO: 38046726 NR Description: alpha-expansin 1 [Populus tremula x Populus
  misc_feature (1)..(257): Homolog of NCBI NO: 20502782 NR Description: expansin 10 precursor [Rumex palustris]
  misc_feature (1)..(257): Homolog of NCBI NO: 20502786 NR Description: expansin 12 precursor [Rumex palustris]
  misc_feature (1)..(257): Homolog of NCBI NO: 20502784 NR Description: expansin 11 precursor [Rumex palustris]
  misc_feature (1)..(257): Homolog of NCBI NO: 13898655 NR Description: expansin [Prunus cerasus]
  misc_feature (1)..(257): Homolog of NCBI NO: 38046726 NR Description: alpha-expansin 1 [Populus tremula x Populus
  misc_feature (1)..(257): Homolog of NCBI NO: 20502786 NR Description: expansin 12 precursor [Rumex palustris]
  misc_feature (1)..(257): Homolog of NCBI NO: 13898655 NR Description: expansin [Prunus cerasus]
  misc_feature (1)..(257): Homolog of NCBI NO: 15227005 NR Description: expansin, putative
  misc_feature (1)..(257): Homolog of NCBI NO: 21553904 NR Description: expansin AtEx6 [Arabidopsis thaliana]
  misc_feature (1)..(257): Homolog of NCBI NO: 20138197 NR Description: Alpha-expansin 6 precursor (At-EXP6) (AtEx6)
  misc_feature (1)..(257): Homolog of NCBI NO: 7488487 NR Description: probable expansin precursor - rape
  misc_feature (1)..(257): Homolog of NCBI NO: 29466643 NR Description: expansin [Prunus persica]
  misc_feature (1)..(257): Homolog of NCBI NO: 20502784 NR Description: expansin 11 precursor [Rumex palustris]
  misc_feature (1)..(257): Homolog of NCBI NO: 20502782 NR Description: expansin 10 precursor [Rumex palustris]
  misc_feature (1)..(257): Homolog of NCBI NO: 29466643 NR Description: expansin [Prunus persica]
  misc_feature (1)..(257): Homolog of NCBI NO: 7488487 NR Description: probable expansin precursor - rape
  misc_feature (1)..(257): Homolog of NCBI NO: 20138197 NR Description: Alpha-expansin 6 precursor (At-EXP6) (AtEx6)
  misc_feature (1)..(257): Homolog of NCBI NO: 21553904 NR Description: expansin AtEx6 [Arabidopsis thaliana]
  misc_feature (1)..(257): Homolog of NCBI NO: 15227005 NR Description: expansin, putative

SEQ ID NO: 34080 - protein, 255 aa, Arabidopsis thaliana; identical to SEQ ID NO: 30490
  peptide (1)..(255): Ceres Seq. ID no. 12337307
  misc_feature (162)..(239): Pfam Name: Pollen allergen Pfam Description: Pollen allergen
  misc_feature (162)..(239): Pfam Name: Pollen allergen Pfam Description: Pollen allergen
  misc_feature (1)..(255): Homolog of NCBI NO: 38046726 NR Description: alpha-expansin 1 [Populus tremula x Populus
  misc_feature (1)..(255): Homolog of NCBI NO: 20502782 NR Description: expansin 10 precursor [Rumex palustris]
  misc_feature (1)..(255): Homolog of NCBI NO: 20502786 NR Description: expansin 12 precursor [Rumex palustris]
  misc_feature (1)..(255): Homolog of NCBI NO: 20502784 NR Description: expansin 11 precursor [Rumex palustris]
  misc_feature (1)..(255): Homolog of NCBI NO: 13898655 NR Description: expansin [Prunus cerasus]
  misc_feature (1)..(255): Homolog of NCBI NO: 38046726 NR Description: alpha-expansin 1 [Populus tremula x Populus
  misc_feature (1)..(255): Homolog of NCBI NO: 20502786 NR Description: expansin 12 precursor [Rumex palustris]
  misc_feature (1)..(255): Homolog of NCBI NO: 13898655 NR Description: expansin [Prunus cerasus]
  misc_feature (1)..(255): Homolog of NCBI NO: 15227005 NR Description: expansin, putative
  misc_feature (1)..(255): Homolog of NCBI NO: 21553904 NR Description: expansin AtEx6 [Arabidopsis thaliana]
  misc_feature (1)..(255): Homolog of NCBI NO: 20138197 NR Description: Alpha-expansin 6 precursor (At-EXP6) (AtEx6)
  misc_feature (1)..(255): Homolog of NCBI NO: 7488487 NR Description: probable expansin precursor - rape
  misc_feature (1)..(255): Homolog of NCBI NO: 29466643 NR Description: expansin [Prunus persica]
  misc_feature (1)..(255): Homolog of NCBI NO: 20502784 NR Description: expansin 11 precursor [Rumex palustris]
  misc_feature (1)..(255): Homolog of NCBI NO: 20502782 NR Description: expansin 10 precursor [Rumex palustris]
  misc_feature (1)..(255): Homolog of NCBI NO: 29466643 NR Description: expansin [Prunus persica]
  misc_feature (1)..(255): Homolog of NCBI NO: 7488487 NR Description: probable expansin precursor - rape
  misc_feature (1)..(255): Homolog of NCBI NO: 20138197 NR Description: Alpha-expansin 6 precursor (At-EXP6) (AtEx6)
  misc_feature (1)..(255): Homolog of NCBI NO: 21553904 NR Description: expansin AtEx6 [Arabidopsis thaliana]
  misc_feature (1)..(255): Homolog of NCBI NO: 15227005 NR Description: expansin, putative

SEQ ID NO: 34081 - protein, 210 aa, Arabidopsis thaliana; identical to SEQ ID NO: 30491
  peptide (1)..(210): Ceres Seq. ID no. 12337308
  misc_feature (117)..(194): Pfam Name: Pollen allergen Pfam Description: Pollen allergen
  misc_feature (117)..(194): Pfam Name: Pollen allergen Pfam Description: Pollen allergen
  misc_feature (1)..(210): Homolog of NCBI NO: 38046726 NR Description: alpha-expansin 1 [Populus tremula x Populus
  misc_feature (1)..(210): Homolog of NCBI NO: 20502782 NR Description: expansin 10 precursor [Rumex palustris]
  misc_feature (1)..(210): Homolog of NCBI NO: 20502786 NR Description: expansin 12 precursor [Rumex palustris]
  misc_feature (1)..(210): Homolog of NCBI NO: 20502784 NR Description: expansin 11 precursor [Rumex palustris]
  misc_feature (1)..(210): Homolog of NCBI NO: 13898655 NR Description: expansin [Prunus cerasus]
  misc_feature (1)..(210): Homolog of NCBI NO: 38046726 NR Description: alpha-expansin 1 [Populus tremula x Populus
  misc_feature (1)..(210): Homolog of NCBI NO: 20502786 NR Description: expansin 12 precursor [Rumex palustris]
  misc_feature (1)..(210): Homolog of NCBI NO: 13898655 NR Description: expansin [Prunus cerasus]
  misc_feature (1)..(210): Homolog of NCBI NO: 15227005 NR Description: expansin, putative
  misc_feature (1)..(210): Homolog of NCBI NO: 21553904 NR Description: expansin AtEx6 [Arabidopsis thaliana]
  misc_feature (1)..(210): Homolog of NCBI NO: 20138197 NR Description: Alpha-expansin 6 precursor (At-EXP6) (AtEx6)
  misc_feature (1)..(210): Homolog of NCBI NO: 7488487 NR Description: probable expansin precursor - rape
  misc_feature (1)..(210): Homolog of NCBI NO: 29466643 NR Description: expansin [Prunus persica]
  misc_feature (1)..(210): Homolog of NCBI NO: 20502784 NR Description: expansin 11 precursor [Rumex palustris]
  misc_feature (1)..(210): Homolog of NCBI NO: 20502782 NR Description: expansin 10 precursor [Rumex palustris]
  misc_feature (1)..(210): Homolog of NCBI NO: 29466643 NR Description: expansin [Prunus persica]
  misc_feature (1)..(210): Homolog of NCBI NO: 7488487 NR Description: probable expansin precursor - rape
  misc_feature (1)..(210): Homolog of NCBI NO: 20138197 NR Description: Alpha-expansin 6 precursor (At-EXP6) (AtEx6)
  misc_feature (1)..(210): Homolog of NCBI NO: 21553904 NR Description: expansin AtEx6 [Arabidopsis thaliana]
  misc_feature (1)..(210): Homolog of NCBI NO: 15227005 NR Description: expansin, putative

SEQ ID NO: 34082 - DNA, 669 bp, Arabidopsis thaliana; identical to SEQ ID NO: 30492
  misc_feature (1)..(669): Ceres Seq. ID no. 12340323
  misc_feature: MA Experiment ID: 108434 Result: Down-regulated in Transcription
  misc_feature: MA Experiment 108434 PARAMETER Experiment Name: At_Root_Tips_cDNA_P Parameter: Tissue Value: Root Tips
  misc_feature: MA Experiment ID: 108469 Result: Up-regulated in Transcription
  misc_feature: MA Experiment ID: 108488 Result: Down-regulated in Transcription
  misc_feature: MA Experiment ID: 108501 Result: Down-regulated in Transcription
  misc_feature: MA Experiment 108501 PARAMETER Experiment Name: At_ap2_floral_buds_cDNA_P Parameter: Plant Line Value: ap2 (Ler.)
  misc_feature: MA Experiment 108501 PARAMETER Experiment Name: At_ap2_floral_buds_cDNA_P Parameter: Tissue Value: Closed Flower
  misc_feature: MA Experiment ID: 108561 Result: Up-regulated in Transcription
  misc_feature: MA Experiment 108561 PARAMETER Experiment Name: At_100uM_ABA_cDNA_P Parameter: Timepoint (hr) Value: 6
  misc_feature: MA Experiment 108561 PARAMETER Experiment Name: At_100uM_ABA_cDNA_P Parameter: Tissue Value: Aerial
  misc_feature: MA Experiment 108561 PARAMETER Experiment Name: At_100uM_ABA_cDNA_P Parameter: Treatment Value: 100uM ABA vs. No Treatment
  misc_feature: MA Experiment ID: 108573 Result: Up-regulated in Transcription
  misc_feature: MA Experiment 108573 PARAMETER Experiment Name: At_Drought_cDNA_P Parameter: Timepoint (hr) Value: 6
  misc_feature: MA Experiment 108573 PARAMETER Experiment Name: At_Drought_cDNA_P Parameter: Tissue Value: Aerial
  misc_feature: MA Experiment 108573 PARAMETER Experiment Name: At_Drought_cDNA_P Parameter: Treatment Value: Drought vs. No Drought
  misc_feature: MA Experiment ID: 108576 Result: Up-regulated in Transcription
  misc_feature: MA Experiment 108576 PARAMETER Experiment Name: At_42deg_Heat_cDNA_P Parameter: Temperature (deg C) Value: 42 vs. 22
  misc_feature: MA Experiment 108576 PARAMETER Experiment Name: At_42deg_Heat_cDNA_P Parameter: Timepoint (hr) Value: 1
  misc_feature: MA Experiment 108576 PARAMETER Experiment Name: At_42deg_Heat_cDNA_P Parameter: Tissue Value: Aerial
  misc_feature: MA Experiment ID: 108579 Result: Down-regulated in Transcription
  misc_feature: MA Experiment 108579 PARAMETER Experiment Name: At_4deg_Cold_cDNA_P Parameter: Temperature (deg C) Value: 4 vs. 22
  misc_feature: MA Experiment 108579 PARAMETER Experiment Name: At_4deg_Cold_cDNA_P Parameter: Timepoint (hr) Value: 6
  misc_feature: MA Experiment 108579 PARAMETER Experiment Name: At_4deg_Cold_cDNA_P Parameter: Tissue Value: Aerial
  misc_feature: MA Experiment ID: 108585 Result: Up-regulated in Transcription
  misc_feature: MA Experiment 108585 PARAMETER Experiment Name: At_5mM_NaNP_cDNA_P Parameter: Timepoint (hr) Value: 6
  misc_feature: MA Experiment 108585 PARAMETER Experiment Name: At_5mM_NaNP_cDNA_P Parameter: Tissue Value: Aerial
  misc_feature: MA Experiment 108585 PARAMETER Experiment Name: At_5mM_NaNP_cDNA_P Parameter: Treatment Value: null
  misc_feature: MA Experiment ID: 108605 Result: Up-regulated in Transcription
  misc_feature: MA Experiment 108605 PARAMETER Experiment Name: At_100uM_ABA_cDNA_P Parameter: Timepoint (hr) Value: 6
  misc_feature: MA Experiment 108605 PARAMETER Experiment Name: At_100uM_ABA_cDNA_P Parameter: Tissue Value: Aerial
  misc_feature: MA Experiment 108605 PARAMETER Experiment Name: At_100uM_ABA_cDNA_P Parameter: Treatment Value: 100uM ABA vs. No Treatment
  misc_feature: MA Experiment ID: 108607 Result: Up-regulated in Transcription
  misc_feature: MA Experiment 108607 PARAMETER Experiment Name: At_100uM_ABA_cDNA_P Parameter: Timepoint (hr) Value: 4
  misc_feature: MA Experiment 108607 PARAMETER Experiment Name: At_100uM_ABA_cDNA_P Parameter: Tissue Value: Aerial
  misc_feature: MA Experiment 108607 PARAMETER Experiment Name: At_100uM_ABA_cDNA_P Parameter: Treatment Value: 100uM ABA vs. No Treatment
  misc_feature: MA Experiment ID: 108668 Result: Up-regulated in Transcription
  misc_feature: MA Experiment 108668 PARAMETER Experiment Name: At_2mM_SA_cDNA_P Parameter: Plant Line Value: WS
  misc_feature: MA Experiment 108668 PARAMETER Experiment Name: At_2mM_SA_cDNA_P Parameter: Timepoint (hr) Value: 6
  misc_feature: MA Experiment 108668 PARAMETER Experiment Name: At_2mM_SA_cDNA_P Parameter: Treatment Value: 2mM SA vs. No Treatment
  misc_feature: MA Experiment ID: 20000069 Result: Up-regulated in Transcription
  misc_feature: MA Experiment 20000069 PARAMETER Experiment Name: At_100uM_ABA_Mutants_cDNA_P Parameter: Plant Line Value: CS23
  misc_feature: MA Experiment 20000069 PARAMETER Experiment Name: At_100uM_ABA_Mutants_cDNA_P Parameter: Timepoint (hr) Value: 6
  misc_feature: MA Experiment 20000069 PARAMETER Experiment Name: At_100uM_ABA_Mutants_cDNA_P Parameter: Tissue Value: Aerial
  misc_feature: MA Experiment 20000069 PARAMETER Experiment Name: At_100uM_ABA_Mutants_cDNA_P Parameter: Treatment Value: 100uM ABA vs. No Treatment
  misc_feature: MA Experiment ID: 20000070 Result: Up-regulated in Transcription
  misc_feature: MA Experiment 20000070 PARAMETER Experiment Name: At_100uM_ABA_Mutants_cDNA_P Parameter: Plant Line Value: CS24
  misc_feature: MA Experiment 20000070 PARAMETER Experiment Name: At_100uM_ABA_Mutants_cDNA_P Parameter: Timepoint (hr) Value: 6
  misc_feature: MA Experiment 20000070 PARAMETER Experiment Name: At_100uM_ABA_Mutants_cDNA_P Parameter: Tissue Value: Aerial
  misc_feature: MA Experiment 20000070 PARAMETER Experiment Name: At_100uM_ABA_Mutants_cDNA_P Parameter: Treatment Value: 100uM ABA vs. No Treatment
  misc_feature: MA Experiment ID: 20000071 Result: Up-regulated in Transcription
  misc_feature: MA Experiment 20000071 PARAMETER Experiment Name: At_100uM_ABA_Mutants_cDNA_P Parameter: Plant Line Value: CS8104
  misc_feature: MA Experiment 20000071 PARAMETER Experiment Name: At_100uM_ABA_Mutants_cDNA_P Parameter: Timepoint (hr) Value: 6
  misc_feature: MA Experiment 20000071 PARAMETER Experiment Name: At_100uM_ABA_Mutants_cDNA_P Parameter: Tissue Value: Aerial
  misc_feature: MA Experiment 20000071 PARAMETER Experiment Name: At_100uM_ABA_Mutants_cDNA_P Parameter: Treatment Value: 100uM ABA vs. No Treatment
  misc_feature: MA Experiment ID: 20000072 Result: Up-regulated in Transcription
  misc_feature: MA Experiment 20000072 PARAMETER Experiment Name: At_100uM_ABA_Mutants_cDNA_P Parameter: Plant Line Value: CS8105
  misc_feature: MA Experiment 20000072 PARAMETER Experiment Name: At_100uM_ABA_Mutants_cDNA_P Parameter: Timepoint (hr) Value: 6
  misc_feature: MA Experiment 20000072 PARAMETER Experiment Name: At_100uM_ABA_Mutants_cDNA_P Parameter: Tissue Value: Aerial
  misc_feature: MA Experiment 20000072 PARAMETER Experiment Name: At_100uM_ABA_Mutants_cDNA_P Parameter: Treatment Value: 100uM ABA vs. No Treatment
  misc_feature: MA Experiment ID: 20000086 Result: Up-regulated in Transcription
  misc_feature: MA Experiment 20000086 PARAMETER Experiment Name: At_100uM_ABA_Mutants_cDNA_P Parameter: Plant Line Value: CS22
  misc_feature: MA Experiment 20000086 PARAMETER Experiment Name: At_100uM_ABA_Mutants_cDNA_P Parameter: Timepoint (hr) Value: 6
  misc_feature: MA Experiment 20000086 PARAMETER Experiment Name: At_100uM_ABA_Mutants_cDNA_P Parameter: Tissue Value: Aerial
  misc_feature: MA Experiment 20000086 PARAMETER Experiment Name: At_100uM_ABA_Mutants_cDNA_P Parameter: Treatment Value: 100uM ABA vs. No Treatment
  misc_feature: MA Experiment ID: 20000087 Result: Up-regulated in Transcription
  misc_feature: MA Experiment 20000087 PARAMETER Experiment Name: At_100uM_ABA_Mutants_cDNA_P Parameter: Plant Line Value: WS
  misc_feature: MA Experiment 20000087 PARAMETER Experiment Name: At_100uM_ABA_Mutants_cDNA_P Parameter: Timepoint (hr) Value: 6
  misc_feature: MA Experiment 20000087 PARAMETER Experiment Name: At_100uM_ABA_Mutants_cDNA_P Parameter: Tissue Value: Aerial
  misc_feature: MA Experiment 20000087 PARAMETER Experiment Name: At_100uM_ABA_Mutants_cDNA_P Parameter: Treatment Value: 100uM ABA vs. No Treatment
  misc_feature: MA Experiment ID: 20000088 Result: Up-regulated in Transcription
  misc_feature: MA Experiment 20000088 PARAMETER Experiment Name: At_100uM_ABA_Mutants_cDNA_P Parameter: Plant Line Value: Landsberg
  misc_feature: MA Experiment 20000088 PARAMETER Experiment Name: At_100uM_ABA_Mutants_cDNA_P Parameter: Timepoint (hr) Value: 6
  misc_feature: MA Experiment 20000088 PARAMETER Experiment Name: At_100uM_ABA_Mutants_cDNA_P Parameter: Tissue Value: Aerial
  misc_feature: MA Experiment 20000088 PARAMETER Experiment Name: At_100uM_ABA_Mutants_cDNA_P Parameter: Treatment Value: 100uM ABA vs. No Treatment
  misc_feature: MA Experiment ID: 20000111 Result: Up-regulated in Transcription
  misc_feature: MA Experiment 20000111 PARAMETER Experiment Name: At_42deg_Heat_cDNA_P Parameter: Temperature (deg C) Value: 42 vs. 22
  misc_feature: MA Experiment 20000111 PARAMETER Experiment Name: At_42deg_Heat_cDNA_P Parameter: Timepoint (hr) Value: 6
  misc_feature: MA Experiment 20000111 PARAMETER Experiment Name: At_42deg_Heat_cDNA_P Parameter: Tissue Value: Aerial
  misc_feature: MA Experiment ID: 20000112 Result: Up-regulated in Transcription
  misc_feature: MA Experiment 20000112 PARAMETER Experiment Name: At_42deg_Heat_cDNA_P Parameter: Temperature (deg C) Value: 42 vs. 22
  misc_feature: MA Experiment 20000112 PARAMETER Experiment Name: At_42deg_Heat_cDNA_P Parameter: Timepoint (hr) Value: 2
  misc_feature: MA Experiment 20000112 PARAMETER Experiment Name: At_42deg_Heat_cDNA_P Parameter: Tissue Value: Aerial
  misc_feature: MA Experiment ID: 20000117 Result: Up-regulated in Transcription
  misc_feature: MA Experiment 20000117 PARAMETER Experiment Name: At_100uM_ABA_Mutants_cDNA_P Parameter: Plant Line Value: Columbia
  misc_feature: MA Experiment 20000117 PARAMETER Experiment Name: At_100uM_ABA_Mutants_cDNA_P Parameter: Timepoint (hr) Value: 6
  misc_feature: MA Experiment 20000117 PARAMETER Experiment Name: At_100uM_ABA_Mutants_cDNA_P Parameter: Tissue Value: Aerial
  misc_feature: MA Experiment 20000117 PARAMETER Experiment Name: At_100uM_ABA_Mutants_cDNA_P Parameter: Treatment Value: 100uM ABA vs. No Treatment
  misc_feature: MA Experiment ID: 20000144 Result: Up-regulated in Transcription
  misc_feature: MA Experiment 20000144 PARAMETER Experiment Name: At_42deg_Heat_cDNA_P Parameter: Temperature (deg C) Value: 42 vs. 22
  misc_feature: MA Experiment 20000144 PARAMETER Experiment Name: At_42deg_Heat_cDNA_P Parameter: Timepoint (hr) Value: 1
  misc_feature: MA Experiment 20000144 PARAMETER Experiment Name: At_42deg_Heat_cDNA_P Parameter: Tissue Value: Aerial
  misc_feature: MA Experiment ID: 20000169 Result: Up-regulated in Transcription
  misc_feature: MA Experiment 20000169 PARAMETER Experiment Name: At_100uM_ABA_P Parameter: Age (day) Value: 14
  misc_feature: MA Experiment 20000169 PARAMETER Experiment Name: At_100uM_ABA_P Parameter: Organism Value: A. thaliana
  misc_feature: MA Experiment 20000169 PARAMETER Experiment Name: At_100uM_ABA_P Parameter: Plant Line Value: WS
  misc_feature: MA Experiment 20000169 PARAMETER Experiment Name: At_100uM_ABA_P Parameter: Timepoint (hr) Value: 6
  misc_feature: MA Experiment 20000169 PARAMETER Experiment Name: At_100uM_ABA_P Parameter: Tissue Value: Aerial
  misc_feature: MA Experiment 20000169 PARAMETER Experiment Name: At_100uM_ABA_P Parameter: Treatment Value: 100uM ABA vs. No Treatment
  misc_feature: MA Experiment ID: 20000171 Result: Up-regulated in Transcription
  misc_feature: MA Experiment 20000171 PARAMETER Experiment Name: At_42deg_Heat_P Parameter: Age (day) Value: 14
  misc_feature: MA Experiment 20000171 PARAMETER Experiment Name: At_42deg_Heat_P Parameter: Organism Value: A. thaliana
  misc_feature: MA Experiment 20000171 PARAMETER Experiment Name: At_42deg_Heat_P Parameter: Plant Line Value: WS
  misc_feature: MA Experiment 20000171 PARAMETER Experiment Name: At_42deg_Heat_P Parameter: Temperature (deg C) Value: 42 vs. 22
  misc_feature: MA Experiment 20000171 PARAMETER Experiment Name: At_42deg_Heat_P Parameter: Timepoint (hr) Value: 1
  misc_feature: MA Experiment 20000171 PARAMETER Experiment Name: At_42deg_Heat_P Parameter: Tissue Value: Aerial
  misc_feature: MA Experiment ID: 20000182 Result: Up-regulated in Transcription
  misc_feature: MA Experiment 20000182 PARAMETER Experiment Name: At_2mM_SA_P Parameter: Age (day) Value: 14
  misc_feature: MA Experiment 20000182 PARAMETER Experiment Name: At_2mM_SA_P Parameter: Organism Value: A. thaliana
  misc_feature: MA Experiment 20000182 PARAMETER Experiment Name: At_2mM_SA_P Parameter: Plant Line Value: WS
  misc_feature: MA Experiment 20000182 PARAMETER Experiment Name: At_2mM_SA_P Parameter: Timepoint (hr) Value: 6
  misc_feature: MA Experiment 20000182 PARAMETER Experiment Name: At_2mM_SA_P Parameter: Tissue Value: Aerial
  misc_feature: MA Experiment 20000182 PARAMETER Experiment Name: At_2mM_SA_P Parameter: Treatment Value: 2mM SA vs. No Treatment
  misc_feature: MA Experiment ID: 20000224 Result: Down-regulated in Transcription
  misc_feature: MA Experiment ID: 20000234 Result: Down-regulated in Transcription
  misc_feature: MA Experiment 20000234 PARAMETER Experiment Name: At_Siliques_P Parameter: Age (day) Value: 21
  misc_feature: MA Experiment 20000234 PARAMETER Experiment Name: At_Siliques_P Parameter: Organism Value: A. thaliana
  misc_feature: MA Experiment 20000234 PARAMETER Experiment Name: At_Siliques_P Parameter: Plant Line Value: WS
  misc_feature: MA Experiment 20000234 PARAMETER Experiment Name: At_Siliques_P Parameter: Tissue Value: Less Than 5mm Siliques vs. Whole Plant
  misc_feature: MA Experiment ID: 20000235 Result: Down-regulated in Transcription
  misc_feature: MA Experiment 20000235 PARAMETER Experiment Name: At_Siliques_P Parameter: Age (day) Value: 21
  misc_feature: MA Experiment 20000235 PARAMETER Experiment Name: At_Siliques_P Parameter: Organism Value: A. thaliana
  misc_feature: MA Experiment 20000235 PARAMETER Experiment Name: At_Siliques_P Parameter: Plant Line Value: WS
  misc_feature: MA Experiment 20000235 PARAMETER Experiment Name: At_Siliques_P Parameter: Tissue Value: 5-10mm Siliques vs. Whole Plant
  misc_feature: MA Experiment ID: 20000437 Result: Up-regulated in Transcription
  misc_feature: MA Experiment 20000437 PARAMETER Experiment Name: At_Drought_P Parameter: Age (day) Value: 8
  misc_feature: MA Experiment 20000437 PARAMETER Experiment Name: At_Drought_P Parameter: Organism Value: A. thaliana
  misc_feature: MA Experiment 20000437 PARAMETER Experiment Name: At_Drought_P Parameter: Plant Line Value: WS
  misc_feature: MA Experiment 20000437 PARAMETER Experiment Name: At_Drought_P Parameter: Timepoint (hr) Value: 24
  misc_feature: MA Experiment 20000437 PARAMETER Experiment Name: At_Drought_P Parameter: Tissue Value: Whole Plant
  misc_feature: MA Experiment 20000437 PARAMETER Experiment Name: At_Drought_P Parameter: Treatment Value: Drought vs. No Drought
  misc_feature: MA Experiment ID: 20000453 Result: Up-regulated in Transcription
  misc_feature: MA Experiment 20000453 PARAMETER Experiment Name: At_100uM_ABA_P Parameter: Age (day) Value: 15
  misc_feature: MA Experiment 20000453 PARAMETER Experiment Name: At_100uM_ABA_P Parameter: Organism Value: A. thaliana
  misc_feature: MA Experiment 20000453 PARAMETER Experiment Name: At_100uM_ABA_P Parameter: Plant Line Value: WS
  misc_feature: MA Experiment 20000453 PARAMETER Experiment Name: At_100uM_ABA_P Parameter: Timepoint (hr) Value: 24
  misc_feature: MA Experiment 20000453 PARAMETER Experiment Name: At_100uM_ABA_P Parameter: Tissue Value: Aerial
  misc_feature: MA Experiment 20000453 PARAMETER Experiment Name: At_100uM_ABA_P Parameter: Treatment Value: 100uM ABA vs. No Treatment
  misc_feature: MA Experiment ID: 20000794 Result: Up-regulated in Transcription
  misc_feature: MA Experiment 20000794 PARAMETER Experiment Name: At_Petals_P Parameter: Age (day) Value: 23-25 days
  misc_feature: MA Experiment 20000794 PARAMETER Experiment Name: At_Petals_P Parameter: Plant Line Value: WS
  misc_feature: MA Experiment 20000794 PARAMETER Experiment Name: At_Petals_P Parameter: Tissue Value: Petals vs. Whole plant
  misc_feature: MA Experiment ID: 20001450 Result: Up-regulated in Transcription
  misc_feature: MA Experiment 20001450 PARAMETER Experiment Name: At_Far-red-induction_P Parameter: Age (day) Value: 7
  misc_feature: MA Experiment 20001450 PARAMETER Experiment Name: At_Far-red-induction_P Parameter: Light Value: Far-red vs. White
  misc_feature: MA Experiment 20001450 PARAMETER Experiment Name: At_Far-red-induction_P Parameter: Organism Value: A. thaliana
  misc_feature: MA Experiment 20001450 PARAMETER Experiment Name: At_Far-red-induction_P Parameter: Plant Line Value: Columbia
  misc_feature: MA Experiment 20001450 PARAMETER Experiment Name: At_Far-red-induction_P Parameter: Timepoint (hr) Value: 8
  misc_feature: MA Experiment 20001450 PARAMETER Experiment Name: At_Far-red-induction_P Parameter: Tissue Value: Whole Plant
  misc_feature: MA Experiment ID: 20001451 Result: Up-regulated in Transcription
  misc_feature: MA Experiment 20001451 PARAMETER Experiment Name: At_Far-red-induction_P Parameter: Age (day) Value: 7
  misc_feature: MA Experiment 20001451 PARAMETER Experiment Name: At_Far-red-induction_P Parameter: Light Value: Far-red vs. White
  misc_feature: MA Experiment 20001451 PARAMETER Experiment Name: At_Far-red-induction_P Parameter: Organism Value: A. thaliana
  misc_feature: MA Experiment 20001451 PARAMETER Experiment Name: At_Far-red-induction_P Parameter: Plant Line Value: Columbia
  misc_feature: MA Experiment 20001451 PARAMETER Experiment Name: At_Far-red-induction_P Parameter: Timepoint (hr) Value: 24
  misc_feature: MA Experiment 20001451 PARAMETER Experiment Name: At_Far-red-induction_P Parameter: Tissue Value: Whole Plant
  misc_feature: MA Experiment ID: 20001557 Result: Down-regulated in Transcription
  misc_feature: MA Experiment 20001557 PARAMETER Experiment Name: At_Drought_Soil_Dry_P Parameter: Age (day) Value: 27
  misc_feature: MA Experiment 20001557 PARAMETER Experiment Name: At_Drought_Soil_Dry_P Parameter: Organism Value: A. thaliana
  misc_feature: MA Experiment 20001557 PARAMETER Experiment Name: At_Drought_Soil_Dry_P Parameter: Plant Line Value: WS
  misc_feature: MA Experiment 20001557 PARAMETER Experiment Name: At_Drought_Soil_Dry_P Parameter: Post Timepoint (hr) Value: 3
  misc_feature: MA Experiment 20001557 PARAMETER Experiment Name: At_Drought_Soil_Dry_P Parameter: Post-Treatment Value: Re-Water vs. No Drought
  misc_feature: MA Experiment 20001557 PARAMETER Experiment Name: At_Drought_Soil_Dry_P Parameter: Timepoint (day) Value: 13
  misc_feature: MA Experiment 20001557 PARAMETER Experiment Name: At_Drought_Soil_Dry_P Parameter: Treatment Value: Drought vs. No Drought
  misc_feature: MA Experiment ID: 20001558 Result: Down-regulated in Transcription
  misc_feature: MA Experiment 20001558 PARAMETER Experiment Name: At_Drought_Soil_Dry_P Parameter: Age (day) Value: 27
  misc_feature: MA Experiment 20001558 PARAMETER Experiment Name: At_Drought_Soil_Dry_P Parameter: Organism Value: A. thaliana
  misc_feature: MA Experiment 20001558 PARAMETER Experiment Name: At_Drought_Soil_Dry_P Parameter: Plant Line Value: WS
  misc_feature: MA Experiment 20001558 PARAMETER Experiment Name: At_Drought_Soil_Dry_P Parameter: Post Timepoint (hr) Value: 6
  misc_feature: MA Experiment 20001558 PARAMETER Experiment Name: At_Drought_Soil_Dry_P Parameter: Post-Treatment Value: Re-Water vs. No Drought
  misc_feature: MA Experiment 20001558 PARAMETER Experiment Name: At_Drought_Soil_Dry_P Parameter: Timepoint (day) Value: 13
  misc_feature: MA Experiment 20001558 PARAMETER Experiment Name: At_Drought_Soil_Dry_P Parameter: Treatment Value: Drought vs. No Drought
  misc_feature: MA Experiment ID: 20001904 Result: Up-regulated in Transcription
  misc_feature: MA Experiment 20001904 PARAMETER Experiment Name: At_Drought_Reproduction_P Parameter: Age (day) Value: 37
  misc_feature: MA Experiment 20001904 PARAMETER Experiment Name: At_Drought_Reproduction_P Parameter: Organism Value: A. thaliana
  misc_feature: MA Experiment 20001904 PARAMETER Experiment Name: At_Drought_Reproduction_P Parameter: Plant Line Value: WS
  misc_feature: MA Experiment 20001904 PARAMETER Experiment Name: At_Drought_Reproduction_P Parameter: Timepoint (day) Value: 7
  misc_feature: MA Experiment 20001904 PARAMETER Experiment Name: At_Drought_Reproduction_P Parameter: Tissue Value: Rosettes
  misc_feature: MA Experiment 20001904 PARAMETER Experiment Name: At_Drought_Reproduction_P Parameter: Treatment Value: Drought vs. No Drought

SEQ ID NO: 34083 - protein, 78 aa, Arabidopsis thaliana; identical to SEQ ID NO: 30493
  peptide (1)..(78): Ceres Seq. ID no. 12340324
  misc_feature (19)..(60): Homolog of NCBI NO: 7487830 NR Description: hypothetical protein T8O5.180 - Arabidopsis
  misc_feature (48)..(78): Homolog of NCBI NO: 7446944 NR Description: hypothetical protein F8K4.23 - Arabidopsis
  misc_feature (48)..(78): Homolog of NCBI NO: 38344173 NR Description: OSJNBa0053K19.12 [Oryza sativa (japonica
  misc_feature (48)..(78): Homolog of NCBI NO: 40253647 NR Description: putative microtubial binding protein
  misc_feature (48)..(78): Homolog of NCBI NO: 34595981 NR Description: microtubule-associated protein 1 light chain 3
  misc_feature (63)..(78): Homolog of NCBI NO: 11279074 NR Description: symbiosis-related like protein - Arabidopsis
  misc_feature (48)..(78): Homolog of NCBI NO: 15233593 NR Description: putative symbiosis-related protein
  misc_feature (48)..(78): Homolog of NCBI NO: 21553487 NR Description: symbiosis-related like protein [Arabidopsis
  misc_feature (48)..(78): Homolog of NCBI NO: 18415813 NR Description: symbiosis-related like protein

SEQ ID NO: 34084 - protein, 42 aa, Arabidopsis thaliana; identical to SEQ ID NO: 30494
  peptide (1)..(42): Ceres Seq. ID no. 12340325

SEQ ID NO: 34085 - DNA, 612 bp, Arabidopsis thaliana; identical to SEQ ID NO: 30495
  misc_feature (1)..(612): Ceres Seq. ID no. 12325571
  misc_feature: MA Experiment ID: 108434 Result: Down-regulated in Transcription
  misc_feature: MA Experiment 108434 PARAMETER Experiment Name: At_Root_Tips_cDNA_P Parameter: Tissue Value: Root Tips
  misc_feature: MA Experiment ID: 108462 Result: Up-regulated in Transcription
  misc_feature: MA Experiment 108462 PARAMETER Experiment Name: At_Germinating_Seeds_cDNA_P Parameter: Age (day) Value: 2 vs. 0
  misc_feature: MA Experiment 108462 PARAMETER Experiment Name: At_Germinating_Seeds_cDNA_P Parameter: Tissue Value: Germinating Seeds
  misc_feature: MA Experiment ID: 108464 Result: Up-regulated in Transcription
  misc_feature: MA Experiment 108464 PARAMETER Experiment Name: At_Germinating_Seeds_cDNA_P Parameter: Age (day) Value: 4 vs. 0
  misc_feature: MA Experiment 108464 PARAMETER Experiment Name: At_Germinating_Seeds_cDNA_P Parameter: Tissue Value: Germinating Seeds
  misc_feature: MA Experiment ID: 108573 Result: Down-regulated in Transcription
  misc_feature: MA Experiment 108573 PARAMETER Experiment Name: At_Drought_cDNA_P Parameter: Timepoint (hr) Value: 6
  misc_feature: MA Experiment 108573 PARAMETER Experiment Name: At_Drought_cDNA_P Parameter: Tissue Value: Aerial
  misc_feature: MA Experiment 108573 PARAMETER Experiment Name: At_Drought_cDNA_P Parameter: Treatment Value: Drought vs. No Drought
  misc_feature: MA Experiment ID: 20000111 Result: Down-regulated in Transcription
  misc_feature: MA Experiment 20000111 PARAMETER Experiment Name: At_42deg_Heat_cDNA_P Parameter: Temperature (deg C) Value: 42 vs. 22
  misc_feature: MA Experiment 20000111 PARAMETER Experiment Name: At_42deg_Heat_cDNA_P Parameter: Timepoint (hr) Value: 6
  misc_feature: MA Experiment 20000111 PARAMETER Experiment Name: At_42deg_Heat_cDNA_P Parameter: Tissue Value: Aerial
  misc_feature: MA Experiment ID: 20000112 Result: Down-regulated in Transcription
  misc_feature: MA Experiment 20000112 PARAMETER Experiment Name: At_42deg_Heat_cDNA_P Parameter: Temperature (deg C) Value: 42 vs. 22
  misc_feature: MA Experiment 20000112 PARAMETER Experiment Name: At_42deg_Heat_cDNA_P Parameter: Timepoint (hr) Value: 2
  misc_feature: MA Experiment 20000112 PARAMETER Experiment Name: At_42deg_Heat_cDNA_P Parameter: Tissue Value: Aerial
  misc_feature: MA Experiment ID: 20000144 Result: Down-regulated in Transcription
  misc_feature: MA Experiment 20000144 PARAMETER Experiment Name: At_42deg_Heat_cDNA_P Parameter: Temperature (deg C) Value: 42 vs. 22
  misc_feature: MA Experiment 20000144 PARAMETER Experiment Name: At_42deg_Heat_cDNA_P Parameter: Timepoint (hr) Value: 1
  misc_feature: MA Experiment 20000144 PARAMETER Experiment Name: At_42deg_Heat_cDNA_P Parameter: Tissue Value: Aerial
  misc_feature: MA Experiment ID: 20000171 Result: Down-regulated in Transcription
  misc_feature: MA Experiment 20000171 PARAMETER Experiment Name: At_42deg_Heat_P Parameter: Age (day) Value: 14
  misc_feature: MA Experiment 20000171 PARAMETER Experiment Name: At_42deg_Heat_P Parameter: Organism Value: A. thaliana
  misc_feature: MA Experiment 20000171 PARAMETER Experiment Name: At_42deg_Heat_P Parameter: Plant Line Value: WS
  misc_feature: MA Experiment 20000171 PARAMETER Experiment Name: At_42deg_Heat_P Parameter: Temperature (deg C) Value: 42 vs. 22
  misc_feature: MA Experiment 20000171 PARAMETER Experiment Name: At_42deg_Heat_P Parameter: Timepoint (hr) Value: 1
  misc_feature: MA Experiment 20000171 PARAMETER Experiment Name: At_42deg_Heat_P Parameter: Tissue Value: Aerial
  misc_feature: MA Experiment ID: 20000173 Result: Down-regulated in Transcription
  misc_feature: MA Experiment 20000173 PARAMETER Experiment Name: At_42deg_Heat_P Parameter: Age (day) Value: 14
  misc_feature: MA Experiment 20000173 PARAMETER Experiment Name: At_42deg_Heat_P Parameter: Organism Value: A. thaliana
  misc_feature: MA Experiment 20000173 PARAMETER Experiment Name: At_42deg_Heat_P Parameter: Plant Line Value: WS
  misc_feature: MA Experiment 20000173 PARAMETER Experiment Name: At_42deg_Heat_P Parameter: Temperature (deg C) Value: 42 vs. 22
  misc_feature: MA Experiment 20000173 PARAMETER Experiment Name: At_42deg_Heat_P Parameter: Timepoint (hr) Value: 6
  misc_feature: MA Experiment 20000173 PARAMETER Experiment Name: At_42deg_Heat_P Parameter: Tissue Value: Aerial
  misc_feature: MA Experiment ID: 20000234 Result: Up-regulated in Transcription
  misc_feature: MA Experiment 20000234 PARAMETER Experiment Name: At_Siliques_P Parameter: Age (day) Value: 21
  misc_feature: MA Experiment 20000234 PARAMETER Experiment Name: At_Siliques_P Parameter: Organism Value: A. thaliana
  misc_feature: MA Experiment 20000234 PARAMETER Experiment Name: At_Siliques_P Parameter: Plant Line Value: WS
  misc_feature: MA Experiment 20000234 PARAMETER Experiment Name: At_Siliques_P Parameter: Tissue Value: Less Than 5mm Siliques vs. Whole Plant
  misc_feature: MA Experiment ID: 20000794 Result: Down-regulated in Transcription
  misc_feature: MA Experiment 20000794 PARAMETER Experiment Name: At_Petals_P Parameter: Age (day) Value: 23-25 days
  misc_feature: MA Experiment 20000794 PARAMETER Experiment Name: At_Petals_P Parameter: Plant Line Value: WS
  misc_feature: MA Experiment 20000794 PARAMETER Experiment Name: At_Petals_P Parameter: Tissue Value: Petals vs. Whole plant
  misc_feature: MA Experiment ID: 20001911 Result: Down-regulated in Transcription
  misc_feature: MA Experiment 20001911 PARAMETER Experiment Name: At_Drought_Reproduction_P Parameter: Age (day) Value: 40
  misc_feature: MA Experiment 20001911 PARAMETER Experiment Name: At_Drought_Reproduction_P Parameter: Organism Value: A. thaliana
  misc_feature: MA Experiment 20001911 PARAMETER Experiment Name: At_Drought_Reproduction_P Parameter: Plant Line Value: WS
  misc_feature: MA Experiment 20001911 PARAMETER Experiment Name: At_Drought_Reproduction_P Parameter: Timepoint (day) Value: 10
  misc_feature: MA Experiment 20001911 PARAMETER Experiment Name: At_Drought_Reproduction_P Parameter: Tissue Value: Flowers
  misc_feature: MA Experiment 20001911 PARAMETER Experiment Name: At_Drought_Reproduction_P Parameter: Treatment Value: Drought vs. No Drought

SEQ ID NO: 34086 - protein, 113 aa, Arabidopsis thaliana; identical to SEQ ID NO: 30496
  peptide (1)..(113): Ceres Seq. ID no. 12325572
  misc_feature (42)..(106): Pfam Name: Rapid ALkalinization Factor (RALF) Pfam Description: Rapid ALkalinization Factor (RALF)
  misc_feature (42)..(104): Homolog of NCBI NO: 34902918 NR Description: unnamed protein product [Oryza sativa (japonica
  misc_feature (7)..(106): Homolog of NCBI NO: 15217877 NR Description: hypothetical protein; protein id: At1g28270.1
  misc_feature (41)..(104): Homolog of NCBI NO: 15218637 NR Description: hypothetical protein; protein id: At1g02900.1
  misc_feature (41)..(106): Homolog of NCBI NO: 18401177 NR Description: expressed protein
  misc_feature (41)..(106): Homolog of NCBI NO: 18397246 NR Description: expressed protein
  misc_feature (5)..(106): Homolog of NCBI NO: 18414528 NR Description: Expressed protein
  misc_feature (1)..(113): Homolog of NCBI NO: 18403901 NR Description: Expressed protein
  misc_feature (1)..(62): Homolog of NCBI NO: 7459901 NR Description: hypothetical protein DL3015C - Arabidopsis
  misc_feature (1)..(113): Homolog of NCBI NO: 18414108 NR Description: expressed protein
  misc_feature (1)..(113): Homolog of NCBI NO: 21553907 NR Description: unknown [Arabidopsis thaliana]

SEQ ID NO: 34087 - protein, 80 aa, Arabidopsis thaliana; identical to SEQ ID NO: 30497
  peptide (1)..(80): Ceres Seq. ID no. 12325573
  misc_feature (9)..(73): Pfam Name: Rapid ALkalinization Factor (RALF) Pfam Description: Rapid ALkalinization Factor (RALF)
  misc_feature (9)..(71): Homolog of NCBI NO: 34902918 NR Description: unnamed protein product [Oryza sativa (japonica
  misc_feature (1)..(73): Homolog of NCBI NO: 15217877 NR Description: hypothetical protein; protein id: At1g28270.1
  misc_feature (8)..(71): Homolog of NCBI NO: 15218637 NR Description: hypothetical protein; protein id: At1g02900.1
  misc_feature (8)..(73): Homolog of NCBI NO: 18401177 NR Description: expressed protein
  misc_feature (8)..(73): Homolog of NCBI NO: 18397246 NR Description: expressed protein
  misc_feature (1)..(73): Homolog of NCBI NO: 18414528 NR Description: Expressed protein
  misc_feature (1)..(80): Homolog of NCBI NO: 18403901 NR Description: Expressed protein
  misc_feature (1)..(29): Homolog of NCBI NO: 7459901 NR Description: hypothetical protein DL3015C - Arabidopsis
  misc_feature (1)..(80): Homolog of NCBI NO: 18414108 NR Description: expressed protein
  misc_feature (1)..(80): Homolog of NCBI NO: 21553907 NR Description: unknown [Arabidopsis thaliana]

SEQ ID NO: 34088 - protein, 66 aa, Arabidopsis thaliana; identical to SEQ ID NO: 30498
  peptide (1)..(66): Ceres Seq. ID no. 12325574
  misc_feature (1)..(59): Pfam Name: Rapid ALkalinization Factor (RALF) Pfam Description: Rapid ALkalinization Factor (RALF)
  misc_feature (1)..(57): Homolog of NCBI NO: 34902918 NR Description: unnamed protein product [Oryza sativa (japonica
  misc_feature (1)..(59): Homolog of NCBI NO: 15217877 NR Description: hypothetical protein; protein id: At1g28270.1
  misc_feature (1)..(57): Homolog of NCBI NO: 15218637 NR Description: hypothetical protein; protein id: At1g02900.1
  misc_feature (1)..(59): Homolog of NCBI NO: 18401177 NR Description: expressed protein
  misc_feature (1)..(59): Homolog of NCBI NO: 18397246 NR Description: expressed protein
  misc_feature (1)..(59): Homolog of NCBI NO: 18414528 NR Description: Expressed protein
  misc_feature (1)..(66): Homolog of NCBI NO: 18403901 NR Description: Expressed protein
  misc_feature (1)..(15): Homolog of NCBI NO: 7459901 NR Description: hypothetical protein DL3015C - Arabidopsis
  misc_feature (1)..(66): Homolog of NCBI NO: 18414108 NR Description: expressed protein
  misc_feature (1)..(66): Homolog of NCBI NO: 21553907 NR Description: unknown [Arabidopsis thaliana]

SEQ ID NO: 34089 - DNA, 2535 bp, Arabidopsis thaliana; identical to SEQ ID NO: 30499
  misc_feature (1)..(2535): Ceres Seq. ID no. 12327659
  misc_feature: MA Experiment ID: 108434 Result: Down-regulated in Transcription
  misc_feature: MA Experiment 108434 PARAMETER Experiment Name: At_Root_Tips_cDNA_P Parameter: Tissue Value: Root Tips
  misc_feature: MA Experiment ID: 108469 Result: Up-regulated in Transcription
  misc_feature: MA Experiment ID: 20000070 Result: Up-regulated in Transcription
  misc_feature: MA Experiment 20000070 PARAMETER Experiment Name: At_100uM_ABA_Mutants_cDNA_P Parameter: Plant Line Value: CS24
  misc_feature: MA Experiment 20000070 PARAMETER Experiment Name: At_100uM_ABA_Mutants_cDNA_P Parameter: Timepoint (hr) Value: 6
  misc_feature: MA Experiment 20000070 PARAMETER Experiment Name: At_100uM_ABA_Mutants_cDNA_P Parameter: Tissue Value: Aerial
  misc_feature: MA Experiment 20000070 PARAMETER Experiment Name: At_100uM_ABA_Mutants_cDNA_P Parameter: Treatment Value: 100uM ABA vs. No Treatment
  misc_feature: MA Experiment ID: 20000180 Result: Down-regulated in Transcription
  misc_feature: MA Experiment 20000180 PARAMETER Experiment Name: At_Germinating_Seeds_P Parameter: Age (hr) Value: 24 vs. 0
  misc_feature: MA Experiment 20000180 PARAMETER Experiment Name: At_Germinating_Seeds_P Parameter: Tissue Value: Germinating Seeds
  misc_feature: MA Experiment ID: 20000264 Result: Down-regulated in Transcription
  misc_feature: MA Experiment 20000264 PARAMETER Experiment Name: At_Open_Flower_P Parameter: Age (day) Value: 21
  misc_feature: MA Experiment 20000264 PARAMETER Experiment Name: At_Open_Flower_P Parameter: Plant Line Value: WS
  misc_feature: MA Experiment 20000264 PARAMETER Experiment Name: At_Open_Flower_P Parameter: Tissue Value: Open Flower vs. Whole Plant
  misc_feature: MA Experiment ID: 20000265 Result: Down-regulated in Transcription
  misc_feature: MA Experiment 20000265 PARAMETER Experiment Name: At_Open_Flower_P Parameter: Age (day) Value: 21
  misc_feature: MA Experiment 20000265 PARAMETER Experiment Name: At_Open_Flower_P Parameter: Plant Line Value: WS
  misc_feature: MA Experiment 20000265 PARAMETER Experiment Name: At_Open_Flower_P Parameter: Tissue Value: Closed Flower vs. Whole Plant
  misc_feature: MA Experiment ID: 20000573 Result: Up-regulated in Transcription
  misc_feature: MA Experiment 20000573 PARAMETER Experiment Name: At_100uM_ABA_Mutants__P Parameter: Organism Value: A. thaliana
  misc_feature: MA Experiment 20000573 PARAMETER Experiment Name: At_100uM_ABA_Mutants__P Parameter: Plant Line Value: CS22 vs. Ler wt
  misc_feature: MA Experiment 20000573 PARAMETER Experiment Name: At_100uM_ABA_Mutants__P Parameter: Timepoint (hr) Value: N/A
  misc_feature: MA Experiment 20000573 PARAMETER Experiment Name: At_100uM_ABA_Mutants__P Parameter: Tissue Value: Whole Plant
  misc_feature: MA Experiment 20000573 PARAMETER Experiment Name: At_100uM_ABA_Mutants__P Parameter: Treatment Value: None
  misc_feature: MA Experiment ID: 20001247 Result: Up-regulated in Transcription
  misc_feature: MA Experiment 20001247 PARAMETER Experiment Name: At_Far-red-induction_P Parameter: Age (day) Value: 7
  misc_feature: MA Experiment 20001247 PARAMETER Experiment Name: At_Far-red-induction_P Parameter: Light Value: Far-red vs. White
  misc_feature: MA Experiment 20001247 PARAMETER Experiment Name: At_Far-red-induction_P Parameter: Organism Value: A. thaliana
  misc_feature: MA Experiment 20001247 PARAMETER Experiment Name: At_Far-red-induction_P Parameter: Plant Line Value: Columbia
  misc_feature: MA Experiment 20001247 PARAMETER Experiment Name: At_Far-red-induction_P Parameter: Timepoint (hr) Value: 1
  misc_feature: MA Experiment 20001247 PARAMETER Experiment Name: At_Far-red-induction_P Parameter: Tissue Value: Whole Plant
  misc_feature: MA Experiment ID: 20001248 Result: Up-regulated in Transcription
  misc_feature: MA Experiment 20001248 PARAMETER Experiment Name: At_Far-red-induction_P Parameter: Age (day) Value: 7
  misc_feature: MA Experiment 20001248 PARAMETER Experiment Name: At_Far-red-induction_P Parameter: Light Value: Far-red vs. White
  misc_feature: MA Experiment 20001248 PARAMETER Experiment Name: At_Far-red-induction_P Parameter: Organism Value: A. thaliana
  misc_feature: MA Experiment 20001248 PARAMETER Experiment Name: At_Far-red-induction_P Parameter: Plant Line Value: Columbia
  misc_feature: MA Experiment 20001248 PARAMETER Experiment Name: At_Far-red-induction_P Parameter: Timepoint (hr) Value: 4
  misc_feature: MA Experiment 20001248 PARAMETER Experiment Name: At_Far-red-induction_P Parameter: Tissue Value: Whole Plant
  misc_feature: MA Experiment ID: 20001450 Result: Up-regulated in Transcription
  misc_feature: MA Experiment 20001450 PARAMETER Experiment Name: At_Far-red-induction_P Parameter: Age (day) Value: 7
  misc_feature: MA Experiment 20001450 PARAMETER Experiment Name: At_Far-red-induction_P Parameter: Light Value: Far-red vs. White
  misc_feature: MA Experiment 20001450 PARAMETER Experiment Name: At_Far-red-induction_P Parameter: Organism Value: A. thaliana
  misc_feature: MA Experiment 20001450 PARAMETER Experiment Name: At_Far-red-induction_P Parameter: Plant Line Value: Columbia
  misc_feature: MA Experiment 20001450 PARAMETER Experiment Name: At_Far-red-induction_P Parameter: Timepoint (hr) Value: 8
  misc_feature: MA Experiment 20001450 PARAMETER Experiment Name: At_Far-red-induction_P Parameter: Tissue Value: Whole Plant
  misc_feature: MA Experiment ID: 20001557 Result: Up-regulated in Transcription
  misc_feature: MA Experiment 20001557 PARAMETER Experiment Name: At_Drought_Soil_Dry_P Parameter: Age (day) Value: 27
  misc_feature: MA Experiment 20001557 PARAMETER Experiment Name: At_Drought_Soil_Dry_P Parameter: Organism Value: A. thaliana
  misc_feature: MA Experiment 20001557 PARAMETER Experiment Name: At_Drought_Soil_Dry_P Parameter: Plant Line Value: WS
  misc_feature: MA Experiment 20001557 PARAMETER Experiment Name: At_Drought_Soil_Dry_P Parameter: Post Timepoint (hr) Value: 3
  misc_feature: MA Experiment 20001557 PARAMETER Experiment Name: At_Drought_Soil_Dry_P Parameter: Post-Treatment Value: Re-Water vs. No Drought
  misc_feature: MA Experiment 20001557 PARAMETER Experiment Name: At_Drought_Soil_Dry_P Parameter: Timepoint (day) Value: 13
  misc_feature: MA Experiment 20001557 PARAMETER Experiment Name: At_Drought_Soil_Dry_P Parameter: Treatment Value: Drought vs. No Drought
  misc_feature: MA Experiment ID: 20001560 Result: Down-regulated in Transcription
  misc_feature: MA Experiment 20001560 PARAMETER Experiment Name: At_Drought_Soil_Dry_P Parameter: Age (day) Value: 28
  misc_feature: MA Experiment 20001560 PARAMETER Experiment Name: At_Drought_Soil_Dry_P Parameter: Organism Value: A. thaliana
  misc_feature: MA Experiment 20001560 PARAMETER Experiment Name: At_Drought_Soil_Dry_P Parameter: Plant Line Value: WS
  misc_feature: MA Experiment 20001560 PARAMETER Experiment Name: At_Drought_Soil_Dry_P Parameter: Post Timepoint (hr) Value: None
  misc_feature: MA Experiment 20001560 PARAMETER Experiment Name: At_Drought_Soil_Dry_P Parameter: Post-Treatment Value: None
  misc_feature: MA Experiment 20001560 PARAMETER Experiment Name: At_Drought_Soil_Dry_P Parameter: Timepoint (day) Value: 14
  misc_feature: MA Experiment 20001560 PARAMETER Experiment Name: At_Drought_Soil_Dry_P Parameter: Treatment Value: Drought vs. No Drought

SEQ ID NO: 34090 - protein, 730 aa, Arabidopsis thaliana; identical to SEQ ID NO: 30500
  peptide (1)..(730): Ceres Seq. ID no. 12327660
  misc_feature (99)..(191): Pfam Name: PB1 domain Pfam Description: PB1 domain
  misc_feature (71)..(470): Homolog of NCBI NO: 15219183 NR Description: putative Ser/Thr protein kinase; protein id:
  misc_feature (80)..(189): Homolog of NCBI NO: 15222547 NR Description: hypothetical protein; protein id: At1g25300.1
  misc_feature (45)..(239): Homolog of NCBI NO: 15242462 NR Description: putative protein; protein id: At5g09620.1
  misc_feature (45)..(245): Homolog of NCBI NO: 15237703 NR Description: putative protein
  misc_feature (84)..(328): Homolog of NCBI NO: 25407315 NR Description: hypothetical protein AT4g05150 [imported] -
  misc_feature (84)..(328): Homolog of NCBI NO: 18412822 NR Description: putative protein
  misc_feature (11)..(557): Homolog of NCBI NO: 15229599 NR Description: unknown protein; protein id: At3g18230.1
  misc_feature (45)..(703): Homolog of NCBI NO: 34895646 NR Description: P0480E02.2 [Oryza sativa (japonica
  misc_feature (88)..(238): Homolog of NCBI NO: 25410886 NR Description: hypothetical protein At2g01190 [imported] -
  misc_feature (483)..(730): Homolog of NCBI NO: 25410886 NR Description: hypothetical protein At2g01190 [imported] -

SEQ ID NO: 34091 - protein, 720 aa, Arabidopsis thaliana; identical to SEQ ID NO: 30501
  peptide (1)..(720): Ceres Seq. ID no. 12327661
  misc_feature (89)..(181): Pfam Name: PB1 domain Pfam Description: PB1 domain
  misc_feature (61)..(460): Homolog of NCBI NO: 15219183 NR Description: putative Ser/Thr protein kinase; protein id:
  misc_feature (70)..(179): Homolog of NCBI NO: 15222547 NR Description: hypothetical protein; protein id: At1g25300.1
  misc_feature (35)..(229): Homolog of NCBI NO: 15242462 NR Description: putative protein; protein id: At5g09620.1
  misc_feature (35)..(235): Homolog of NCBI NO: 15237703 NR Description: putative protein
  misc_feature (74)..(318): Homolog of NCBI NO: 25407315 NR Description: hypothetical protein AT4g05150 [imported] -
  misc_feature (74)..(318): Homolog of NCBI NO: 18412822 NR Description: putative protein
  misc_feature (1)..(547): Homolog of NCBI NO: 15229599 NR Description: unknown protein; protein id: At3g18230.1
  misc_feature (35)..(693): Homolog of NCBI NO: 34895646 NR Description: P0480E02.2 [Oryza sativa (japonica
  misc_feature (78)..(228): Homolog of NCBI NO: 25410886 NR Description: hypothetical protein At2g01190 [imported] -
  misc_feature (473)..(720): Homolog of NCBI NO: 25410886 NR Description: hypothetical protein At2g01190 [imported] -

SEQ ID NO: 34092 - protein, 643 aa, Arabidopsis thaliana; identical to SEQ ID NO: 30502
  peptide (1)..(643): Ceres Seq. ID no. 12327662
  misc_feature (12)..(104): Pfam Name: PB1 domain Pfam Description: PB1 domain
  misc_feature (1)..(383): Homolog of NCBI NO: 15219183 NR Description: putative Ser/Thr protein kinase; protein id:
  misc_feature (1)..(102): Homolog of NCBI NO: 15222547 NR Description: hypothetical protein; protein id: At1g25300.1
  misc_feature (1)..(152): Homolog of NCBI NO: 15242462 NR Description: putative protein; protein id: At5g09620.1
  misc_feature (1)..(158): Homolog of NCBI NO: 15237703 NR Description: putative protein
  misc_feature (1)..(241): Homolog of NCBI NO: 25407315 NR Description: hypothetical protein AT4g05150 [imported] -
  misc_feature (1)..(241): Homolog of NCBI NO: 18412822 NR Description: putative protein
  misc_feature (1)..(470): Homolog of NCBI NO: 15229599 NR Description: unknown protein; protein id: At3g18230.1
  misc_feature (1)..(616): Homolog of NCBI NO: 34895646 NR Description: P0480E02.2 [Oryza sativa (japonica
  misc_feature (1)..(151): Homolog of NCBI NO: 25410886 NR Description: hypothetical protein At2g01190 [imported] -
  misc_feature (396)..(643): Homolog of NCBI NO: 25410886 NR Description: hypothetical protein At2g01190 [imported] -

SEQ ID NO: 34093 - DNA, 940 bp, Arabidopsis thaliana; identical to SEQ ID NO: 30503
  misc_feature (1)..(940): Ceres Seq. ID no. 12385730
  misc_feature: MA Experiment ID: 108469 Result: Up-regulated in Transcription
  misc_feature: MA Experiment ID: 108573 Result: Up-regulated in Transcription
  misc_feature: MA Experiment 108573 PARAMETER Experiment Name: At_Drought_cDNA_P Parameter: Timepoint (hr) Value: 6
  misc_feature: MA Experiment 108573 PARAMETER Experiment Name: At_Drought_cDNA_P Parameter: Tissue Value: Aerial
  misc_feature: MA Experiment 108573 PARAMETER Experiment Name: At_Drought_cDNA_P Parameter: Treatment Value: Drought vs. No Drought
  misc_feature: MA Experiment ID: 108585 Result: Up-regulated in Transcription
  misc_feature: MA Experiment 108585 PARAMETER Experiment Name: At_5mM_NaNP_cDNA_P Parameter: Timepoint (hr) Value: 6
  misc_feature: MA Experiment 108585 PARAMETER Experiment Name: At_5mM_NaNP_cDNA_P Parameter: Tissue Value: Aerial
  misc_feature: MA Experiment 108585 PARAMETER Experiment Name: At_5mM_NaNP_cDNA_P Parameter: Treatment Value: null

SEQ ID NO: 34094 - protein, 238 aa, Arabidopsis thaliana; identical to SEQ ID NO: 30504
  peptide (1)..(238): Ceres Seq. ID no. 12385731
  misc_feature (80)..(206): Pfam Name: Cupin Pfam Description: Cupin
  misc_feature (25)..(238): Homolog of NCBI NO: 18203447 NR Description: Nectarin 1 precursor (Superoxide dismutase [Mn])
  misc_feature (26)..(238): Homolog of NCBI NO: 34904670 NR Description: putative germin protein [Oryza sativa (japonica
  misc_feature (43)..(238): Homolog of NCBI NO: 15228673 NR Description: germin-like protein (GLP10); protein id:
  misc_feature (43)..(238): Homolog of NCBI NO: 1934730 NR Description: germin-like protein [Arabidopsis thaliana]
  misc_feature (27)..(238): Homolog of NCBI NO: 27805638 NR Description: Nectarin 1 precursor (Superoxide dismutase [Mn])
  misc_feature (25)..(238): Homolog of NCBI NO: 18203442 NR Description: Rhicadhesin receptor precursor (Germin-like
  misc_feature (34)..(206): Homolog of NCBI NO: 1755176 NR Description: germin-like protein [Arabidopsis thaliana]
  misc_feature (20)..(206): Homolog of NCBI NO: 1755160 NR Description: germin-like protein [Arabidopsis thaliana]
  misc_feature (20)..(206): Homolog of NCBI NO: 18202459 NR Description: Germin-like protein subfamily 2 member 1
  misc_feature (20)..(238): Homolog of NCBI NO: 15217561 NR Description: germin-like protein

SEQ ID NO: 34095 - protein, 219 aa, Arabidopsis thaliana; identical to SEQ ID NO: 30505
  peptide (1)..(219): Ceres Seq. ID no. 12385732
  misc_feature (61)..(187): Pfam Name: Cupin Pfam Description: Cupin
  misc_feature (6)..(219): Homolog of NCBI NO: 18203447 NR Description: Nectarin 1 precursor (Superoxide dismutase [Mn])
  misc_feature (7)..(219): Homolog of NCBI NO: 34904670 NR Description: putative germin protein [Oryza sativa (japonica
  misc_feature (24)..(219): Homolog of NCBI NO: 15228673 NR Description: germin-like protein (GLP10); protein id:
  misc_feature (24)..(219): Homolog of NCBI NO: 1934730 NR Description: germin-like protein [Arabidopsis thaliana]
  misc_feature (8)..(219): Homolog of NCBI NO: 27805638 NR Description: Nectarin 1 precursor (Superoxide dismutase [Mn])
  misc_feature (6)..(219): Homolog of NCBI NO: 18203442 NR Description: Rhicadhesin receptor precursor (Germin-like
  misc_feature (15)..(187): Homolog of NCBI NO: 1755176 NR Description: germin-like protein [Arabidopsis thaliana]
  misc_feature (1)..(187): Homolog of NCBI NO: 1755160 NR Description: germin-like protein [Arabidopsis thaliana]
  misc_feature (1)..(187): Homolog of NCBI NO: 18202459 NR Description: Germin-like protein subfamily 2 member 1
  misc_feature (1)..(219): Homolog of NCBI NO: 15217561 NR Description: germin-like protein

SEQ ID NO: 34096 - protein, 193 aa, Arabidopsis thaliana; identical to SEQ ID NO: 30506
  peptide (1)..(193): Ceres Seq. ID no. 12385733
  misc_feature (35)..(161): Pfam Name: Cupin Pfam Description: Cupin
  misc_feature (1)..(193): Homolog of NCBI NO: 18203447 NR Description: Nectarin 1 precursor (Superoxide dismutase [Mn])
  misc_feature (1)..(193): Homolog of NCBI NO: 34904670 NR Description: putative germin protein [Oryza sativa (japonica
  misc_feature (1)..(193): Homolog of NCBI NO: 15228673 NR Description: germin-like protein (GLP10); protein id:
  misc_feature (1)..(193): Homolog of NCBI NO: 1934730 NR Description: germin-like protein [Arabidopsis thaliana]
  misc_feature (1)..(193): Homolog of NCBI NO: 27805638 NR Description: Nectarin 1 precursor (Superoxide dismutase [Mn])
  misc_feature (1)..(193): Homolog of NCBI NO: 18203442 NR Description: Rhicadhesin receptor precursor (Germin-like
  misc_feature (1)..(161): Homolog of NCBI NO: 1755176 NR Description: germin-like protein [Arabidopsis thaliana]
  misc_feature (1)..(161): Homolog of NCBI NO: 1755160 NR Description: germin-like protein [Arabidopsis thaliana]
  misc_feature (1)..(161): Homolog of NCBI NO: 18202459 NR Description: Germin-like protein subfamily 2 member 1
  misc_feature (1)..(193): Homolog of NCBI NO: 15217561 NR Description: germin-like protein

SEQ ID NO: 34097 - DNA, 735 bp, Arabidopsis thaliana; identical to SEQ ID NO: 30507
  misc_feature (1)..(735): Ceres Seq. ID no. 13489816
  misc_feature: MA Experiment ID: 108433 Result: Up-regulated in Transcription
  misc_feature: MA Experiment 108433 PARAMETER Experiment Name: At_rhl_Mutant2_cDNA_P Parameter: Age (day) Value: 7
  misc_feature: MA Experiment 108433 PARAMETER Experiment Name: At_rhl_Mutant2_cDNA_P Parameter: Organism Value: A. thaliana
  misc_feature: MA Experiment 108433 PARAMETER Experiment Name: At_rhl_Mutant2_cDNA_P Parameter: Plant Line Value: rhl Mutant vs. wt landsburg
  misc_feature: MA Experiment 108433 PARAMETER Experiment Name: At_rhl_Mutant2_cDNA_P Parameter: Tissue Value: Roots
  misc_feature: MA Experiment ID: 108573 Result: Down-regulated in Transcription
  misc_feature: MA Experiment 108573 PARAMETER Experiment Name: At_Drought_cDNA_P Parameter: Timepoint (hr) Value: 6
  misc_feature: MA Experiment 108573 PARAMETER Experiment Name: At_Drought_cDNA_P Parameter: Tissue Value: Aerial
  misc_feature: MA Experiment 108573 PARAMETER Experiment Name: At_Drought_cDNA_P Parameter: Treatment Value: Drought vs. No Drought
  misc_feature: MA Experiment ID: 108585 Result: Down-regulated in Transcription
  misc_feature: MA Experiment 108585 PARAMETER Experiment Name: At_5mM_NaNP_cDNA_P Parameter: Timepoint (hr) Value: 6
  misc_feature: MA Experiment 108585 PARAMETER Experiment Name: At_5mM_NaNP_cDNA_P Parameter: Tissue Value: Aerial
  misc_feature: MA Experiment 108585 PARAMETER Experiment Name: At_5mM_NaNP_cDNA_P Parameter: Treatment Value: null
  misc_feature: MA Experiment ID: 108595 Result: Down-regulated in Transcription
  misc_feature: MA Experiment 108595 PARAMETER Experiment Name: At_Ler-pi_Ovule_cDNA_P Parameter: Plant Line Value: null
  misc_feature: MA Experiment ID: 20000113 Result: Up-regulated in Transcription
  misc_feature: MA Experiment 20000113 PARAMETER Experiment Name: At_42deg_Heat_cDNA_P Parameter: Temperature (deg C) Value: 42 vs. 22
  misc_feature: MA Experiment 20000113 PARAMETER Experiment Name: At_42deg_Heat_cDNA_P Parameter: Timepoint (hr) Value: 8
  misc_feature: MA Experiment 20000113 PARAMETER Experiment Name: At_42deg_Heat_cDNA_P Parameter: Tissue Value: Aerial
  misc_feature: MA Experiment ID: 20000184 Result: Down-regulated in Transcription
  misc_feature: MA Experiment 20000184 PARAMETER Experiment Name: At_Shoots__P Parameter: Age (day) Value: 7
  misc_feature: MA Experiment 20000184 PARAMETER Experiment Name: At_Shoots__P Parameter: Tissue Value: Shoots vs. Whole Plant
  misc_feature: MA Experiment ID: 20000185 Result: Down-regulated in Transcription
  misc_feature: MA Experiment 20000185 PARAMETER Experiment Name: At_Roots__P Parameter: Age (day) Value: 7 vs. 21
  misc_feature: MA Experiment 20000185 PARAMETER Experiment Name: At_Roots__P Parameter: Organism Value: A. thaliana
  misc_feature: MA Experiment 20000185 PARAMETER Experiment Name: At_Roots__P Parameter: Tissue Value: Roots vs. Whole Plant
  misc_feature: MA Experiment ID: 20000439 Result: Down-regulated in Transcription
  misc_feature: MA Experiment 20000439 PARAMETER Experiment Name: At_Roots__P Parameter: Age (day) Value: 14 vs. 21
  misc_feature: MA Experiment 20000439 PARAMETER Experiment Name: At_Roots__P Parameter: Organism Value: A. thaliana
  misc_feature: MA Experiment 20000439 PARAMETER Experiment Name: At_Roots__P Parameter: Tissue Value: Roots vs. Whole Plant
  misc_feature: MA Experiment ID: 20001557 Result: Down-regulated in Transcription
  misc_feature: MA Experiment 20001557 PARAMETER Experiment Name: At_Drought_Soil_Dry_P Parameter: Age (day) Value: 27
  misc_feature: MA Experiment 20001557 PARAMETER Experiment Name: At_Drought_Soil_Dry_P Parameter: Organism Value: A. thaliana
  misc_feature: MA Experiment 20001557 PARAMETER Experiment Name: At_Drought_Soil_Dry_P Parameter: Plant Line Value: WS
  misc_feature: MA Experiment 20001557 PARAMETER Experiment Name: At_Drought_Soil_Dry_P Parameter: Post Timepoint (hr) Value: 3
  misc_feature: MA Experiment 20001557 PARAMETER Experiment Name: At_Drought_Soil_Dry_P Parameter: Post-Treatment Value: Re-Water vs. No Drought
  misc_feature: MA Experiment 20001557 PARAMETER Experiment Name: At_Drought_Soil_Dry_P Parameter: Timepoint (day) Value: 13
  misc_feature: MA Experiment 20001557 PARAMETER Experiment Name: At_Drought_Soil_Dry_P Parameter: Treatment Value: Drought vs. No Drought

SEQ ID NO: 34098 - protein, 196 aa, Arabidopsis thaliana; identical to SEQ ID NO: 30508
  peptide (1)..(196): Ceres Seq. ID no. 13489817
  misc_feature (83)..(173): Homolog of NCBI NO: 16330265 NR Description: unknown protein [Synechocystis sp. PCC 6803]
  misc_feature (83)..(150): Homolog of NCBI NO: 17232006 NR Description: hypothetical protein [Nostoc sp. PCC 7120]
  misc_feature (83)..(141): Homolog of NCBI NO: 23130619 NR Description: hypothetical protein [Nostoc punctiforme]
  misc_feature (12)..(196): Homolog of NCBI NO: 21553912 NR Description: unknown [Arabidopsis thaliana]
  misc_feature (12)..(196): Homolog of NCBI NO: 15235625 NR Description: expressed protein [Arabidopsis thaliana]

SEQ ID NO: 34099 - protein, 185 aa, Arabidopsis thaliana; identical to SEQ ID NO: 30509
  peptide (1)..(185): Ceres Seq. ID no. 13489818
  misc_feature (72)..(162): Homolog of NCBI NO: 16330265 NR Description: unknown protein [Synechocystis sp. PCC 6803]
  misc_feature (72)..(139): Homolog of NCBI NO: 17232006 NR Description: hypothetical protein [Nostoc sp. PCC 7120]
  misc_feature (72)..(130): Homolog of NCBI NO: 23130619 NR Description: hypothetical protein [Nostoc punctiforme]
  misc_feature (1)..(185): Homolog of NCBI NO: 21553912 NR Description: unknown [Arabidopsis thaliana]
  misc_feature (1)..(185): Homolog of NCBI NO: 15235625 NR Description: expressed protein [Arabidopsis thaliana]

SEQ ID NO: 34100 - DNA, 713 bp, Arabidopsis thaliana; identical to SEQ ID NO: 30510
  misc_feature (1)..(713): Ceres Seq. ID no. 12562391
  misc_feature: MA Experiment ID: 108462 Result: Down-regulated in Transcription
  misc_feature: MA Experiment 108462 PARAMETER Experiment Name: At_Germinating_Seeds_cDNA_P Parameter: Age (day) Value: 2 vs. 0
  misc_feature: MA Experiment 108462 PARAMETER Experiment Name: At_Germinating_Seeds_cDNA_P Parameter: Tissue Value: Germinating Seeds
  misc_feature: MA Experiment ID: 108569 Result: Down-regulated in Transcription
  misc_feature: MA Experiment 108569 PARAMETER Experiment Name: At_0.001%_MeJA__cDNA_P Parameter: Timepoint (hr) Value: 6
  misc_feature: MA Experiment 108569 PARAMETER Experiment Name: At_0.001%_MeJA__cDNA_P Parameter: Tissue Value: Aerial
  misc_feature: MA Experiment 108569 PARAMETER Experiment Name: At_0.001%_MeJA__cDNA_P Parameter: Treatment Value: 0.001% MeJA vs. No Treatment
  misc_feature: MA Experiment ID: 20000113 Result: Down-regulated in Transcription
  misc_feature: MA Experiment 20000113 PARAMETER Experiment Name: At_42deg_Heat_cDNA_P Parameter: Temperature (deg C) Value: 42 vs. 22
  misc_feature: MA Experiment 20000113 PARAMETER Experiment Name: At_42deg_Heat_cDNA_P Parameter: Timepoint (hr) Value: 8
  misc_feature: MA Experiment 20000113 PARAMETER Experiment Name: At_42deg_Heat_cDNA_P Parameter: Tissue Value: Aerial

SEQ ID NO: 34101 - protein, 179 aa, Arabidopsis thaliana; identical to SEQ ID NO: 30511
  peptide (1)..(179): Ceres Seq. ID no. 12562392
  misc_feature (1)..(162): Homolog of NCBI NO: 7487713 NR Description: hypothetical protein T5K18.130 - Arabidopsis
  misc_feature (10)..(172): Homolog of NCBI NO: 34905298 NR Description: P0577B11.20 [Oryza sativa (japonica
  misc_feature (44)..(179): Homolog of NCBI NO: 7487713 NR Description: hypothetical protein T5K18.130 - Arabidopsis
  misc_feature (1)..(179): Homolog of NCBI NO: 18415295 NR Description: putative protein

SEQ ID NO: 34102 - DNA, 645 bp, Arabidopsis thaliana; identical to SEQ ID NO: 30512
  misc_feature (1)..(645): Ceres Seq. ID no. 12333415
  misc_feature: MA Experiment ID: 108434 Result: Up-regulated in Transcription
  misc_feature: MA Experiment 108434 PARAMETER Experiment Name: At_Root_Tips_cDNA_P Parameter: Tissue Value: Root Tips
  misc_feature: MA Experiment ID: 108462 Result: Down-regulated in Transcription
  misc_feature: MA Experiment 108462 PARAMETER Experiment Name: At_Germinating_Seeds_cDNA_P Parameter: Age (day) Value: 2 vs. 0
  misc_feature: MA Experiment 108462 PARAMETER Experiment Name: At_Germinating_Seeds_cDNA_P Parameter: Tissue Value: Germinating Seeds
  misc_feature: MA Experiment ID: 108463 Result: Down-regulated in Transcription
  misc_feature: MA Experiment 108463 PARAMETER Experiment Name: At_Germinating_Seeds_cDNA_P Parameter: Age (day) Value: 3 vs. 0
  misc_feature: MA Experiment 108463 PARAMETER Experiment Name: At_Germinating_Seeds_cDNA_P Parameter: Tissue Value: Germinating Seeds
  misc_feature: MA Experiment ID: 108464 Result: Down-regulated in Transcription
  misc_feature: MA Experiment 108464 PARAMETER Experiment Name: At_Germinating_Seeds_cDNA_P Parameter: Age (day) Value: 4 vs. 0
  misc_feature: MA Experiment 108464 PARAMETER Experiment Name: At_Germinating_Seeds_cDNA_P Parameter: Tissue Value: Germinating Seeds
  misc_feature: MA Experiment ID: 108573 Result: Down-regulated in Transcription
  misc_feature: MA Experiment 108573 PARAMETER Experiment Name: At_Drought_cDNA_P Parameter: Timepoint (hr) Value: 6
  misc_feature: MA Experiment 108573 PARAMETER Experiment Name: At_Drought_cDNA_P Parameter: Tissue Value: Aerial
  misc_feature: MA Experiment 108573 PARAMETER Experiment Name: At_Drought_cDNA_P Parameter: Treatment Value: Drought vs. No Drought
  misc_feature: MA Experiment ID: 20001911 Result: Down-regulated in Transcription
  misc_feature: MA Experiment 20001911 PARAMETER Experiment Name: At_Drought_Reproduction_P Parameter: Age (day) Value: 40
  misc_feature: MA Experiment 20001911 PARAMETER Experiment Name: At_Drought_Reproduction_P Parameter: Organism Value: A. thaliana
  misc_feature: MA Experiment 20001911 PARAMETER Experiment Name: At_Drought_Reproduction_P Parameter: Plant Line Value: WS
  misc_feature: MA Experiment 20001911 PARAMETER Experiment Name: At_Drought_Reproduction_P Parameter: Timepoint (day) Value: 10
  misc_feature: MA Experiment 20001911 PARAMETER Experiment Name: At_Drought_Reproduction_P Parameter: Tissue Value: Flowers
  misc_feature: MA Experiment 20001911 PARAMETER Experiment Name: At_Drought_Reproduction_P Parameter: Treatment Value: Drought vs. No Drought

SEQ ID NO: 34103 - protein, 129 aa, Arabidopsis thaliana; identical to SEQ ID NO: 30513
  peptide (1)..(129): Ceres Seq. ID no. 12333416
  misc_feature (6)..(129): Pfam Name: Ribosomal protein S8 Pfam Description: Ribosomal protein S8
  misc_feature (5)..(129): Homolog of NCBI NO: 2130985 NR Description: r-protein BnS15a [Brassica napus]
  misc_feature (5)..(129): Homolog of NCBI NO: 15231316 NR Description: cytoplasmic ribosomal protein S15a -like
  misc_feature (5)..(129): Homolog of NCBI NO: 15225502 NR Description: 40S ribosomal protein S15A; protein id:
  misc_feature (5)..(129): Homolog of NCBI NO: 6683481 NR Description: wrp15a [Citrullus lanatus]
  misc_feature (5)..(129): Homolog of NCBI NO: 15223001 NR Description: ribosomal protein S15
  misc_feature (5)..(129): Homolog of NCBI NO: 133793 NR Description: 40S RIBOSOMAL PROTEIN S15A (PPCB8)
  misc_feature (5)..(129): Homolog of NCBI NO: 13560779 NR Description: cytoplasmic ribosomal protein S15a [Daucus carota]
  misc_feature (5)..(129): Homolog of NCBI NO: 28411802 NR Description: ribosomal protein S15 [Oryza sativa (japonica
  misc_feature (1)..(129): Homolog of NCBI NO: 15224834 NR Description: 40S ribosomal protein S15A; protein id:
  misc_feature (1)..(129): Homolog of NCBI NO: 15233571 NR Description: ribosomal protein S15a homolog

SEQ ID NO: 34104 - protein, 97 aa, Arabidopsis thaliana; identical to SEQ ID NO: 30514
  peptide (1)..(97): Ceres Seq. ID no. 12333417
  misc_feature (1)..(97): Pfam Name: Ribosomal protein S8 Pfam Description: Ribosomal protein S8
  misc_feature (1)..(97): Homolog of NCBI NO: 2130985 NR Description: r-protein BnS15a [Brassica napus]
  misc_feature (1)..(97): Homolog of NCBI NO: 15231316 NR Description: cytoplasmic ribosomal protein S15a -like
  misc_feature (1)..(97): Homolog of NCBI NO: 15225502 NR Description: 40S ribosomal protein S15A; protein id:
  misc_feature (1)..(97): Homolog of NCBI NO: 6683481 NR Description: wrp15a [Citrullus lanatus]
  misc_feature (1)..(97): Homolog of NCBI NO: 15223001 NR Description: ribosomal protein S15
  misc_feature (1)..(97): Homolog of NCBI NO: 133793 NR Description: 40S RIBOSOMAL PROTEIN S15A (PPCB8)
  misc_feature (1)..(97): Homolog of NCBI NO: 13560779 NR Description: cytoplasmic ribosomal protein S15a [Daucus carota]
  misc_feature (1)..(97): Homolog of NCBI NO: 28411802 NR Description: ribosomal protein S15 [Oryza sativa (japonica
  misc_feature (1)..(97): Homolog of NCBI NO: 15224834 NR Description: 40S ribosomal protein S15A; protein id:
  misc_feature (1)..(97): Homolog of NCBI NO: 15233571 NR Description: ribosomal protein S15a homolog

SEQ ID NO: 34105 - protein, 90 aa, Arabidopsis thaliana; identical to SEQ ID NO: 30515
  peptide (1)..(90): Ceres Seq. ID no. 12333418
  misc_feature (1)..(90): Pfam Name: Ribosomal protein S8 Pfam Description: Ribosomal protein S8
  misc_feature (1)..(90): Homolog of NCBI NO: 2130985 NR Description: r-protein BnS15a [Brassica napus]
  misc_feature (1)..(90): Homolog of NCBI NO: 15231316 NR Description: cytoplasmic ribosomal protein S15a -like
  misc_feature (1)..(90): Homolog of NCBI NO: 15225502 NR Description: 40S ribosomal protein S15A; protein id:
  misc_feature (1)..(90): Homolog of NCBI NO: 6683481 NR Description: wrp15a [Citrullus lanatus]
  misc_feature (1)..(90): Homolog of NCBI NO: 15223001 NR Description: ribosomal protein S15
  misc_feature (1)..(90): Homolog of NCBI NO: 133793 NR Description: 40S RIBOSOMAL PROTEIN S15A (PPCB8)
  misc_feature (1)..(90): Homolog of NCBI NO: 13560779 NR Description: cytoplasmic ribosomal protein S15a [Daucus carota]
  misc_feature (1)..(90): Homolog of NCBI NO: 28411802 NR Description: ribosomal protein S15 [Oryza sativa (japonica
  misc_feature (1)..(90): Homolog of NCBI NO: 15224834 NR Description: 40S ribosomal protein S15A; protein id:
  misc_feature (1)..(90): Homolog of NCBI NO: 15233571 NR Description: ribosomal protein S15a homolog

SEQ ID NO: 34106 - DNA, 903 bp, Arabidopsis thaliana; identical to SEQ ID NO: 30516
  misc_feature (1)..(903): Ceres Seq. ID no. 12422995
  misc_feature: MA Experiment ID: 108434 Result: Up-regulated in Transcription
  misc_feature: MA Experiment 108434 PARAMETER Experiment Name: At_Root_Tips_cDNA_P Parameter: Tissue Value: Root Tips
  misc_feature: MA Experiment ID: 108461 Result: Down-regulated in Transcription
  misc_feature: MA Experiment 108461 PARAMETER Experiment Name: At_Germinating_Seeds_cDNA_P Parameter: Age (day) Value: 1 vs. 0
  misc_feature: MA Experiment 108461 PARAMETER Experiment Name: At_Germinating_Seeds_cDNA_P Parameter: Tissue Value: Germinating Seeds
  misc_feature: MA Experiment ID: 108462 Result: Down-regulated in Transcription
  misc_feature: MA Experiment 108462 PARAMETER Experiment Name: At_Germinating_Seeds_cDNA_P Parameter: Age (day) Value: 2 vs. 0
  misc_feature: MA Experiment 108462 PARAMETER Experiment Name: At_Germinating_Seeds_cDNA_P Parameter: Tissue Value: Germinating Seeds
  misc_feature: MA Experiment ID: 108463 Result: Down-regulated in Transcription
  misc_feature: MA Experiment 108463 PARAMETER Experiment Name: At_Germinating_Seeds_cDNA_P Parameter: Age (day) Value: 3 vs. 0
  misc_feature: MA Experiment 108463 PARAMETER Experiment Name: At_Germinating_Seeds_cDNA_P Parameter: Tissue Value: Germinating Seeds
  misc_feature: MA Experiment ID: 108464 Result: Down-regulated in Transcription
  misc_feature: MA Experiment 108464 PARAMETER Experiment Name: At_Germinating_Seeds_cDNA_P Parameter: Age (day) Value: 4 vs. 0
  misc_feature: MA Experiment 108464 PARAMETER Experiment Name: At_Germinating_Seeds_cDNA_P Parameter: Tissue Value: Germinating Seeds
  misc_feature: MA Experiment ID: 108572 Result: Down-regulated in Transcription
  misc_feature: MA Experiment 108572 PARAMETER Experiment Name: At_Drought_cDNA_P Parameter: Timepoint (hr) Value: 1
  misc_feature: MA Experiment 108572 PARAMETER Experiment Name: At_Drought_cDNA_P Parameter: Tissue Value: Aerial
  misc_feature: MA Experiment 108572 PARAMETER Experiment Name: At_Drought_cDNA_P Parameter: Treatment Value: Drought vs. No Drought
  misc_feature: MA Experiment ID: 108573 Result: Down-regulated in Transcription
  misc_feature: MA Experiment 108573 PARAMETER Experiment Name: At_Drought_cDNA_P Parameter: Timepoint (hr) Value: 6
  misc_feature: MA Experiment 108573 PARAMETER Experiment Name: At_Drought_cDNA_P Parameter: Tissue Value: Aerial
  misc_feature: MA Experiment 108573 PARAMETER Experiment Name: At_Drought_cDNA_P Parameter: Treatment Value: Drought vs. No Drought
  misc_feature: MA Experiment ID: 108585 Result: Down-regulated in Transcription
  misc_feature: MA Experiment 108585 PARAMETER Experiment Name: At_5mM_NaNP_cDNA_P Parameter: Timepoint (hr) Value: 6
  misc_feature: MA Experiment 108585 PARAMETER Experiment Name: At_5mM_NaNP_cDNA_P Parameter: Tissue Value: Aerial
  misc_feature: MA Experiment 108585 PARAMETER Experiment Name: At_5mM_NaNP_cDNA_P Parameter: Treatment Value: null
  misc_feature: MA Experiment ID: 108609 Result: Down-regulated in Transcription
  misc_feature: MA Experiment 108609 PARAMETER Experiment Name: At_100uM_ABA_cDNA_P Parameter: Timepoint (hr) Value: 24
  misc_feature: MA Experiment 108609 PARAMETER Experiment Name: At_100uM_ABA_cDNA_P Parameter: Tissue Value: Aerial
  misc_feature: MA Experiment 108609 PARAMETER Experiment Name: At_100uM_ABA_cDNA_P Parameter: Treatment Value: 100uM ABA vs. No Treatment
  misc_feature: MA Experiment ID: 20000112 Result: Down-regulated in Transcription
  misc_feature: MA Experiment 20000112 PARAMETER Experiment Name: At_42deg_Heat_cDNA_P Parameter: Temperature (deg C) Value: 42 vs. 22
  misc_feature: MA Experiment 20000112 PARAMETER Experiment Name: At_42deg_Heat_cDNA_P Parameter: Timepoint (hr) Value: 2
  misc_feature: MA Experiment 20000112 PARAMETER Experiment Name: At_42deg_Heat_cDNA_P Parameter: Tissue Value: Aerial
  misc_feature: MA Experiment ID: 20000224 Result: Up-regulated in Transcription
  misc_feature: MA Experiment ID: 20000235 Result: Up-regulated in Transcription
  misc_feature: MA Experiment 20000235 PARAMETER Experiment Name: At_Siliques_P Parameter: Age (day) Value: 21
  misc_feature: MA Experiment 20000235 PARAMETER Experiment Name: At_Siliques_P Parameter: Organism Value: A. thaliana
  misc_feature: MA Experiment 20000235 PARAMETER Experiment Name: At_Siliques_P Parameter: Plant Line Value: WS
  misc_feature: MA Experiment 20000235 PARAMETER Experiment Name: At_Siliques_P Parameter: Tissue Value: 5-10mm Siliques vs. Whole Plant
  misc_feature: MA Experiment ID: 20001458 Result: Up-regulated in Transcription
  misc_feature: MA Experiment 20001458 PARAMETER Experiment Name: At_50mM_NH4NO3_L-to-H_P Parameter: Age (day) Value: Undefined
  misc_feature: MA Experiment 20001458 PARAMETER Experiment Name: At_50mM_NH4NO3_L-to-H_P Parameter: Organism Value: Undefined
  misc_feature: MA Experiment 20001458 PARAMETER Experiment Name: At_50mM_NH4NO3_L-to-H_P Parameter: Plant Line Value: Undefined
  misc_feature: MA Experiment 20001458 PARAMETER Experiment Name: At_50mM_NH4NO3_L-to-H_P Parameter: Timepoint (hr) Value: 2
  misc_feature: MA Experiment 20001458 PARAMETER Experiment Name: At_50mM_NH4NO3_L-to-H_P Parameter: Tissue Value: Siliques
  misc_feature: MA Experiment 20001458 PARAMETER Experiment Name: At_50mM_NH4NO3_L-to-H_P Parameter: Treatment Value: 50mM NH4NO3 vs. 100mM Manitol
  misc_feature: MA Experiment ID: 20001557 Result: Up-regulated in Transcription
  misc_feature: MA Experiment 20001557 PARAMETER Experiment Name: At_Drought_Soil_Dry_P Parameter: Age (day) Value: 27
  misc_feature: MA Experiment 20001557 PARAMETER Experiment Name: At_Drought_Soil_Dry_P Parameter: Organism Value: A. thaliana
  misc_feature: MA Experiment 20001557 PARAMETER Experiment Name: At_Drought_Soil_Dry_P Parameter: Plant Line Value: WS
  misc_feature: MA Experiment 20001557 PARAMETER Experiment Name: At_Drought_Soil_Dry_P Parameter: Post Timepoint (hr) Value: 3
  misc_feature: MA Experiment 20001557 PARAMETER Experiment Name: At_Drought_Soil_Dry_P Parameter: Post-Treatment Value: Re-Water vs. No Drought
  misc_feature: MA Experiment 20001557 PARAMETER Experiment Name: At_Drought_Soil_Dry_P Parameter: Timepoint (day) Value: 13
  misc_feature: MA Experiment 20001557 PARAMETER Experiment Name: At_Drought_Soil_Dry_P Parameter: Treatment Value: Drought vs. No Drought
  misc_feature: MA Experiment ID: 20001558 Result: Up-regulated in Transcription
  misc_feature: MA Experiment 20001558 PARAMETER Experiment Name: At_Drought_Soil_Dry_P Parameter: Age (day) Value: 27
  misc_feature: MA Experiment 20001558 PARAMETER Experiment Name: At_Drought_Soil_Dry_P Parameter: Organism Value: A. thaliana
  misc_feature: MA Experiment 20001558 PARAMETER Experiment Name: At_Drought_Soil_Dry_P Parameter: Plant Line Value: WS
  misc_feature: MA Experiment 20001558 PARAMETER Experiment Name: At_Drought_Soil_Dry_P Parameter: Post Timepoint (hr) Value: 6
  misc_feature: MA Experiment 20001558 PARAMETER Experiment Name: At_Drought_Soil_Dry_P Parameter: Post-Treatment Value: Re-Water vs. No Drought
  misc_feature: MA Experiment 20001558 PARAMETER Experiment Name: At_Drought_Soil_Dry_P Parameter: Timepoint (day) Value: 13
  misc_feature: MA Experiment 20001558 PARAMETER Experiment Name: At_Drought_Soil_Dry_P Parameter: Treatment Value: Drought vs. No Drought

SEQ ID NO: 34107 - protein, 263 aa, Arabidopsis thaliana; identical to SEQ ID NO: 30517
  peptide (1)..(263): Ceres Seq. ID no. 12422996
  misc_feature (70)..(261): Pfam Name: Mitochondrial glycoprotein Pfam Description: Mitochondrial glycoprotein
  misc_feature (48)..(261): Homolog of NCBI NO: 34895740 NR Description: P0019D06.28 [Oryza sativa (japonica
  misc_feature (53)..(262): Homolog of NCBI NO: 21592321 NR Description: unknown [Arabidopsis thaliana]
  misc_feature (53)..(262): Homolog of NCBI NO: 15241669 NR Description: putative protein
  misc_feature (11)..(262): Homolog of NCBI NO: 7487698 NR Description: hypothetical protein At2g39790 [imported] -
  misc_feature (8)..(262): Homolog of NCBI NO: 21593469 NR Description: unknown [Arabidopsis thaliana]
  misc_feature (8)..(262): Homolog of NCBI NO: 18405164 NR Description: Expressed protein
  misc_feature (42)..(262): Homolog of NCBI NO: 11357566 NR Description: hypothetical protein F1I16.10 - Arabidopsis
  misc_feature (6)..(262): Homolog of NCBI NO: 18410318 NR Description: Expressed protein
  misc_feature (48)..(262): Homolog of NCBI NO: 34895730 NR Description: P0019D06.23 [Oryza sativa (japonica
  misc_feature (5)..(263): Homolog of NCBI NO: 15239320 NR Description: putative protein

SEQ ID NO: 34108 - protein, 259 aa, Arabidopsis thaliana; identical to SEQ ID NO: 30518
  peptide (1)..(259): Ceres Seq. ID no. 12422997
  misc_feature (66)..(257): Pfam Name: Mitochondrial glycoprotein Pfam Description: Mitochondrial glycoprotein
  misc_feature (44)..(257): Homolog of NCBI NO: 34895740 NR Description: P0019D06.28 [Oryza sativa (japonica
  misc_feature (49)..(258): Homolog of NCBI NO: 21592321 NR Description: unknown [Arabidopsis thaliana]
  misc_feature (49)..(258): Homolog of NCBI NO: 15241669 NR Description: putative protein
  misc_feature (7)..(258): Homolog of NCBI NO: 7487698 NR Description: hypothetical protein At2g39790 [imported] -
  misc_feature (4)..(258): Homolog of NCBI NO: 21593469 NR Description: unknown [Arabidopsis thaliana]
  misc_feature (4)..(258): Homolog of NCBI NO: 18405164 NR Description: Expressed protein
  misc_feature (38)..(258): Homolog of NCBI NO: 11357566 NR Description: hypothetical protein F1I16.10 - Arabidopsis
  misc_feature (2)..(258): Homolog of NCBI NO: 18410318 NR Description: Expressed protein
  misc_feature (44)..(258): Homolog of NCBI NO: 34895730 NR Description: P0019D06.23 [Oryza sativa (japonica
  misc_feature (1)..(259): Homolog of NCBI NO: 15239320 NR Description: putative protein

SEQ ID NO: 34109 - protein, 167 aa, Arabidopsis thaliana; identical to SEQ ID NO: 30519
  peptide (1)..(167): Ceres Seq. ID no. 12422998
  misc_feature (1)..(165): Pfam Name: Mitochondrial glycoprotein Pfam Description: Mitochondrial glycoprotein
  misc_feature (1)..(165): Homolog of NCBI NO: 34895740 NR Description: P0019D06.28 [Oryza sativa (japonica
  misc_feature (1)..(166): Homolog of NCBI NO: 21592321 NR Description: unknown [Arabidopsis thaliana]
  misc_feature (1)..(166): Homolog of NCBI NO: 15241669 NR Description: putative protein
  misc_feature (1)..(166): Homolog of NCBI NO: 7487698 NR Description: hypothetical protein At2g39790 [imported] -
  misc_feature (1)..(166): Homolog of NCBI NO: 21593469 NR Description: unknown [Arabidopsis thaliana]
  misc_feature (1)..(166): Homolog of NCBI NO: 18405164 NR Description: Expressed protein
  misc_feature (1)..(166): Homolog of NCBI NO: 11357566 NR Description: hypothetical protein F1I16.10 - Arabidopsis
  misc_feature (1)..(166): Homolog of NCBI NO: 18410318 NR Description: Expressed protein
  misc_feature (1)..(166): Homolog of NCBI NO: 34895730 NR Description: P0019D06.23 [Oryza sativa (japonica
  misc_feature (1)..(167): Homolog of NCBI NO: 15239320 NR Description: putative protein

SEQ ID NO: 34110 - DNA, 871 bp, Arabidopsis thaliana; identical to SEQ ID NO: 30520
  misc_feature (1)..(871): Ceres Seq. ID no. 13621946
  misc_feature: MA Experiment ID: 108573 Result: Up-regulated in Transcription
  misc_feature: MA Experiment 108573 PARAMETER Experiment Name: At_Drought_cDNA_P Parameter: Timepoint (hr) Value: 6
  misc_feature: MA Experiment 108573 PARAMETER Experiment Name: At_Drought_cDNA_P Parameter: Tissue Value: Aerial
  misc_feature: MA Experiment 108573 PARAMETER Experiment Name: At_Drought_cDNA_P Parameter: Treatment Value: Drought vs. No Drought
  misc_feature: MA Experiment ID: 20000224 Result: Down-regulated in Transcription

SEQ ID NO: 34111 - protein, 152 aa, Arabidopsis thaliana; identical to SEQ ID NO: 30521
  peptide (1)..(152): Ceres Seq. ID no. 13621947
  misc_feature (1)..(149): Homolog of NCBI NO: 18424601 NR Description: ubiquitin-conjugating enzyme 3 (UBC3)
  misc_feature (1)..(152): Homolog of NCBI NO: 18844990 NR Description: Rad6 [Oryza sativa (japonica cultivar-group)]
  misc_feature (1)..(152): Homolog of NCBI NO: 33146810 NR Description: OsRad6 [Oryza sativa (japonica cultivar-group)]
  misc_feature (1)..(152): Homolog of NCBI NO: 13516453 NR Description: ubiquitin-conjugating enzyme (E2) [Nicotiana
  misc_feature (1)..(152): Homolog of NCBI NO: 136640 NR Description: Ubiquitin-conjugating enzyme E2-17 kDa
  misc_feature (1)..(152): Homolog of NCBI NO: 13516451 NR Description: ubiquitin-conjugating enzyme (E2) [Nicotiana
  misc_feature (1)..(152): Homolog of NCBI NO: 8118527 NR Description: ubiquitin conjugating protein [Avicennia marina]
  misc_feature (1)..(152): Homolog of NCBI NO: 464980 NR Description: Ubiquitin-conjugating enzyme E2-17 kDa
  misc_feature (1)..(152): Homolog of NCBI NO: 18395424 NR Description: ubiquitin-conjugating enzyme 2 (UBC2)
  misc_feature (1)..(152): Homolog of NCBI NO: 18394114 NR Description: ubiquitin-conjugating enzyme 1 (UBC1)

SEQ ID NO: 34112 - protein, 143 aa, Arabidopsis thaliana; identical to SEQ ID NO: 30522
  peptide (1)..(143): Ceres Seq. ID no. 13621948
  misc_feature (1)..(140): Homolog of NCBI NO: 18424601 NR Description: ubiquitin-conjugating enzyme 3 (UBC3)
  misc_feature (1)..(143): Homolog of NCBI NO: 18844990 NR Description: Rad6 [Oryza sativa (japonica cultivar-group)]
  misc_feature (1)..(143): Homolog of NCBI NO: 33146810 NR Description: OsRad6 [Oryza sativa (japonica cultivar-group)]
  misc_feature (1)..(143): Homolog of NCBI NO: 13516453 NR Description: ubiquitin-conjugating enzyme (E2) [Nicotiana
  misc_feature (1)..(143): Homolog of NCBI NO: 136640 NR Description: Ubiquitin-conjugating enzyme E2-17 kDa
  misc_feature (1)..(143): Homolog of NCBI NO: 13516451 NR Description: ubiquitin-conjugating enzyme (E2) [Nicotiana
  misc_feature (1)..(143): Homolog of NCBI NO: 8118527 NR Description: ubiquitin conjugating protein [Avicennia marina]
  misc_feature (1)..(143): Homolog of NCBI NO: 464980 NR Description: Ubiquitin-conjugating enzyme E2-17 kDa
  misc_feature (1)..(143): Homolog of NCBI NO: 18395424 NR Description: ubiquitin-conjugating enzyme 2 (UBC2)
  misc_feature (1)..(143): Homolog of NCBI NO: 18394114 NR Description: ubiquitin-conjugating enzyme 1 (UBC1)

SEQ ID NO: 34113 - protein, 121 aa, Arabidopsis thaliana; identical to SEQ ID NO: 30523
  peptide (1)..(121): Ceres Seq. ID no. 13621949

SEQ ID NO: 34114 - DNA, 1076 bp, Arabidopsis thaliana; identical to SEQ ID NO: 30524
  misc_feature (1)..(1076): Ceres Seq. ID no. 13495712
  misc_feature: MA Experiment ID: 108573 Result: Up-regulated in Transcription
  misc_feature: MA Experiment 108573 PARAMETER Experiment Name: At_Drought_cDNA_P Parameter: Timepoint (hr) Value: 6
  misc_feature: MA Experiment 108573 PARAMETER Experiment Name: At_Drought_cDNA_P Parameter: Tissue Value: Aerial
  misc_feature: MA Experiment 108573 PARAMETER Experiment Name: At_Drought_cDNA_P Parameter: Treatment Value: Drought vs. No Drought
  misc_feature: MA Experiment ID: 108579 Result: Down-regulated in Transcription
  misc_feature: MA Experiment 108579 PARAMETER Experiment Name: At_4deg_Cold_cDNA_P Parameter: Temperature (deg C) Value: 4 vs. 22
  misc_feature: MA Experiment 108579 PARAMETER Experiment Name: At_4deg_Cold_cDNA_P Parameter: Timepoint (hr) Value: 6
  misc_feature: MA Experiment 108579 PARAMETER Experiment Name: At_4deg_Cold_cDNA_P Parameter: Tissue Value: Aerial
  misc_feature: MA Experiment ID: 20000227 Result: Down-regulated in Transcription
  misc_feature: MA Experiment 20000227 PARAMETER Experiment Name: At_Root-Tips-vs-Tops_P Parameter: Tissue Value: Root Tips vs. Root Tops
  misc_feature: MA Experiment ID: 20000234 Result: Down-regulated in Transcription
  misc_feature: MA Experiment 20000234 PARAMETER Experiment Name: At_Siliques_P Parameter: Age (day) Value: 21
  misc_feature: MA Experiment 20000234 PARAMETER Experiment Name: At_Siliques_P Parameter: Organism Value: A. thaliana
  misc_feature: MA Experiment 20000234 PARAMETER Experiment Name: At_Siliques_P Parameter: Plant Line Value: WS
  misc_feature: MA Experiment 20000234 PARAMETER Experiment Name: At_Siliques_P Parameter: Tissue Value: Less Than 5mm Siliques vs. Whole Plant
  misc_feature: MA Experiment ID: 20000235 Result: Down-regulated in Transcription
  misc_feature: MA Experiment 20000235 PARAMETER Experiment Name: At_Siliques_P Parameter: Age (day) Value: 21
  misc_feature: MA Experiment 20000235 PARAMETER Experiment Name: At_Siliques_P Parameter: Organism Value: A. thaliana
  misc_feature: MA Experiment 20000235 PARAMETER Experiment Name: At_Siliques_P Parameter: Plant Line Value: WS
  misc_feature: MA Experiment 20000235 PARAMETER Experiment Name: At_Siliques_P Parameter: Tissue Value: 5-10mm Siliques vs. Whole Plant
  misc_feature: MA Experiment ID: 20000264 Result: Down-regulated in Transcription
  misc_feature: MA Experiment 20000264 PARAMETER Experiment Name: At_Open_Flower_P Parameter: Age (day) Value: 21
  misc_feature: MA Experiment 20000264 PARAMETER Experiment Name: At_Open_Flower_P Parameter: Plant Line Value: WS
  misc_feature: MA Experiment 20000264 PARAMETER Experiment Name: At_Open_Flower_P Parameter: Tissue Value: Open Flower vs. Whole Plant
  misc_feature: MA Experiment ID: 20000265 Result: Down-regulated in Transcription
  misc_feature: MA Experiment 20000265 PARAMETER Experiment Name: At_Open_Flower_P Parameter: Age (day) Value: 21
  misc_feature: MA Experiment 20000265 PARAMETER Experiment Name: At_Open_Flower_P Parameter: Plant Line Value: WS
  misc_feature: MA Experiment 20000265 PARAMETER Experiment Name: At_Open_Flower_P Parameter: Tissue Value: Closed Flower vs. Whole Plant
  misc_feature: MA Experiment ID: 20000286 Result: Down-regulated in Transcription
  misc_feature: MA Experiment 20000286 PARAMETER Experiment Name: At_Open_Flower_P Parameter: Age (day) Value: 21
  misc_feature: MA Experiment 20000286 PARAMETER Experiment Name: At_Open_Flower_P Parameter: Plant Line Value: WS
  misc_feature: MA Experiment 20000286 PARAMETER Experiment Name: At_Open_Flower_P Parameter: Tissue Value: Half Open vs. Whole Plant
  misc_feature: MA Experiment ID: 20001450 Result: Up-regulated in Transcription
  misc_feature: MA Experiment 20001450 PARAMETER Experiment Name: At_Far-red-induction_P Parameter: Age (day) Value: 7
  misc_feature: MA Experiment 20001450 PARAMETER Experiment Name: At_Far-red-induction_P Parameter: Light Value: Far-red vs. White
  misc_feature: MA Experiment 20001450 PARAMETER Experiment Name: At_Far-red-induction_P Parameter: Organism Value: A. thaliana
  misc_feature: MA Experiment 20001450 PARAMETER Experiment Name: At_Far-red-induction_P Parameter: Plant Line Value: Columbia
  misc_feature: MA Experiment 20001450 PARAMETER Experiment Name: At_Far-red-induction_P Parameter: Timepoint (hr) Value: 8
  misc_feature: MA Experiment 20001450 PARAMETER Experiment Name: At_Far-red-induction_P Parameter: Tissue Value: Whole Plant

SEQ ID NO: 34115 - protein, 223 aa, Arabidopsis thaliana; identical to SEQ ID NO: 30525
  peptide (1)..(223): Ceres Seq. ID no. 13495713
  misc_feature (51)..(201): Pfam Name: Vesicle transport v-SNARE protein Pfam Description: Vesicle transport v-SNARE protein
  misc_feature (38)..(219): Homolog of NCBI NO: 28280046 NR Description: Similar to golgi SNAP receptor complex member 1
  misc_feature (51)..(219): Homolog of NCBI NO: 3335132 NR Description: GOS28/P28 protein [Homo sapiens]
  misc_feature (51)..(219): Homolog of NCBI NO: 30388705 NR Description: Gosr1 protein [Mus musculus]
  misc_feature (51)..(219): Homolog of NCBI NO: 16758358 NR Description: golgi SNAP receptor complex member 1; cis-Golgi
  misc_feature (51)..(219): Homolog of NCBI NO: 11132038 NR Description: 28 kDa Golgi SNARE protein (Golgi SNAP receptor
  misc_feature (51)..(219): Homolog of NCBI NO: 4758456 NR Description: golgi SNAP receptor complex member 1; Golgi SNARE
  misc_feature (6)..(221): Homolog of NCBI NO: 17552950 NR Description: Predicted CDS, putative protein, with 2 coiled
  misc_feature (1)..(223): Homolog of NCBI NO: 15225431 NR Description: cis-Golgi SNARE protein, putative [Arabidopsis
  misc_feature (38)..(223): Homolog of NCBI NO: 6850926 NR Description: hypothetical protein [Cicer arietinum]
  misc_feature (1)..(223): Homolog of NCBI NO: 18394296 NR Description: cis-Golgi SNARE protein, putative [Arabidopsis

SEQ ID NO: 34116 - protein, 199 aa, Arabidopsis thaliana; identical to SEQ ID NO: 30526
  peptide (1)..(199): Ceres Seq. ID no. 13495714
  misc_feature (27)..(177): Pfam Name: Vesicle transport v-SNARE protein Pfam Description: Vesicle transport v-SNARE protein
  misc_feature (14)..(195): Homolog of NCBI NO: 28280046 NR Description: Similar to golgi SNAP receptor complex member 1
  misc_feature (27)..(195): Homolog of NCBI NO: 3335132 NR Description: GOS28/P28 protein [Homo sapiens]
  misc_feature (27)..(195): Homolog of NCBI NO: 30388705 NR Description: Gosr1 protein [Mus musculus]
  misc_feature (27)..(195): Homolog of NCBI NO: 16758358 NR Description: golgi SNAP receptor complex member 1; cis-Golgi
  misc_feature (27)..(195): Homolog of NCBI NO: 11132038 NR Description: 28 kDa Golgi SNARE protein (Golgi SNAP receptor
  misc_feature (27)..(195): Homolog of NCBI NO: 4758456 NR Description: golgi SNAP receptor complex member 1; Golgi SNARE
  misc_feature (1)..(197): Homolog of NCBI NO: 17552950 NR Description: Predicted CDS, putative protein, with 2 coiled
  misc_feature (1)..(199): Homolog of NCBI NO: 15225431 NR Description: cis-Golgi SNARE protein, putative [Arabidopsis
  misc_feature (14)..(199): Homolog of NCBI NO: 6850926 NR Description: hypothetical protein [Cicer arietinum]
  misc_feature (1)..(199): Homolog of NCBI NO: 18394296 NR Description: cis-Golgi SNARE protein, putative [Arabidopsis

SEQ ID NO: 34117 - protein, 167 aa, Arabidopsis thaliana; identical to SEQ ID NO: 30527
  peptide (1)..(167): Ceres Seq. ID no. 13495715

SEQ ID NO: 34118 - DNA, 1000 bp, Arabidopsis thaliana; identical to SEQ ID NO: 30528
  misc_feature (1)..(1000): Ceres Seq. ID no. 12332107
  misc_feature: MA Experiment ID: 108434 Result: Up-regulated in Transcription
  misc_feature: MA Experiment 108434 PARAMETER Experiment Name: At_Root_Tips_cDNA_P Parameter: Tissue Value: Root Tips
  misc_feature: MA Experiment ID: 108462 Result: Down-regulated in Transcription
  misc_feature: MA Experiment 108462 PARAMETER Experiment Name: At_Germinating_Seeds_cDNA_P Parameter: Age (day) Value: 2 vs. 0
  misc_feature: MA Experiment 108462 PARAMETER Experiment Name: At_Germinating_Seeds_cDNA_P Parameter: Tissue Value: Germinating Seeds
  misc_feature: MA Experiment ID: 108463 Result: Down-regulated in Transcription
  misc_feature: MA Experiment 108463 PARAMETER Experiment Name: At_Germinating_Seeds_cDNA_P Parameter: Age (day) Value: 3 vs. 0
  misc_feature: MA Experiment 108463 PARAMETER Experiment Name: At_Germinating_Seeds_cDNA_P Parameter: Tissue Value: Germinating Seeds
  misc_feature: MA Experiment ID: 108464 Result: Down-regulated in Transcription
  misc_feature: MA Experiment 108464 PARAMETER Experiment Name: At_Germinating_Seeds_cDNA_P Parameter: Age (day) Value: 4 vs. 0
  misc_feature: MA Experiment 108464 PARAMETER Experiment Name: At_Germinating_Seeds_cDNA_P Parameter: Tissue Value: Germinating Seeds
  misc_feature: MA Experiment ID: 108488 Result: Up-regulated in Transcription
  misc_feature: MA Experiment ID: 108489 Result: Up-regulated in Transcription
  misc_feature: MA Experiment ID: 108573 Result: Down-regulated in Transcription
  misc_feature: MA Experiment 108573 PARAMETER Experiment Name: At_Drought_cDNA_P Parameter: Timepoint (hr) Value: 6
  misc_feature: MA Experiment 108573 PARAMETER Experiment Name: At_Drought_cDNA_P Parameter: Tissue Value: Aerial
  misc_feature: MA Experiment 108573 PARAMETER Experiment Name: At_Drought_cDNA_P Parameter: Treatment Value: Drought vs. No Drought
  misc_feature: MA Experiment ID: 20000069 Result: Down-regulated in Transcription
  misc_feature: MA Experiment 20000069 PARAMETER Experiment Name: At_100uM_ABA_Mutants_cDNA_P Parameter: Plant Line Value: CS23
  misc_feature: MA Experiment 20000069 PARAMETER Experiment Name: At_100uM_ABA_Mutants_cDNA_P Parameter: Timepoint (hr) Value: 6
  misc_feature: MA Experiment 20000069 PARAMETER Experiment Name: At_100uM_ABA_Mutants_cDNA_P Parameter: Tissue Value: Aerial
  misc_feature: MA Experiment 20000069 PARAMETER Experiment Name: At_100uM_ABA_Mutants_cDNA_P Parameter: Treatment Value: 100uM ABA vs. No Treatment
  misc_feature: MA Experiment ID: 20000117 Result: Down-regulated in Transcription
  misc_feature: MA Experiment 20000117 PARAMETER Experiment Name: At_100uM_ABA_Mutants_cDNA_P Parameter: Plant Line Value: Columbia
  misc_feature: MA Experiment 20000117 PARAMETER Experiment Name: At_100uM_ABA_Mutants_cDNA_P Parameter: Timepoint (hr) Value: 6
  misc_feature: MA Experiment 20000117 PARAMETER Experiment Name: At_100uM_ABA_Mutants_cDNA_P Parameter: Tissue Value: Aerial
  misc_feature: MA Experiment 20000117 PARAMETER Experiment Name: At_100uM_ABA_Mutants_cDNA_P Parameter: Treatment Value: 100uM ABA vs. No Treatment
  misc_feature: MA Experiment ID: 20000234 Result: Up-regulated in Transcription
  misc_feature: MA Experiment 20000234 PARAMETER Experiment Name: At_Siliques_P Parameter: Age (day) Value: 21
  misc_feature: MA Experiment 20000234 PARAMETER Experiment Name: At_Siliques_P Parameter: Organism Value: A. thaliana
  misc_feature: MA Experiment 20000234 PARAMETER Experiment Name: At_Siliques_P Parameter: Plant Line Value: WS
  misc_feature: MA Experiment 20000234 PARAMETER Experiment Name: At_Siliques_P Parameter: Tissue Value: Less Than 5mm Siliques vs. Whole Plant
  misc_feature: MA Experiment ID: 20000437 Result: Down-regulated in Transcription
  misc_feature: MA Experiment 20000437 PARAMETER Experiment Name: At_Drought_P Parameter: Age (day) Value: 8
  misc_feature: MA Experiment 20000437 PARAMETER Experiment Name: At_Drought_P Parameter: Organism Value: A. thaliana
  misc_feature: MA Experiment 20000437 PARAMETER Experiment Name: At_Drought_P Parameter: Plant Line Value: WS
  misc_feature: MA Experiment 20000437 PARAMETER Experiment Name: At_Drought_P Parameter: Timepoint (hr) Value: 24
  misc_feature: MA Experiment 20000437 PARAMETER Experiment Name: At_Drought_P Parameter: Tissue Value: Whole Plant
  misc_feature: MA Experiment 20000437 PARAMETER Experiment Name: At_Drought_P Parameter: Treatment Value: Drought vs. No Drought
  misc_feature: MA Experiment ID: 20000438 Result: Up-regulated in Transcription
  misc_feature: MA Experiment 20000438 PARAMETER Experiment Name: At_Shoots__P Parameter: Age (day) Value: 14
  misc_feature: MA Experiment 20000438 PARAMETER Experiment Name: At_Shoots__P Parameter: Tissue Value: Shoots vs. Whole Plant
  misc_feature: MA Experiment ID: 20000496 Result: Up-regulated in Transcription
  misc_feature: MA Experiment 20000496 PARAMETER Experiment Name: At_Guard_Cells_P Parameter: Harvest Date Value: 7/19/2002
  misc_feature: MA Experiment 20000496 PARAMETER Experiment Name: At_Guard_Cells_P Parameter: Organism Value: Canola
  misc_feature: MA Experiment 20000496 PARAMETER Experiment Name: At_Guard_Cells_P Parameter: Tissue Value: Guard Cells vs. Leaves
  misc_feature: MA Experiment ID: 20000794 Result: Down-regulated in Transcription
  misc_feature: MA Experiment 20000794 PARAMETER Experiment Name: At_Petals_P Parameter: Age (day) Value: 23-25 days
  misc_feature: MA Experiment 20000794 PARAMETER Experiment Name: At_Petals_P Parameter: Plant Line Value: WS
  misc_feature: MA Experiment 20000794 PARAMETER Experiment Name: At_Petals_P Parameter: Tissue Value: Petals vs. Whole plant
  misc_feature: MA Experiment ID: 20001558 Result: Up-regulated in Transcription
  misc_feature: MA Experiment 20001558 PARAMETER Experiment Name: At_Drought_Soil_Dry_P Parameter: Age (day) Value: 27
  misc_feature: MA Experiment 20001558 PARAMETER Experiment Name: At_Drought_Soil_Dry_P Parameter: Organism Value: A. thaliana
  misc_feature: MA Experiment 20001558 PARAMETER Experiment Name: At_Drought_Soil_Dry_P Parameter: Plant Line Value: WS
  misc_feature: MA Experiment 20001558 PARAMETER Experiment Name: At_Drought_Soil_Dry_P Parameter: Post Timepoint (hr) Value: 6
  misc_feature: MA Experiment 20001558 PARAMETER Experiment Name: At_Drought_Soil_Dry_P Parameter: Post-Treatment Value: Re-Water vs. No Drought
  misc_feature: MA Experiment 20001558 PARAMETER Experiment Name: At_Drought_Soil_Dry_P Parameter: Timepoint (day) Value: 13
  misc_feature: MA Experiment 20001558 PARAMETER Experiment Name: At_Drought_Soil_Dry_P Parameter: Treatment Value: Drought vs. No Drought
  misc_feature: MA Experiment ID: 20001757 Result: Up-regulated in Transcription
  misc_feature: MA Experiment 20001757 PARAMETER Experiment Name: At_50mM_NH4NO3_L-to-H_P Parameter: Timepoint (hr) Value: 6
  misc_feature: MA Experiment 20001757 PARAMETER Experiment Name: At_50mM_NH4NO3_L-to-H_P Parameter: Tissue Value: Leaf
  misc_feature: MA Experiment 20001757 PARAMETER Experiment Name: At_50mM_NH4NO3_L-to-H_P Parameter: Treatment Value: 50mM NH4NO3 vs 100mM Mannitol

SEQ ID NO: 34119 - protein, 281 aa, Arabidopsis thaliana; identical to SEQ ID NO: 30529
  peptide (1)..(281): Ceres Seq. ID no. 12332108
  misc_feature (30)..(241): Pfam Name: Ribosomal S3Ae family Pfam Description: Ribosomal S3Ae family
  misc_feature (20)..(258): Homolog of NCBI NO: 82065 NR Description: ribosomal protein S3a - Madagascar periwinkle
  misc_feature (20)..(258): Homolog of NCBI NO: 1856971 NR Description: This gene is specifically expressed at the S during the cell cycle in the synchronous culture of periwinkle
  misc_feature (20)..(272): Homolog of NCBI NO: 1350986 NR Description: 40S RIBOSOMAL PROTEIN S3A (CYC07 PROTEIN)
  misc_feature (20)..(281): Homolog of NCBI NO: 6714564 NR Description: cyc07 [Daucus carota]
  misc_feature (20)..(281): Homolog of NCBI NO: 1350984 NR Description: 40S RIBOSOMAL PROTEIN S3A
  misc_feature (20)..(281): Homolog of NCBI NO: 24817254 NR Description: ribosomal protein S3a [Cicer arietinum]
  misc_feature (20)..(281): Homolog of NCBI NO: 1350983 NR Description: 40S RIBOSOMAL PROTEIN S3A (CYC07 PROTEIN)
  misc_feature (20)..(281): Homolog of NCBI NO: 1350981 NR Description: 40S RIBOSOMAL PROTEIN S3A (S PHASE SPECIFIC
  misc_feature (20)..(281): Homolog of NCBI NO: 15236171 NR Description: Putative S-phase-specific ribosomal protein
  misc_feature (20)..(281): Homolog of NCBI NO: 15229364 NR Description: putative 40S ribosomal protein S3A (S phase

SEQ ID NO: 34120 - protein, 262 aa, Arabidopsis thaliana; identical to SEQ ID NO: 30530
  peptide (1)..(262): Ceres Seq. ID no. 12332109
  misc_feature (11)..(222): Pfam Name: Ribosomal S3Ae family Pfam Description: Ribosomal S3Ae family
  misc_feature (1)..(239): Homolog of NCBI NO: 82065 NR Description: ribosomal protein S3a - Madagascar periwinkle
  misc_feature (1)..(239): Homolog of NCBI NO: 1856971 NR Description: This gene is specifically expressed at the S during the cell cycle in the synchronous culture of periwinkle
  misc_feature (1)..(253): Homolog of NCBI NO: 1350986 NR Description: 40S RIBOSOMAL PROTEIN S3A (CYC07 PROTEIN)
  misc_feature (1)..(262): Homolog of NCBI NO: 6714564 NR Description: cyc07 [Daucus carota]
  misc_feature (1)..(262): Homolog of NCBI NO: 1350984 NR Description: 40S RIBOSOMAL PROTEIN S3A
  misc_feature (1)..(262): Homolog of NCBI NO: 24817254 NR Description: ribosomal protein S3a [Cicer arietinum]
  misc_feature (1)..(262): Homolog of NCBI NO: 1350983 NR Description: 40S RIBOSOMAL PROTEIN S3A (CYC07 PROTEIN)
  misc_feature (1)..(262): Homolog of NCBI NO: 1350981 NR Description: 40S RIBOSOMAL PROTEIN S3A (S PHASE SPECIFIC
  misc_feature (1)..(262): Homolog of NCBI NO: 15236171 NR Description: Putative S-phase-specific ribosomal protein
  misc_feature (1)..(262): Homolog of NCBI NO: 15229364 NR Description: putative 40S ribosomal protein S3A (S phase

SEQ ID NO: 34121 - protein, 160 aa, Arabidopsis thaliana; identical to SEQ ID NO: 30531
  peptide (1)..(160): Ceres Seq. ID no. 12332110
  misc_feature (1)..(120): Pfam Name: Ribosomal S3Ae family Pfam Description: Ribosomal S3Ae family
  misc_feature (1)..(137): Homolog of NCBI NO: 82065 NR Description: ribosomal protein S3a - Madagascar periwinkle
  misc_feature (1)..(137): Homolog of NCBI NO: 1856971 NR Description: This gene is specifically expressed at the S during the cell cycle in the synchronous culture of periwinkle
  misc_feature (1)..(151): Homolog of NCBI NO: 1350986 NR Description: 40S RIBOSOMAL PROTEIN S3A (CYC07 PROTEIN)
  misc_feature (1)..(160): Homolog of NCBI NO: 6714564 NR Description: cyc07 [Daucus carota]
  misc_feature (1)..(160): Homolog of NCBI NO: 1350984 NR Description: 40S RIBOSOMAL PROTEIN S3A
  misc_feature (1)..(160): Homolog of NCBI NO: 24817254 NR Description: ribosomal protein S3a [Cicer arietinum]
  misc_feature (1)..(160): Homolog of NCBI NO: 1350983 NR Description: 40S RIBOSOMAL PROTEIN S3A (CYC07 PROTEIN)
  misc_feature (1)..(160): Homolog of NCBI NO: 1350981 NR Description: 40S RIBOSOMAL PROTEIN S3A (S PHASE SPECIFIC
  misc_feature (1)..(160): Homolog of NCBI NO: 15236171 NR Description: Putative S-phase-specific ribosomal protein
  misc_feature (1)..(160): Homolog of NCBI NO: 15229364 NR Description: putative 40S ribosomal protein S3A (S phase

SEQ ID NO: 34122 - DNA, 698 bp, Arabidopsis thaliana; identical to SEQ ID NO: 30532
  misc_feature (1)..(698): Ceres Seq. ID no. 12333385
  misc_feature: MA Experiment ID: 108434 Result: Up-regulated in Transcription
  misc_feature: MA Experiment 108434 PARAMETER Experiment Name: At_Root_Tips_cDNA_P Parameter: Tissue Value: Root Tips
  misc_feature: MA Experiment ID: 108462 Result: Down-regulated in Transcription
  misc_feature: MA Experiment 108462 PARAMETER Experiment Name: At_Germinating_Seeds_cDNA_P Parameter: Age (day) Value: 2 vs. 0
  misc_feature: MA Experiment 108462 PARAMETER Experiment Name: At_Germinating_Seeds_cDNA_P Parameter: Tissue Value: Germinating Seeds
  misc_feature: MA Experiment ID: 108463 Result: Down-regulated in Transcription
  misc_feature: MA Experiment 108463 PARAMETER Experiment Name: At_Germinating_Seeds_cDNA_P Parameter: Age (day) Value: 3 vs. 0
  misc_feature: MA Experiment 108463 PARAMETER Experiment Name: At_Germinating_Seeds_cDNA_P Parameter: Tissue Value: Germinating Seeds
  misc_feature: MA Experiment ID: 108464 Result: Down-regulated in Transcription
  misc_feature: MA Experiment 108464 PARAMETER Experiment Name: At_Germinating_Seeds_cDNA_P Parameter: Age (day) Value: 4 vs. 0
  misc_feature: MA Experiment 108464 PARAMETER Experiment Name: At_Germinating_Seeds_cDNA_P Parameter: Tissue Value: Germinating Seeds
  misc_feature: MA Experiment ID: 108572 Result: Down-regulated in Transcription
  misc_feature: MA Experiment 108572 PARAMETER Experiment Name: At_Drought_cDNA_P Parameter: Timepoint (hr) Value: 1
  misc_feature: MA Experiment 108572 PARAMETER Experiment Name: At_Drought_cDNA_P Parameter: Tissue Value: Aerial
  misc_feature: MA Experiment 108572 PARAMETER Experiment Name: At_Drought_cDNA_P Parameter: Treatment Value: Drought vs. No Drought
  misc_feature: MA Experiment ID: 108573 Result: Down-regulated in Transcription
  misc_feature: MA Experiment 108573 PARAMETER Experiment Name: At_Drought_cDNA_P Parameter: Timepoint (hr) Value: 6
  misc_feature: MA Experiment 108573 PARAMETER Experiment Name: At_Drought_cDNA_P Parameter: Tissue Value: Aerial
  misc_feature: MA Experiment 108573 PARAMETER Experiment Name: At_Drought_cDNA_P Parameter: Treatment Value: Drought vs. No Drought
  misc_feature: MA Experiment ID: 108579 Result: Up-regulated in Transcription
  misc_feature: MA Experiment 108579 PARAMETER Experiment Name: At_4deg_Cold_cDNA_P Parameter: Temperature (deg C) Value: 4 vs. 22
  misc_feature: MA Experiment 108579 PARAMETER Experiment Name: At_4deg_Cold_cDNA_P Parameter: Timepoint (hr) Value: 6
  misc_feature: MA Experiment 108579 PARAMETER Experiment Name: At_4deg_Cold_cDNA_P Parameter: Tissue Value: Aerial
  misc_feature: MA Experiment ID: 20000112 Result: Down-regulated in Transcription
  misc_feature: MA Experiment 20000112 PARAMETER Experiment Name: At_42deg_Heat_cDNA_P Parameter: Temperature (deg C) Value: 42 vs. 22
  misc_feature: MA Experiment 20000112 PARAMETER Experiment Name: At_42deg_Heat_cDNA_P Parameter: Timepoint (hr) Value: 2
  misc_feature: MA Experiment 20000112 PARAMETER Experiment Name: At_42deg_Heat_cDNA_P Parameter: Tissue Value: Aerial
  misc_feature: MA Experiment ID: 20000180 Result: Down-regulated in Transcription
  misc_feature: MA Experiment 20000180 PARAMETER Experiment Name: At_Germinating_Seeds_P Parameter: Age (hr) Value: 24 vs. 0
  misc_feature: MA Experiment 20000180 PARAMETER Experiment Name: At_Germinating_Seeds_P Parameter: Tissue Value: Germinating Seeds
  misc_feature: MA Experiment ID: 20000436 Result: Down-regulated in Transcription
  misc_feature: MA Experiment 20000436 PARAMETER Experiment Name: At_Drought_P Parameter: Age (day) Value: 7
  misc_feature: MA Experiment 20000436 PARAMETER Experiment Name: At_Drought_P Parameter: Organism Value: A. thaliana
  misc_feature: MA Experiment 20000436 PARAMETER Experiment Name: At_Drought_P Parameter: Plant Line Value: WS
  misc_feature: MA Experiment 20000436 PARAMETER Experiment Name: At_Drought_P Parameter: Timepoint (hr) Value: 12
  misc_feature: MA Experiment 20000436 PARAMETER Experiment Name: At_Drought_P Parameter: Tissue Value: Whole Plant
  misc_feature: MA Experiment 20000436 PARAMETER Experiment Name: At_Drought_P Parameter: Treatment Value: Drought vs. No Drought
  misc_feature: MA Experiment ID: 20000794 Result: Down-regulated in Transcription
  misc_feature: MA Experiment 20000794 PARAMETER Experiment Name: At_Petals_P Parameter: Age (day) Value: 23-25 days
  misc_feature: MA Experiment 20000794 PARAMETER Experiment Name: At_Petals_P Parameter: Plant Line Value: WS
  misc_feature: MA Experiment 20000794 PARAMETER Experiment Name: At_Petals_P Parameter: Tissue Value: Petals vs. Whole plant
  misc_feature: MA Experiment ID: 20001247 Result: Down-regulated in Transcription
  misc_feature: MA Experiment 20001247 PARAMETER Experiment Name: At_Far-red-induction_P Parameter: Age (day) Value: 7
  misc_feature: MA Experiment 20001247 PARAMETER Experiment Name: At_Far-red-induction_P Parameter: Light Value: Far-red vs. White
  misc_feature: MA Experiment 20001247 PARAMETER Experiment Name: At_Far-red-induction_P Parameter: Organism Value: A. thaliana
  misc_feature: MA Experiment 20001247 PARAMETER Experiment Name: At_Far-red-induction_P Parameter: Plant Line Value: Columbia
  misc_feature: MA Experiment 20001247 PARAMETER Experiment Name: At_Far-red-induction_P Parameter: Timepoint (hr) Value: 1
  misc_feature: MA Experiment 20001247 PARAMETER Experiment Name: At_Far-red-induction_P Parameter: Tissue Value: Whole Plant
  misc_feature: MA Experiment ID: 20001558 Result: Up-regulated in Transcription
  misc_feature: MA Experiment 20001558 PARAMETER Experiment Name: At_Drought_Soil_Dry_P Parameter: Age (day) Value: 27
  misc_feature: MA Experiment 20001558 PARAMETER Experiment Name: At_Drought_Soil_Dry_P Parameter: Organism Value: A. thaliana
  misc_feature: MA Experiment 20001558 PARAMETER Experiment Name: At_Drought_Soil_Dry_P Parameter: Plant Line Value: WS
  misc_feature: MA Experiment 20001558 PARAMETER Experiment Name: At_Drought_Soil_Dry_P Parameter: Post Timepoint (hr) Value: 6
  misc_feature: MA Experiment 20001558 PARAMETER Experiment Name: At_Drought_Soil_Dry_P Parameter: Post-Treatment Value: Re-Water vs. No Drought
  misc_feature: MA Experiment 20001558 PARAMETER Experiment Name: At_Drought_Soil_Dry_P Parameter: Timepoint (day) Value: 13
  misc_feature: MA Experiment 20001558 PARAMETER Experiment Name: At_Drought_Soil_Dry_P Parameter: Treatment Value: Drought vs. No Drought
  misc_feature: MA Experiment ID: 20001560 Result: Up-regulated in Transcription
  misc_feature: MA Experiment 20001560 PARAMETER Experiment Name: At_Drought_Soil_Dry_P Parameter: Age (day) Value: 28
  misc_feature: MA Experiment 20001560 PARAMETER Experiment Name: At_Drought_Soil_Dry_P Parameter: Organism Value: A. thaliana
  misc_feature: MA Experiment 20001560 PARAMETER Experiment Name: At_Drought_Soil_Dry_P Parameter: Plant Line Value: WS
  misc_feature: MA Experiment 20001560 PARAMETER Experiment Name: At_Drought_Soil_Dry_P Parameter: Post Timepoint (hr) Value: None
  misc_feature: MA Experiment 20001560 PARAMETER Experiment Name: At_Drought_Soil_Dry_P Parameter: Post-Treatment Value: None
  misc_feature: MA Experiment 20001560 PARAMETER Experiment Name: At_Drought_Soil_Dry_P Parameter: Timepoint (day) Value: 14
  misc_feature: MA Experiment 20001560 PARAMETER Experiment Name: At_Drought_Soil_Dry_P Parameter: Treatment Value: Drought vs. No Drought
  misc_feature: MA Experiment ID: 20001757 Result: Up-regulated in Transcription
  misc_feature: MA Experiment 20001757 PARAMETER Experiment Name: At_50mM_NH4NO3_L-to-H_P Parameter: Timepoint (hr) Value: 6
  misc_feature: MA Experiment 20001757 PARAMETER Experiment Name: At_50mM_NH4NO3_L-to-H_P Parameter: Tissue Value: Leaf
  misc_feature: MA Experiment 20001757 PARAMETER Experiment Name: At_50mM_NH4NO3_L-to-H_P Parameter: Treatment Value: 50mM NH4NO3 vs 100mM Mannitol

SEQ ID NO: 34123 - protein, 175 aa, Arabidopsis thaliana; identical to SEQ ID NO: 30533
  peptide (1)..(175): Ceres Seq. ID no. 12333386
  misc_feature (68)..(174): Homolog of NCBI NO: 8745040 NR Description: conserved hypothetical protein L6293.01
  misc_feature (68)..(174): Homolog of NCBI NO: 15029401 NR Description: unknown [Leishmania infantum]
  misc_feature (60)..(170): Homolog of NCBI NO: 15229322 NR Description: unknown protein; protein id: At3g04620.1
  misc_feature (66)..(174): Homolog of NCBI NO: 34910240 NR Description: OSJNBa0089K24.4 [Oryza sativa (japonica
  misc_feature (46)..(175): Homolog of NCBI NO: 18403464 NR Description: expressed protein
  misc_feature (46)..(175): Homolog of NCBI NO: 18397011 NR Description: expressed protein

SEQ ID NO: 34124 - protein, 130 aa, Arabidopsis thaliana; identical to SEQ ID NO: 30534
  peptide (1)..(130): Ceres Seq. ID no. 12333387
  misc_feature (23)..(129): Homolog of NCBI NO: 8745040 NR Description: conserved hypothetical protein L6293.01
  misc_feature (23)..(129): Homolog of NCBI NO: 15029401 NR Description: unknown [Leishmania infantum]
  misc_feature (15)..(125): Homolog of NCBI NO: 15229322 NR Description: unknown protein; protein id: At3g04620.1
  misc_feature (21)..(129): Homolog of NCBI NO: 34910240 NR Description: OSJNBa0089K24.4 [Oryza sativa (japonica
  misc_feature (1)..(130): Homolog of NCBI NO: 18403464 NR Description: expressed protein
  misc_feature (1)..(130): Homolog of NCBI NO: 18397011 NR Description: expressed protein

SEQ ID NO: 34125 - protein, 120 aa, Arabidopsis thaliana; identical to SEQ ID NO: 30535
  peptide (1)..(120): Ceres Seq. ID no. 12333388
  misc_feature (13)..(119): Homolog of NCBI NO: 8745040 NR Description: conserved hypothetical protein L6293.01
  misc_feature (13)..(119): Homolog of NCBI NO: 15029401 NR Description: unknown [Leishmania infantum]
  misc_feature (5)..(115): Homolog of NCBI NO: 15229322 NR Description: unknown protein; protein id: At3g04620.1
  misc_feature (11)..(119): Homolog of NCBI NO: 34910240 NR Description: OSJNBa0089K24.4 [Oryza sativa (japonica
  misc_feature (1)..(120): Homolog of NCBI NO: 18403464 NR Description: expressed protein
  misc_feature (1)..(120): Homolog of NCBI NO: 18397011 NR Description: expressed protein

SEQ ID NO: 34126 - DNA, 592 bp, Arabidopsis thaliana; identical to SEQ ID NO: 30536
  misc_feature (1)..(592): Ceres Seq. ID no. 12339207
  misc_feature: MA Experiment ID: 20000234 Result: Up-regulated in Transcription
  misc_feature: MA Experiment 20000234 PARAMETER Experiment Name: At_Siliques_P Parameter: Age (day) Value: 21
  misc_feature: MA Experiment 20000234 PARAMETER Experiment Name: At_Siliques_P Parameter: Organism Value: A. thaliana
  misc_feature: MA Experiment 20000234 PARAMETER Experiment Name: At_Siliques_P Parameter: Plant Line Value: WS
  misc_feature: MA Experiment 20000234 PARAMETER Experiment Name: At_Siliques_P Parameter: Tissue Value: Less Than 5mm Siliques vs. Whole Plant
  misc_feature: MA Experiment ID: 20000235 Result: Up-regulated in Transcription
  misc_feature: MA Experiment 20000235 PARAMETER Experiment Name: At_Siliques_P Parameter: Age (day) Value: 21
  misc_feature: MA Experiment 20000235 PARAMETER Experiment Name: At_Siliques_P Parameter: Organism Value: A. thaliana
  misc_feature: MA Experiment 20000235 PARAMETER Experiment Name: At_Siliques_P Parameter: Plant Line Value: WS
  misc_feature: MA Experiment 20000235 PARAMETER Experiment Name: At_Siliques_P Parameter: Tissue Value: 5-10mm Siliques vs. Whole Plant
  misc_feature: MA Experiment ID: 20000437 Result: Down-regulated in Transcription
  misc_feature: MA Experiment 20000437 PARAMETER Experiment Name: At_Drought_P Parameter: Age (day) Value: 8
  misc_feature: MA Experiment 20000437 PARAMETER Experiment Name: At_Drought_P Parameter: Organism Value: A. thaliana
  misc_feature: MA Experiment 20000437 PARAMETER Experiment Name: At_Drought_P Parameter: Plant Line Value: WS
  misc_feature: MA Experiment 20000437 PARAMETER Experiment Name: At_Drought_P Parameter: Timepoint (hr) Value: 24
  misc_feature: MA Experiment 20000437 PARAMETER Experiment Name: At_Drought_P Parameter: Tissue Value: Whole Plant
  misc_feature: MA Experiment 20000437 PARAMETER Experiment Name: At_Drought_P Parameter: Treatment Value: Drought vs. No Drought
  misc_feature: MA Experiment ID: 20000794 Result: Up-regulated in Transcription
  misc_feature: MA Experiment 20000794 PARAMETER Experiment Name: At_Petals_P Parameter: Age (day) Value: 23-25 days
  misc_feature: MA Experiment 20000794 PARAMETER Experiment Name: At_Petals_P Parameter: Plant Line Value: WS
  misc_feature: MA Experiment 20000794 PARAMETER Experiment Name: At_Petals_P Parameter: Tissue Value: Petals vs. Whole plant
  misc_feature: MA Experiment ID: 20001905 Result: Down-regulated in Transcription
  misc_feature: MA Experiment 20001905 PARAMETER Experiment Name: At_Drought_Reproduction_P Parameter: Age (day) Value: 40
  misc_feature: MA Experiment 20001905 PARAMETER Experiment Name: At_Drought_Reproduction_P Parameter: Organism Value: A. thaliana
  misc_feature: MA Experiment 20001905 PARAMETER Experiment Name: At_Drought_Reproduction_P Parameter: Plant Line Value: WS
  misc_feature: MA Experiment 20001905 PARAMETER Experiment Name: At_Drought_Reproduction_P Parameter: Timepoint (day) Value: 10
  misc_feature: MA Experiment 20001905 PARAMETER Experiment Name: At_Drought_Reproduction_P Parameter: Tissue Value: Rosettes
  misc_feature: MA Experiment 20001905 PARAMETER Experiment Name: At_Drought_Reproduction_P Parameter: Treatment Value: Drought vs. No Drought

SEQ ID NO: 34127 - protein, 115 aa, Arabidopsis thaliana; identical to SEQ ID NO: 30537
  peptide (1)..(115): Ceres Seq. ID no. 12339208
  misc_feature (1)..(97): Pfam Name: Aldose 1-epimerase Pfam Description: Aldose 1-epimerase
  misc_feature (1)..(114): Homolog of NCBI NO: 16612258 NR Description: AT3g01590/F4P13_13 [Arabidopsis thaliana]
  misc_feature (1)..(114): Homolog of NCBI NO: 11281678 NR Description: hypothetical protein F18O22.290 - Arabidopsis
  misc_feature (1)..(114): Homolog of NCBI NO: 18395868 NR Description: expressed protein
  misc_feature (1)..(114): Homolog of NCBI NO: 28393808 NR Description: unknown protein [Arabidopsis thaliana]
  misc_feature (1)..(114): Homolog of NCBI NO: 18417396 NR Description: putative protein
  misc_feature (1)..(114): Homolog of NCBI NO: 2501555 NR Description: POSSIBLE APOSPORY-ASSOCIATED PROTEIN C
  misc_feature (1)..(115): Homolog of NCBI NO: 19387263 NR Description: putative apospory-associated protein C
  misc_feature (1)..(115): Homolog of NCBI NO: 40253263 NR Description: putative Aldose 1-epimerase
  misc_feature (2)..(115): Homolog of NCBI NO: 38344152 NR Description: OSJNBa0041A02.19 [Oryza sativa (japonica
  misc_feature (1)..(115): Homolog of NCBI NO: 15242099 NR Description: apospory-associated protein C

SEQ ID NO: 34128 - DNA, 855 bp, Arabidopsis thaliana; identical to SEQ ID NO: 30538
  misc_feature (1)..(855): Ceres Seq. ID no. 13489834
  misc_feature: MA Experiment ID: 108434 Result: Up-regulated in Transcription
  misc_feature: MA Experiment 108434 PARAMETER Experiment Name: At_Root_Tips_cDNA_P Parameter: Tissue Value: Root Tips
  misc_feature: MA Experiment ID: 108461 Result: Up-regulated in Transcription
  misc_feature: MA Experiment 108461 PARAMETER Experiment Name: At_Germinating_Seeds_cDNA_P Parameter: Age (day) Value: 1 vs. 0
  misc_feature: MA Experiment 108461 PARAMETER Experiment Name: At_Germinating_Seeds_cDNA_P Parameter: Tissue Value: Germinating Seeds
  misc_feature: MA Experiment ID: 108462 Result: Up-regulated in Transcription
  misc_feature: MA Experiment 108462 PARAMETER Experiment Name: At_Germinating_Seeds_cDNA_P Parameter: Age (day) Value: 2 vs. 0
  misc_feature: MA Experiment 108462 PARAMETER Experiment Name: At_Germinating_Seeds_cDNA_P Parameter: Tissue Value: Germinating Seeds
  misc_feature: MA Experiment ID: 108463 Result: Up-regulated in Transcription
  misc_feature: MA Experiment 108463 PARAMETER Experiment Name: At_Germinating_Seeds_cDNA_P Parameter: Age (day) Value: 3 vs. 0
  misc_feature: MA Experiment 108463 PARAMETER Experiment Name: At_Germinating_Seeds_cDNA_P Parameter: Tissue Value: Germinating Seeds
  misc_feature: MA Experiment ID: 108464 Result: Up-regulated in Transcription
  misc_feature: MA Experiment 108464 PARAMETER Experiment Name: At_Germinating_Seeds_cDNA_P Parameter: Age (day) Value: 4 vs. 0
  misc_feature: MA Experiment 108464 PARAMETER Experiment Name: At_Germinating_Seeds_cDNA_P Parameter: Tissue Value: Germinating Seeds
  misc_feature: MA Experiment ID: 108572 Result: Down-regulated in Transcription
  misc_feature: MA Experiment 108572 PARAMETER Experiment Name: At_Drought_cDNA_P Parameter: Timepoint (hr) Value: 1
  misc_feature: MA Experiment 108572 PARAMETER Experiment Name: At_Drought_cDNA_P Parameter: Tissue Value: Aerial
  misc_feature: MA Experiment 108572 PARAMETER Experiment Name: At_Drought_cDNA_P Parameter: Treatment Value: Drought vs. No Drought
  misc_feature: MA Experiment ID: 20000111 Result: Down-regulated in Transcription
  misc_feature: MA Experiment 20000111 PARAMETER Experiment Name: At_42deg_Heat_cDNA_P Parameter: Temperature (deg C) Value: 42 vs. 22
  misc_feature: MA Experiment 20000111 PARAMETER Experiment Name: At_42deg_Heat_cDNA_P Parameter: Timepoint (hr) Value: 6
  misc_feature: MA Experiment 20000111 PARAMETER Experiment Name: At_42deg_Heat_cDNA_P Parameter: Tissue Value: Aerial
  misc_feature: MA Experiment ID: 20000112 Result: Down-regulated in Transcription
  misc_feature: MA Experiment 20000112 PARAMETER Experiment Name: At_42deg_Heat_cDNA_P Parameter: Temperature (deg C) Value: 42 vs. 22
  misc_feature: MA Experiment 20000112 PARAMETER Experiment Name: At_42deg_Heat_cDNA_P Parameter: Timepoint (hr) Value: 2
  misc_feature: MA Experiment 20000112 PARAMETER Experiment Name: At_42deg_Heat_cDNA_P Parameter: Tissue Value: Aerial
  misc_feature: MA Experiment ID: 20000113 Result: Down-regulated in Transcription
  misc_feature: MA Experiment 20000113 PARAMETER Experiment Name: At_42deg_Heat_cDNA_P Parameter: Temperature (deg C) Value: 42 vs. 22
  misc_feature: MA Experiment 20000113 PARAMETER Experiment Name: At_42deg_Heat_cDNA_P Parameter: Timepoint (hr) Value: 8
  misc_feature: MA Experiment 20000113 PARAMETER Experiment Name: At_42deg_Heat_cDNA_P Parameter: Tissue Value: Aerial
  misc_feature: MA Experiment ID: 20000144 Result: Down-regulated in Transcription
  misc_feature: MA Experiment 20000144 PARAMETER Experiment Name: At_42deg_Heat_cDNA_P Parameter: Temperature (deg C) Value: 42 vs. 22
  misc_feature: MA Experiment 20000144 PARAMETER Experiment Name: At_42deg_Heat_cDNA_P Parameter: Timepoint (hr) Value: 1
  misc_feature: MA Experiment 20000144 PARAMETER Experiment Name: At_42deg_Heat_cDNA_P Parameter: Tissue Value: Aerial
  misc_feature: MA Experiment ID: 20000180 Result: Up-regulated in Transcription
  misc_feature: MA Experiment 20000180 PARAMETER Experiment Name: At_Germinating_Seeds_P Parameter: Age (hr) Value: 24 vs. 0
  misc_feature: MA Experiment 20000180 PARAMETER Experiment Name: At_Germinating_Seeds_P Parameter: Tissue Value: Germinating Seeds
  misc_feature: MA Experiment ID: 20000184 Result: Up-regulated in Transcription
  misc_feature: MA Experiment 20000184 PARAMETER Experiment Name: At_Shoots__P Parameter: Age (day) Value: 7
  misc_feature: MA Experiment 20000184 PARAMETER Experiment Name: At_Shoots__P Parameter: Tissue Value: Shoots vs. Whole Plant
  misc_feature: MA Experiment ID: 20000436 Result: Down-regulated in Transcription
  misc_feature: MA Experiment 20000436 PARAMETER Experiment Name: At_Drought_P Parameter: Age (day) Value: 7
  misc_feature: MA Experiment 20000436 PARAMETER Experiment Name: At_Drought_P Parameter: Organism Value: A. thaliana
  misc_feature: MA Experiment 20000436 PARAMETER Experiment Name: At_Drought_P Parameter: Plant Line Value: WS
  misc_feature: MA Experiment 20000436 PARAMETER Experiment Name: At_Drought_P Parameter: Timepoint (hr) Value: 12
  misc_feature: MA Experiment 20000436 PARAMETER Experiment Name: At_Drought_P Parameter: Tissue Value: Whole Plant
  misc_feature: MA Experiment 20000436 PARAMETER Experiment Name: At_Drought_P Parameter: Treatment Value: Drought vs. No Drought
  misc_feature: MA Experiment ID: 20000437 Result: Down-regulated in Transcription
  misc_feature: MA Experiment 20000437 PARAMETER Experiment Name: At_Drought_P Parameter: Age (day) Value: 8
  misc_feature: MA Experiment 20000437 PARAMETER Experiment Name: At_Drought_P Parameter: Organism Value: A. thaliana
  misc_feature: MA Experiment 20000437 PARAMETER Experiment Name: At_Drought_P Parameter: Plant Line Value: WS
  misc_feature: MA Experiment 20000437 PARAMETER Experiment Name: At_Drought_P Parameter: Timepoint (hr) Value: 24
  misc_feature: MA Experiment 20000437 PARAMETER Experiment Name: At_Drought_P Parameter: Tissue Value: Whole Plant
  misc_feature: MA Experiment 20000437 PARAMETER Experiment Name: At_Drought_P Parameter: Treatment Value: Drought vs. No Drought
  misc_feature: MA Experiment ID: 20000495 Result: Up-regulated in Transcription
  misc_feature: MA Experiment 20000495 PARAMETER Experiment Name: At_Guard_Cells_P Parameter: Harvest Date Value: 8/2/2002
  misc_feature: MA Experiment 20000495 PARAMETER Experiment Name: At_Guard_Cells_P Parameter: Organism Value: A. thaliana
  misc_feature: MA Experiment 20000495 PARAMETER Experiment Name: At_Guard_Cells_P Parameter: Tissue Value: Guard Cells vs. Leaves
  misc_feature: MA Experiment ID: 20001555 Result: Down-regulated in Transcription
  misc_feature: MA Experiment 20001555 PARAMETER Experiment Name: At_Drought_Soil_Dry_P Parameter: Age (day) Value: 24
  misc_feature: MA Experiment 20001555 PARAMETER Experiment Name: At_Drought_Soil_Dry_P Parameter: Organism Value: A. thaliana
  misc_feature: MA Experiment 20001555 PARAMETER Experiment Name: At_Drought_Soil_Dry_P Parameter: Plant Line Value: WS
  misc_feature: MA Experiment 20001555 PARAMETER Experiment Name: At_Drought_Soil_Dry_P Parameter: Post Timepoint (hr) Value: None
  misc_feature: MA Experiment 20001555 PARAMETER Experiment Name: At_Drought_Soil_Dry_P Parameter: Post-Treatment Value: None
  misc_feature: MA Experiment 20001555 PARAMETER Experiment Name: At_Drought_Soil_Dry_P Parameter: Timepoint (day) Value: 10
  misc_feature: MA Experiment 20001555 PARAMETER Experiment Name: At_Drought_Soil_Dry_P Parameter: Treatment Value: Drought vs. No Drought
  misc_feature: MA Experiment ID: 20001556 Result: Down-regulated in Transcription
  misc_feature: MA Experiment 20001556 PARAMETER Experiment Name: At_Drought_Soil_Dry_P Parameter: Age (day) Value: 26
  misc_feature: MA Experiment 20001556 PARAMETER Experiment Name: At_Drought_Soil_Dry_P Parameter: Organism Value: A. thaliana
  misc_feature: MA Experiment 20001556 PARAMETER Experiment Name: At_Drought_Soil_Dry_P Parameter: Plant Line Value: WS
  misc_feature: MA Experiment 20001556 PARAMETER Experiment Name: At_Drought_Soil_Dry_P Parameter: Post Timepoint (hr) Value: None
  misc_feature: MA Experiment 20001556 PARAMETER Experiment Name: At_Drought_Soil_Dry_P Parameter: Post-Treatment Value: None
  misc_feature: MA Experiment 20001556 PARAMETER Experiment Name: At_Drought_Soil_Dry_P Parameter: Timepoint (day) Value: 12
  misc_feature: MA Experiment 20001556 PARAMETER Experiment Name: At_Drought_Soil_Dry_P Parameter: Treatment Value: Drought vs. No Drought
  misc_feature: MA Experiment ID: 20001558 Result: Down-regulated in Transcription
  misc_feature: MA Experiment 20001558 PARAMETER Experiment Name: At_Drought_Soil_Dry_P Parameter: Age (day) Value: 27
  misc_feature: MA Experiment 20001558 PARAMETER Experiment Name: At_Drought_Soil_Dry_P Parameter: Organism Value: A. thaliana
  misc_feature: MA Experiment 20001558 PARAMETER Experiment Name: At_Drought_Soil_Dry_P Parameter: Plant Line Value: WS
  misc_feature: MA Experiment 20001558 PARAMETER Experiment Name: At_Drought_Soil_Dry_P Parameter: Post Timepoint (hr) Value: 6
  misc_feature: MA Experiment 20001558 PARAMETER Experiment Name: At_Drought_Soil_Dry_P Parameter: Post-Treatment Value: Re-Water vs. No Drought
  misc_feature: MA Experiment 20001558 PARAMETER Experiment Name: At_Drought_Soil_Dry_P Parameter: Timepoint (day) Value: 13
  misc_feature: MA Experiment 20001558 PARAMETER Experiment Name: At_Drought_Soil_Dry_P Parameter: Treatment Value: Drought vs. No Drought
  misc_feature: MA Experiment ID: 20001560 Result: Up-regulated in Transcription
  misc_feature: MA Experiment 20001560 PARAMETER Experiment Name: At_Drought_Soil_Dry_P Parameter: Age (day) Value: 28
  misc_feature: MA Experiment 20001560 PARAMETER Experiment Name: At_Drought_Soil_Dry_P Parameter: Organism Value: A. thaliana
  misc_feature: MA Experiment 20001560 PARAMETER Experiment Name: At_Drought_Soil_Dry_P Parameter: Plant Line Value: WS
  misc_feature: MA Experiment 20001560 PARAMETER Experiment Name: At_Drought_Soil_Dry_P Parameter: Post Timepoint (hr) Value: None
  misc_feature: MA Experiment 20001560 PARAMETER Experiment Name: At_Drought_Soil_Dry_P Parameter: Post-Treatment Value: None
  misc_feature: MA Experiment 20001560 PARAMETER Experiment Name: At_Drought_Soil_Dry_P Parameter: Timepoint (day) Value: 14
  misc_feature: MA Experiment 20001560 PARAMETER Experiment Name: At_Drought_Soil_Dry_P Parameter: Treatment Value: Drought vs. No Drought

SEQ ID NO: 34129 - protein, 183 aa, Arabidopsis thaliana; identical to SEQ ID NO: 30539
  peptide (1)..(183): Ceres Seq. ID no. 13489835
  misc_feature (16)..(159): Homolog of NCBI NO: 34907616 NR Description: contains EST C27797(C52876)~unknown protein
  misc_feature (6)..(183): Homolog of NCBI NO: 38345379 NR Description: OSJNBa0067K08.8 [Oryza sativa (japonica
  misc_feature (10)..(183): Homolog of NCBI NO: 15239407 NR Description: hypothetical protein [Arabidopsis thaliana]
  misc_feature (1)..(183): Homolog of NCBI NO: 15239379 NR Description: expressed protein [Arabidopsis thaliana]
  misc_feature (1)..(183): Homolog of NCBI NO: 18396262 NR Description: expressed protein [Arabidopsis thaliana]
  misc_feature (1)..(183): Homolog of NCBI NO: 21553926 NR Description: unknown [Arabidopsis thaliana]
  misc_feature (1)..(183): Homolog of NCBI NO: 15237310 NR Description: expressed protein [Arabidopsis thaliana]
  misc_feature (1)..(183): Homolog of NCBI NO: 21703131 NR Description: AT5g16250/T21H19_170 [Arabidopsis thaliana]

SEQ ID NO: 34130 - protein, 150 aa, Arabidopsis thaliana; identical to SEQ ID NO: 30540
  peptide (1)..(150): Ceres Seq. ID no. 13489836

SEQ ID NO: 34131 - protein, 101 aa, Arabidopsis thaliana; identical to SEQ ID NO: 30541
  peptide (1)..(101): Ceres Seq. ID no. 13489837
  misc_feature (1)..(77): Homolog of NCBI NO: 34907616 NR Description: contains EST C27797(C52876)~unknown protein
  misc_feature (1)..(101): Homolog of NCBI NO: 38345379 NR Description: OSJNBa0067K08.8 [Oryza sativa (japonica
  misc_feature (1)..(101): Homolog of NCBI NO: 15239407 NR Description: hypothetical protein [Arabidopsis thaliana]
  misc_feature (1)..(101): Homolog of NCBI NO: 15239379 NR Description: expressed protein [Arabidopsis thaliana]
  misc_feature (1)..(101): Homolog of NCBI NO: 18396262 NR Description: expressed protein [Arabidopsis thaliana]
  misc_feature (1)..(101): Homolog of NCBI NO: 21553926 NR Description: unknown [Arabidopsis thaliana]
  misc_feature (1)..(101): Homolog of NCBI NO: 15237310 NR Description: expressed protein [Arabidopsis thaliana]
  misc_feature (1)..(101): Homolog of NCBI NO: 21703131 NR Description: AT5g16250/T21H19_170 [Arabidopsis thaliana]

SEQ ID NO: 34132 - DNA, 901 bp, Arabidopsis thaliana; identical to SEQ ID NO: 30542
  misc_feature (1)..(901): Ceres Seq. ID no. 12332065
  misc_feature: MA Experiment ID: 108469 Result: Up-regulated in Transcription
  misc_feature: MA Experiment ID: 108579 Result: Down-regulated in Transcription
  misc_feature: MA Experiment 108579 PARAMETER Experiment Name: At_4deg_Cold_cDNA_P Parameter: Temperature (deg C) Value: 4 vs. 22
  misc_feature: MA Experiment 108579 PARAMETER Experiment Name: At_4deg_Cold_cDNA_P Parameter: Timepoint (hr) Value: 6
  misc_feature: MA Experiment 108579 PARAMETER Experiment Name: At_4deg_Cold_cDNA_P Parameter: Tissue Value: Aerial
  misc_feature: MA Experiment ID: 20000227 Result: Down-regulated in Transcription
  misc_feature: MA Experiment 20000227 PARAMETER Experiment Name: At_Root-Tips-vs-Tops_P Parameter: Tissue Value: Root Tips vs. Root Tops
  misc_feature: MA Experiment ID: 20001247 Result: Up-regulated in Transcription
  misc_feature: MA Experiment 20001247 PARAMETER Experiment Name: At_Far-red-induction_P Parameter: Age (day) Value: 7
  misc_feature: MA Experiment 20001247 PARAMETER Experiment Name: At_Far-red-induction_P Parameter: Light Value: Far-red vs. White
  misc_feature: MA Experiment 20001247 PARAMETER Experiment Name: At_Far-red-induction_P Parameter: Organism Value: A. thaliana
  misc_feature: MA Experiment 20001247 PARAMETER Experiment Name: At_Far-red-induction_P Parameter: Plant Line Value: Columbia
  misc_feature: MA Experiment 20001247 PARAMETER Experiment Name: At_Far-red-induction_P Parameter: Timepoint (hr) Value: 1
  misc_feature: MA Experiment 20001247 PARAMETER Experiment Name: At_Far-red-induction_P Parameter: Tissue Value: Whole Plant
  misc_feature: MA Experiment ID: 20001248 Result: Up-regulated in Transcription
  misc_feature: MA Experiment 20001248 PARAMETER Experiment Name: At_Far-red-induction_P Parameter: Age (day) Value: 7
  misc_feature: MA Experiment 20001248 PARAMETER Experiment Name: At_Far-red-induction_P Parameter: Light Value: Far-red vs. White
  misc_feature: MA Experiment 20001248 PARAMETER Experiment Name: At_Far-red-induction_P Parameter: Organism Value: A. thaliana
  misc_feature: MA Experiment 20001248 PARAMETER Experiment Name: At_Far-red-induction_P Parameter: Plant Line Value: Columbia
  misc_feature: MA Experiment 20001248 PARAMETER Experiment Name: At_Far-red-induction_P Parameter: Timepoint (hr) Value: 4
  misc_feature: MA Experiment 20001248 PARAMETER Experiment Name: At_Far-red-induction_P Parameter: Tissue Value: Whole Plant
  misc_feature: MA Experiment ID: 20001451 Result: Up-regulated in Transcription
  misc_feature: MA Experiment 20001451 PARAMETER Experiment Name: At_Far-red-induction_P Parameter: Age (day) Value: 7
  misc_feature: MA Experiment 20001451 PARAMETER Experiment Name: At_Far-red-induction_P Parameter: Light Value: Far-red vs. White
  misc_feature: MA Experiment 20001451 PARAMETER Experiment Name: At_Far-red-induction_P Parameter: Organism Value: A. thaliana
  misc_feature: MA Experiment 20001451 PARAMETER Experiment Name: At_Far-red-induction_P Parameter: Plant Line Value: Columbia
  misc_feature: MA Experiment 20001451 PARAMETER Experiment Name: At_Far-red-induction_P Parameter: Timepoint (hr) Value: 24
  misc_feature: MA Experiment 20001451 PARAMETER Experiment Name: At_Far-red-induction_P Parameter: Tissue Value: Whole Plant

SEQ ID NO: 34133 - protein, 204 aa, Arabidopsis thaliana; identical to SEQ ID NO: 30543
  peptide (1)..(204): Ceres Seq. ID no. 12332066
  misc_feature (14)..(172): Pfam Name: Tyrosine phosphatase family Pfam Description: Tyrosine phosphatase family
  misc_feature (5)..(165): Homolog of NCBI NO: 7487406 NR Description: hypothetical protein T24M8.4 - Arabidopsis
  misc_feature (14)..(166): Homolog of NCBI NO: 6324296 NR Description: Synthetic interaction with Whi2; Siw14p
  misc_feature (5)..(165): Homolog of NCBI NO: 18412419 NR Description: putative protein
  misc_feature (14)..(86): Homolog of NCBI NO: 30102538 NR Description: At2g32960 [Arabidopsis thaliana]
  misc_feature (80)..(165): Homolog of NCBI NO: 30102538 NR Description: At2g32960 [Arabidopsis thaliana]
  misc_feature (14)..(165): Homolog of NCBI NO: 15225761 NR Description: unknown protein; protein id: At2g32960.1
  misc_feature (14)..(161): Homolog of NCBI NO: 15220383 NR Description: unkown protein; protein id: At1g05000.1
  misc_feature (7)..(203): Homolog of NCBI NO: 15232985 NR Description: unknown protein; protein id: At3g02800.1
  misc_feature (1)..(204): Homolog of NCBI NO: 15237359 NR Description: putative protein
  misc_feature (1)..(204): Homolog of NCBI NO: 21553927 NR Description: unknown [Arabidopsis thaliana]

SEQ ID NO: 34134 - protein, 183 aa, Arabidopsis thaliana; identical to SEQ ID NO: 30544
  peptide (1)..(183): Ceres Seq. ID no. 12332067
  misc_feature (1)..(151): Pfam Name: Tyrosine phosphatase family Pfam Description: Tyrosine phosphatase family
  misc_feature (1)..(144): Homolog of NCBI NO: 7487406 NR Description: hypothetical protein T24M8.4 - Arabidopsis
  misc_feature (1)..(145): Homolog of NCBI NO: 6324296 NR Description: Synthetic interaction with Whi2; Siw14p
  misc_feature (1)..(144): Homolog of NCBI NO: 18412419 NR Description: putative protein
  misc_feature (1)..(65): Homolog of NCBI NO: 30102538 NR Description: At2g32960 [Arabidopsis thaliana]
  misc_feature (59)..(144): Homolog of NCBI NO: 30102538 NR Description: At2g32960 [Arabidopsis thaliana]
  misc_feature (1)..(144): Homolog of NCBI NO: 15225761 NR Description: unknown protein; protein id: At2g32960.1
  misc_feature (1)..(140): Homolog of NCBI NO: 15220383 NR Description: unkown protein; protein id: At1g05000.1
  misc_feature (1)..(182): Homolog of NCBI NO: 15232985 NR Description: unknown protein; protein id: At3g02800.1
  misc_feature (1)..(183): Homolog of NCBI NO: 15237359 NR Description: putative protein
  misc_feature (1)..(183): Homolog of NCBI NO: 21553927 NR Description: unknown [Arabidopsis thaliana]

SEQ ID NO: 34135 - protein, 118 aa, Arabidopsis thaliana; identical to SEQ ID NO: 30545
  peptide (1)..(118): Ceres Seq. ID no. 12332068
  misc_feature (1)..(86): Pfam Name: Tyrosine phosphatase family Pfam Description: Tyrosine phosphatase family
  misc_feature (1)..(71): Homolog of NCBI NO: 15027525 NR Description: conserved hypothetical protein [Leishmania major]
  misc_feature (1)..(79): Homolog of NCBI NO: 7487406 NR Description: hypothetical protein T24M8.4 - Arabidopsis
  misc_feature (1)..(80): Homolog of NCBI NO: 6324296 NR Description: Synthetic interaction with Whi2; Siw14p
  misc_feature (1)..(79): Homolog of NCBI NO: 18412419 NR Description: putative protein
  misc_feature (1)..(79): Homolog of NCBI NO: 30102538 NR Description: At2g32960 [Arabidopsis thaliana]
  misc_feature (1)..(79): Homolog of NCBI NO: 15225761 NR Description: unknown protein; protein id: At2g32960.1
  misc_feature (1)..(75): Homolog of NCBI NO: 15220383 NR Description: unkown protein; protein id: At1g05000.1
  misc_feature (1)..(117): Homolog of NCBI NO: 15232985 NR Description: unknown protein; protein id: At3g02800.1
  misc_feature (1)..(118): Homolog of NCBI NO: 15237359 NR Description: putative protein
  misc_feature (1)..(118): Homolog of NCBI NO: 21553927 NR Description: unknown [Arabidopsis thaliana]

SEQ ID NO: 34136 - DNA, 1052 bp, Arabidopsis thaliana; identical to SEQ ID NO: 30546
  misc_feature (1)..(1052): Ceres Seq. ID no. 12327211
  misc_feature: MA Experiment ID: 108461 Result: Up-regulated in Transcription
  misc_feature: MA Experiment 108461 PARAMETER Experiment Name: At_Germinating_Seeds_cDNA_P Parameter: Age (day) Value: 1 vs. 0
  misc_feature: MA Experiment 108461 PARAMETER Experiment Name: At_Germinating_Seeds_cDNA_P Parameter: Tissue Value: Germinating Seeds
  misc_feature: MA Experiment ID: 108462 Result: Up-regulated in Transcription
  misc_feature: MA Experiment 108462 PARAMETER Experiment Name: At_Germinating_Seeds_cDNA_P Parameter: Age (day) Value: 2 vs. 0
  misc_feature: MA Experiment 108462 PARAMETER Experiment Name: At_Germinating_Seeds_cDNA_P Parameter: Tissue Value: Germinating Seeds
  misc_feature: MA Experiment ID: 20000111 Result: Down-regulated in Transcription
  misc_feature: MA Experiment 20000111 PARAMETER Experiment Name: At_42deg_Heat_cDNA_P Parameter: Temperature (deg C) Value: 42 vs. 22
  misc_feature: MA Experiment 20000111 PARAMETER Experiment Name: At_42deg_Heat_cDNA_P Parameter: Timepoint (hr) Value: 6
  misc_feature: MA Experiment 20000111 PARAMETER Experiment Name: At_42deg_Heat_cDNA_P Parameter: Tissue Value: Aerial
  misc_feature: MA Experiment ID: 20000113 Result: Down-regulated in Transcription
  misc_feature: MA Experiment 20000113 PARAMETER Experiment Name: At_42deg_Heat_cDNA_P Parameter: Temperature (deg C) Value: 42 vs. 22
  misc_feature: MA Experiment 20000113 PARAMETER Experiment Name: At_42deg_Heat_cDNA_P Parameter: Timepoint (hr) Value: 8
  misc_feature: MA Experiment 20000113 PARAMETER Experiment Name: At_42deg_Heat_cDNA_P Parameter: Tissue Value: Aerial
  misc_feature: MA Experiment ID: 20000224 Result: Up-regulated in Transcription
  misc_feature: MA Experiment ID: 20000234 Result: Up-regulated in Transcription
  misc_feature: MA Experiment 20000234 PARAMETER Experiment Name: At_Siliques_P Parameter: Age (day) Value: 21
  misc_feature: MA Experiment 20000234 PARAMETER Experiment Name: At_Siliques_P Parameter: Organism Value: A. thaliana
  misc_feature: MA Experiment 20000234 PARAMETER Experiment Name: At_Siliques_P Parameter: Plant Line Value: WS
  misc_feature: MA Experiment 20000234 PARAMETER Experiment Name: At_Siliques_P Parameter: Tissue Value: Less Than 5mm Siliques vs. Whole Plant
  misc_feature: MA Experiment ID: 20000235 Result: Up-regulated in Transcription
  misc_feature: MA Experiment 20000235 PARAMETER Experiment Name: At_Siliques_P Parameter: Age (day) Value: 21
  misc_feature: MA Experiment 20000235 PARAMETER Experiment Name: At_Siliques_P Parameter: Organism Value: A. thaliana
  misc_feature: MA Experiment 20000235 PARAMETER Experiment Name: At_Siliques_P Parameter: Plant Line Value: WS
  misc_feature: MA Experiment 20000235 PARAMETER Experiment Name: At_Siliques_P Parameter: Tissue Value: 5-10mm Siliques vs. Whole Plant
  misc_feature: MA Experiment ID: 20000264 Result: Up-regulated in Transcription
  misc_feature: MA Experiment 20000264 PARAMETER Experiment Name: At_Open_Flower_P Parameter: Age (day) Value: 21
  misc_feature: MA Experiment 20000264 PARAMETER Experiment Name: At_Open_Flower_P Parameter: Plant Line Value: WS
  misc_feature: MA Experiment 20000264 PARAMETER Experiment Name: At_Open_Flower_P Parameter: Tissue Value: Open Flower vs. Whole Plant
  misc_feature: MA Experiment ID: 20000265 Result: Up-regulated in Transcription
  misc_feature: MA Experiment 20000265 PARAMETER Experiment Name: At_Open_Flower_P Parameter: Age (day) Value: 21
  misc_feature: MA Experiment 20000265 PARAMETER Experiment Name: At_Open_Flower_P Parameter: Plant Line Value: WS
  misc_feature: MA Experiment 20000265 PARAMETER Experiment Name: At_Open_Flower_P Parameter: Tissue Value: Closed Flower vs. Whole Plant
  misc_feature: MA Experiment ID: 20000286 Result: Up-regulated in Transcription
  misc_feature: MA Experiment 20000286 PARAMETER Experiment Name: At_Open_Flower_P Parameter: Age (day) Value: 21
  misc_feature: MA Experiment 20000286 PARAMETER Experiment Name: At_Open_Flower_P Parameter: Plant Line Value: WS
  misc_feature: MA Experiment 20000286 PARAMETER Experiment Name: At_Open_Flower_P Parameter: Tissue Value: Half Open vs. Whole Plant
  misc_feature: MA Experiment ID: 20000451 Result: Down-regulated in Transcription
  misc_feature: MA Experiment 20000451 PARAMETER Experiment Name: At_CS6879_Shoots-Roots_P Parameter: Age (day) Value: 14
  misc_feature: MA Experiment 20000451 PARAMETER Experiment Name: At_CS6879_Shoots-Roots_P Parameter: Organism Value: A. thaliana
  misc_feature: MA Experiment 20000451 PARAMETER Experiment Name: At_CS6879_Shoots-Roots_P Parameter: Plant Line Value: CS6879 vs. WS
  misc_feature: MA Experiment 20000451 PARAMETER Experiment Name: At_CS6879_Shoots-Roots_P Parameter: Tissue Value: Roots
  misc_feature: MA Experiment ID: 20000794 Result: Up-regulated in Transcription
  misc_feature: MA Experiment 20000794 PARAMETER Experiment Name: At_Petals_P Parameter: Age (day) Value: 23-25 days
  misc_feature: MA Experiment 20000794 PARAMETER Experiment Name: At_Petals_P Parameter: Plant Line Value: WS
  misc_feature: MA Experiment 20000794 PARAMETER Experiment Name: At_Petals_P Parameter: Tissue Value: Petals vs. Whole plant
  misc_feature: MA Experiment ID: 20001905 Result: Down-regulated in Transcription
  misc_feature: MA Experiment 20001905 PARAMETER Experiment Name: At_Drought_Reproduction_P Parameter: Age (day) Value: 40
  misc_feature: MA Experiment 20001905 PARAMETER Experiment Name: At_Drought_Reproduction_P Parameter: Organism Value: A. thaliana
  misc_feature: MA Experiment 20001905 PARAMETER Experiment Name: At_Drought_Reproduction_P Parameter: Plant Line Value: WS
  misc_feature: MA Experiment 20001905 PARAMETER Experiment Name: At_Drought_Reproduction_P Parameter: Timepoint (day) Value: 10
  misc_feature: MA Experiment 20001905 PARAMETER Experiment Name: At_Drought_Reproduction_P Parameter: Tissue Value: Rosettes
  misc_feature: MA Experiment 20001905 PARAMETER Experiment Name: At_Drought_Reproduction_P Parameter: Treatment Value: Drought vs. No Drought
  misc_feature: MA Experiment ID: 20001911 Result: Down-regulated in Transcription
  misc_feature: MA Experiment 20001911 PARAMETER Experiment Name: At_Drought_Reproduction_P Parameter: Age (day) Value: 40
  misc_feature: MA Experiment 20001911 PARAMETER Experiment Name: At_Drought_Reproduction_P Parameter: Organism Value: A. thaliana
  misc_feature: MA Experiment 20001911 PARAMETER Experiment Name: At_Drought_Reproduction_P Parameter: Plant Line Value: WS
  misc_feature: MA Experiment 20001911 PARAMETER Experiment Name: At_Drought_Reproduction_P Parameter: Timepoint (day) Value: 10
  misc_feature: MA Experiment 20001911 PARAMETER Experiment Name: At_Drought_Reproduction_P Parameter: Tissue Value: Flowers
  misc_feature: MA Experiment 20001911 PARAMETER Experiment Name: At_Drought_Reproduction_P Parameter: Treatment Value: Drought vs. No Drought

SEQ ID NO: 34137 - protein, 296 aa, Arabidopsis thaliana; identical to SEQ ID NO: 30547
  peptide (1)..(296): Ceres Seq. ID no. 12327212
  misc_feature (90)..(296): Homolog of NCBI NO: 26452147 NR Description: unknown protein [Arabidopsis thaliana]
  misc_feature (60)..(296): Homolog of NCBI NO: 30683505 NR Description: expressed protein [Arabidopsis thaliana]
  misc_feature (8)..(296): Homolog of NCBI NO: 7485175 NR Description: hypothetical protein - Arabidopsis thaliana

SEQ ID NO: 34138 - protein, 289 aa, Arabidopsis thaliana; identical to SEQ ID NO: 30548
  peptide (1)..(289): Ceres Seq. ID no. 12327213
  misc_feature (83)..(289): Homolog of NCBI NO: 26452147 NR Description: unknown protein [Arabidopsis thaliana]
  misc_feature (53)..(289): Homolog of NCBI NO: 30683505 NR Description: expressed protein [Arabidopsis thaliana]
  misc_feature (1)..(289): Homolog of NCBI NO: 7485175 NR Description: hypothetical protein - Arabidopsis thaliana

SEQ ID NO: 34139 - protein, 237 aa, Arabidopsis thaliana; identical to SEQ ID NO: 30549
  peptide (1)..(237): Ceres Seq. ID no. 12327214
  misc_feature (31)..(237): Homolog of NCBI NO: 26452147 NR Description: unknown protein [Arabidopsis thaliana]
  misc_feature (1)..(237): Homolog of NCBI NO: 30683505 NR Description: expressed protein [Arabidopsis thaliana]
  misc_feature (1)..(237): Homolog of NCBI NO: 7485175 NR Description: hypothetical protein - Arabidopsis thaliana

SEQ ID NO: 34140 - DNA, 955 bp, Arabidopsis thaliana; identical to SEQ ID NO: 30550
  misc_feature (1)..(955): Ceres Seq. ID no. 12579911
  misc_feature: MA Experiment ID: 108462 Result: Up-regulated in Transcription
  misc_feature: MA Experiment 108462 PARAMETER Experiment Name: At_Germinating_Seeds_cDNA_P Parameter: Age (day) Value: 2 vs. 0
  misc_feature: MA Experiment 108462 PARAMETER Experiment Name: At_Germinating_Seeds_cDNA_P Parameter: Tissue Value: Germinating Seeds
  misc_feature: MA Experiment ID: 108463 Result: Up-regulated in Transcription
  misc_feature: MA Experiment 108463 PARAMETER Experiment Name: At_Germinating_Seeds_cDNA_P Parameter: Age (day) Value: 3 vs. 0
  misc_feature: MA Experiment 108463 PARAMETER Experiment Name: At_Germinating_Seeds_cDNA_P Parameter: Tissue Value: Germinating Seeds
  misc_feature: MA Experiment ID: 108464 Result: Up-regulated in Transcription
  misc_feature: MA Experiment 108464 PARAMETER Experiment Name: At_Germinating_Seeds_cDNA_P Parameter: Age (day) Value: 4 vs. 0
  misc_feature: MA Experiment 108464 PARAMETER Experiment Name: At_Germinating_Seeds_cDNA_P Parameter: Tissue Value: Germinating Seeds
  misc_feature: MA Experiment ID: 108561 Result: Up-regulated in Transcription
  misc_feature: MA Experiment 108561 PARAMETER Experiment Name: At_100uM_ABA_cDNA_P Parameter: Timepoint (hr) Value: 6
  misc_feature: MA Experiment 108561 PARAMETER Experiment Name: At_100uM_ABA_cDNA_P Parameter: Tissue Value: Aerial
  misc_feature: MA Experiment 108561 PARAMETER Experiment Name: At_100uM_ABA_cDNA_P Parameter: Treatment Value: 100uM ABA vs. No Treatment
  misc_feature: MA Experiment ID: 108573 Result: Up-regulated in Transcription
  misc_feature: MA Experiment 108573 PARAMETER Experiment Name: At_Drought_cDNA_P Parameter: Timepoint (hr) Value: 6
  misc_feature: MA Experiment 108573 PARAMETER Experiment Name: At_Drought_cDNA_P Parameter: Tissue Value: Aerial
  misc_feature: MA Experiment 108573 PARAMETER Experiment Name: At_Drought_cDNA_P Parameter: Treatment Value: Drought vs. No Drought
  misc_feature: MA Experiment ID: 108579 Result: Down-regulated in Transcription
  misc_feature: MA Experiment 108579 PARAMETER Experiment Name: At_4deg_Cold_cDNA_P Parameter: Temperature (deg C) Value: 4 vs. 22
  misc_feature: MA Experiment 108579 PARAMETER Experiment Name: At_4deg_Cold_cDNA_P Parameter: Timepoint (hr) Value: 6
  misc_feature: MA Experiment 108579 PARAMETER Experiment Name: At_4deg_Cold_cDNA_P Parameter: Tissue Value: Aerial
  misc_feature: MA Experiment ID: 108605 Result: Up-regulated in Transcription
  misc_feature: MA Experiment 108605 PARAMETER Experiment Name: At_100uM_ABA_cDNA_P Parameter: Timepoint (hr) Value: 6
  misc_feature: MA Experiment 108605 PARAMETER Experiment Name: At_100uM_ABA_cDNA_P Parameter: Tissue Value: Aerial
  misc_feature: MA Experiment 108605 PARAMETER Experiment Name: At_100uM_ABA_cDNA_P Parameter: Treatment Value: 100uM ABA vs. No Treatment
  misc_feature: MA Experiment ID: 108607 Result: Up-regulated in Transcription
  misc_feature: MA Experiment 108607 PARAMETER Experiment Name: At_100uM_ABA_cDNA_P Parameter: Timepoint (hr) Value: 4
  misc_feature: MA Experiment 108607 PARAMETER Experiment Name: At_100uM_ABA_cDNA_P Parameter: Tissue Value: Aerial
  misc_feature: MA Experiment 108607 PARAMETER Experiment Name: At_100uM_ABA_cDNA_P Parameter: Treatment Value: 100uM ABA vs. No Treatment
  misc_feature: MA Experiment ID: 20000069 Result: Up-regulated in Transcription
  misc_feature: MA Experiment 20000069 PARAMETER Experiment Name: At_100uM_ABA_Mutants_cDNA_P Parameter: Plant Line Value: CS23
  misc_feature: MA Experiment 20000069 PARAMETER Experiment Name: At_100uM_ABA_Mutants_cDNA_P Parameter: Timepoint (hr) Value: 6
  misc_feature: MA Experiment 20000069 PARAMETER Experiment Name: At_100uM_ABA_Mutants_cDNA_P Parameter: Tissue Value: Aerial
  misc_feature: MA Experiment 20000069 PARAMETER Experiment Name: At_100uM_ABA_Mutants_cDNA_P Parameter: Treatment Value: 100uM ABA vs. No Treatment
  misc_feature: MA Experiment ID: 20000070 Result: Up-regulated in Transcription
  misc_feature: MA Experiment 20000070 PARAMETER Experiment Name: At_100uM_ABA_Mutants_cDNA_P Parameter: Plant Line Value: CS24
  misc_feature: MA Experiment 20000070 PARAMETER Experiment Name: At_100uM_ABA_Mutants_cDNA_P Parameter: Timepoint (hr) Value: 6
  misc_feature: MA Experiment 20000070 PARAMETER Experiment Name: At_100uM_ABA_Mutants_cDNA_P Parameter: Tissue Value: Aerial
  misc_feature: MA Experiment 20000070 PARAMETER Experiment Name: At_100uM_ABA_Mutants_cDNA_P Parameter: Treatment Value: 100uM ABA vs. No Treatment
  misc_feature: MA Experiment ID: 20000071 Result: Up-regulated in Transcription
  misc_feature: MA Experiment 20000071 PARAMETER Experiment Name: At_100uM_ABA_Mutants_cDNA_P Parameter: Plant Line Value: CS8104
  misc_feature: MA Experiment 20000071 PARAMETER Experiment Name: At_100uM_ABA_Mutants_cDNA_P Parameter: Timepoint (hr) Value: 6
  misc_feature: MA Experiment 20000071 PARAMETER Experiment Name: At_100uM_ABA_Mutants_cDNA_P Parameter: Tissue Value: Aerial
  misc_feature: MA Experiment 20000071 PARAMETER Experiment Name: At_100uM_ABA_Mutants_cDNA_P Parameter: Treatment Value: 100uM ABA vs. No Treatment
  misc_feature: MA Experiment ID: 20000113 Result: Up-regulated in Transcription
  misc_feature: MA Experiment 20000113 PARAMETER Experiment Name: At_42deg_Heat_cDNA_P Parameter: Temperature (deg C) Value: 42 vs. 22
  misc_feature: MA Experiment 20000113 PARAMETER Experiment Name: At_42deg_Heat_cDNA_P Parameter: Timepoint (hr) Value: 8
  misc_feature: MA Experiment 20000113 PARAMETER Experiment Name: At_42deg_Heat_cDNA_P Parameter: Tissue Value: Aerial
  misc_feature: MA Experiment ID: 20000234 Result: Down-regulated in Transcription
  misc_feature: MA Experiment 20000234 PARAMETER Experiment Name: At_Siliques_P Parameter: Age (day) Value: 21
  misc_feature: MA Experiment 20000234 PARAMETER Experiment Name: At_Siliques_P Parameter: Organism Value: A. thaliana
  misc_feature: MA Experiment 20000234 PARAMETER Experiment Name: At_Siliques_P Parameter: Plant Line Value: WS
  misc_feature: MA Experiment 20000234 PARAMETER Experiment Name: At_Siliques_P Parameter: Tissue Value: Less Than 5mm Siliques vs. Whole Plant
  misc_feature: MA Experiment ID: 20000436 Result: Up-regulated in Transcription
  misc_feature: MA Experiment 20000436 PARAMETER Experiment Name: At_Drought_P Parameter: Age (day) Value: 7
  misc_feature: MA Experiment 20000436 PARAMETER Experiment Name: At_Drought_P Parameter: Organism Value: A. thaliana
  misc_feature: MA Experiment 20000436 PARAMETER Experiment Name: At_Drought_P Parameter: Plant Line Value: WS
  misc_feature: MA Experiment 20000436 PARAMETER Experiment Name: At_Drought_P Parameter: Timepoint (hr) Value: 12
  misc_feature: MA Experiment 20000436 PARAMETER Experiment Name: At_Drought_P Parameter: Tissue Value: Whole Plant
  misc_feature: MA Experiment 20000436 PARAMETER Experiment Name: At_Drought_P Parameter: Treatment Value: Drought vs. No Drought
  misc_feature: MA Experiment ID: 20000437 Result: Up-regulated in Transcription
  misc_feature: MA Experiment 20000437 PARAMETER Experiment Name: At_Drought_P Parameter: Age (day) Value: 8
  misc_feature: MA Experiment 20000437 PARAMETER Experiment Name: At_Drought_P Parameter: Organism Value: A. thaliana
  misc_feature: MA Experiment 20000437 PARAMETER Experiment Name: At_Drought_P Parameter: Plant Line Value: WS
  misc_feature: MA Experiment 20000437 PARAMETER Experiment Name: At_Drought_P Parameter: Timepoint (hr) Value: 24
  misc_feature: MA Experiment 20000437 PARAMETER Experiment Name: At_Drought_P Parameter: Tissue Value: Whole Plant
  misc_feature: MA Experiment 20000437 PARAMETER Experiment Name: At_Drought_P Parameter: Treatment Value: Drought vs. No Drought
  misc_feature: MA Experiment ID: 20001450 Result: Up-regulated in Transcription
  misc_feature: MA Experiment 20001450 PARAMETER Experiment Name: At_Far-red-induction_P Parameter: Age (day) Value: 7
  misc_feature: MA Experiment 20001450 PARAMETER Experiment Name: At_Far-red-induction_P Parameter: Light Value: Far-red vs. White
  misc_feature: MA Experiment 20001450 PARAMETER Experiment Name: At_Far-red-induction_P Parameter: Organism Value: A. thaliana
  misc_feature: MA Experiment 20001450 PARAMETER Experiment Name: At_Far-red-induction_P Parameter: Plant Line Value: Columbia
  misc_feature: MA Experiment 20001450 PARAMETER Experiment Name: At_Far-red-induction_P Parameter: Timepoint (hr) Value: 8
  misc_feature: MA Experiment 20001450 PARAMETER Experiment Name: At_Far-red-induction_P Parameter: Tissue Value: Whole Plant

SEQ ID NO: 34141 - protein, 253 aa, Arabidopsis thaliana; identical to SEQ ID NO: 30551
  peptide (1)..(253): Ceres Seq. ID no. 12579912
  misc_feature (100)..(233): Pfam Name: NUDIX domain Pfam Description: NUDIX domain
  misc_feature (86)..(253): Homolog of NCBI NO: 28868671 NR Description: mutT/nudix family protein
  misc_feature (22)..(179): Homolog of NCBI NO: 25370770 NR Description: hypothetical protein At2g33980 [imported] -
  misc_feature (97)..(253): Homolog of NCBI NO: 15242543 NR Description: putative protein
  misc_feature (97)..(253): Homolog of NCBI NO: 21553389 NR Description: unknown [Arabidopsis thaliana]
  misc_feature (97)..(253): Homolog of NCBI NO: 40253324 NR Description: putative phosphohydrolase
  misc_feature (22)..(253): Homolog of NCBI NO: 18403412 NR Description: expressed protein
  misc_feature (24)..(253): Homolog of NCBI NO: 10764850 NR Description: F1K23.5 [Arabidopsis thaliana]
  misc_feature (1)..(253): Homolog of NCBI NO: 26450576 NR Description: unknown protein [Arabidopsis thaliana]
  misc_feature (1)..(253): Homolog of NCBI NO: 30690557 NR Description: MutT/nudix family protein [Arabidopsis thaliana]
  misc_feature (1)..(253): Homolog of NCBI NO: 18396900 NR Description: Expressed protein

SEQ ID NO: 34142 - protein, 230 aa, Arabidopsis thaliana; identical to SEQ ID NO: 30552
  peptide (1)..(230): Ceres Seq. ID no. 12579913
  misc_feature (77)..(210): Pfam Name: NUDIX domain Pfam Description: NUDIX domain
  misc_feature (63)..(230): Homolog of NCBI NO: 28868671 NR Description: mutT/nudix family protein
  misc_feature (1)..(156): Homolog of NCBI NO: 25370770 NR Description: hypothetical protein At2g33980 [imported] -
  misc_feature (74)..(230): Homolog of NCBI NO: 15242543 NR Description: putative protein
  misc_feature (74)..(230): Homolog of NCBI NO: 21553389 NR Description: unknown [Arabidopsis thaliana]
  misc_feature (74)..(230): Homolog of NCBI NO: 40253324 NR Description: putative phosphohydrolase
  misc_feature (1)..(230): Homolog of NCBI NO: 18403412 NR Description: expressed protein
  misc_feature (1)..(230): Homolog of NCBI NO: 10764850 NR Description: F1K23.5 [Arabidopsis thaliana]
  misc_feature (1)..(230): Homolog of NCBI NO: 26450576 NR Description: unknown protein [Arabidopsis thaliana]
  misc_feature (1)..(230): Homolog of NCBI NO: 30690557 NR Description: MutT/nudix family protein [Arabidopsis thaliana]
  misc_feature (1)..(230): Homolog of NCBI NO: 18396900 NR Description: Expressed protein

SEQ ID NO: 34143 - protein, 187 aa, Arabidopsis thaliana; identical to SEQ ID NO: 30553
  peptide (1)..(187): Ceres Seq. ID no. 12579914
  misc_feature (34)..(167): Pfam Name: NUDIX domain Pfam Description: NUDIX domain
  misc_feature (20)..(187): Homolog of NCBI NO: 28868671 NR Description: mutT/nudix family protein
  misc_feature (1)..(113): Homolog of NCBI NO: 25370770 NR Description: hypothetical protein At2g33980 [imported] -
  misc_feature (31)..(187): Homolog of NCBI NO: 15242543 NR Description: putative protein
  misc_feature (31)..(187): Homolog of NCBI NO: 21553389 NR Description: unknown [Arabidopsis thaliana]
  misc_feature (31)..(187): Homolog of NCBI NO: 40253324 NR Description: putative phosphohydrolase
  misc_feature (1)..(187): Homolog of NCBI NO: 18403412 NR Description: expressed protein
  misc_feature (1)..(187): Homolog of NCBI NO: 10764850 NR Description: F1K23.5 [Arabidopsis thaliana]
  misc_feature (1)..(187): Homolog of NCBI NO: 26450576 NR Description: unknown protein [Arabidopsis thaliana]
  misc_feature (1)..(187): Homolog of NCBI NO: 30690557 NR Description: MutT/nudix family protein [Arabidopsis thaliana]
  misc_feature (1)..(187): Homolog of NCBI NO: 18396900 NR Description: Expressed protein

SEQ ID NO: 34144 - DNA, 836 bp, Arabidopsis thaliana; identical to SEQ ID NO: 30554
  misc_feature (1)..(836): Ceres Seq. ID no. 13489838
  misc_feature: MA Experiment ID: 108433 Result: Up-regulated in Transcription
  misc_feature: MA Experiment 108433 PARAMETER Experiment Name: At_rhl_Mutant2_cDNA_P Parameter: Age (day) Value: 7
  misc_feature: MA Experiment 108433 PARAMETER Experiment Name: At_rhl_Mutant2_cDNA_P Parameter: Organism Value: A. thaliana
  misc_feature: MA Experiment 108433 PARAMETER Experiment Name: At_rhl_Mutant2_cDNA_P Parameter: Plant Line Value: rhl Mutant vs. wt landsburg
  misc_feature: MA Experiment 108433 PARAMETER Experiment Name: At_rhl_Mutant2_cDNA_P Parameter: Tissue Value: Roots
  misc_feature: MA Experiment ID: 108434 Result: Down-regulated in Transcription
  misc_feature: MA Experiment 108434 PARAMETER Experiment Name: At_Root_Tips_cDNA_P Parameter: Tissue Value: Root Tips
  misc_feature: MA Experiment ID: 108461 Result: Down-regulated in Transcription
  misc_feature: MA Experiment 108461 PARAMETER Experiment Name: At_Germinating_Seeds_cDNA_P Parameter: Age (day) Value: 1 vs. 0
  misc_feature: MA Experiment 108461 PARAMETER Experiment Name: At_Germinating_Seeds_cDNA_P Parameter: Tissue Value: Germinating Seeds
  misc_feature: MA Experiment ID: 108585 Result: Up-regulated in Transcription
  misc_feature: MA Experiment 108585 PARAMETER Experiment Name: At_5mM_NaNP_cDNA_P Parameter: Timepoint (hr) Value: 6
  misc_feature: MA Experiment 108585 PARAMETER Experiment Name: At_5mM_NaNP_cDNA_P Parameter: Tissue Value: Aerial
  misc_feature: MA Experiment 108585 PARAMETER Experiment Name: At_5mM_NaNP_cDNA_P Parameter: Treatment Value: null
  misc_feature: MA Experiment ID: 108595 Result: Down-regulated in Transcription
  misc_feature: MA Experiment 108595 PARAMETER Experiment Name: At_Ler-pi_Ovule_cDNA_P Parameter: Plant Line Value: null
  misc_feature: MA Experiment ID: 108605 Result: Up-regulated in Transcription
  misc_feature: MA Experiment 108605 PARAMETER Experiment Name: At_100uM_ABA_cDNA_P Parameter: Timepoint (hr) Value: 6
  misc_feature: MA Experiment 108605 PARAMETER Experiment Name: At_100uM_ABA_cDNA_P Parameter: Tissue Value: Aerial
  misc_feature: MA Experiment 108605 PARAMETER Experiment Name: At_100uM_ABA_cDNA_P Parameter: Treatment Value: 100uM ABA vs. No Treatment
  misc_feature: MA Experiment ID: 108607 Result: Up-regulated in Transcription
  misc_feature: MA Experiment 108607 PARAMETER Experiment Name: At_100uM_ABA_cDNA_P Parameter: Timepoint (hr) Value: 4
  misc_feature: MA Experiment 108607 PARAMETER Experiment Name: At_100uM_ABA_cDNA_P Parameter: Tissue Value: Aerial
  misc_feature: MA Experiment 108607 PARAMETER Experiment Name: At_100uM_ABA_cDNA_P Parameter: Treatment Value: 100uM ABA vs. No Treatment
  misc_feature: MA Experiment ID: 108609 Result: Up-regulated in Transcription
  misc_feature: MA Experiment 108609 PARAMETER Experiment Name: At_100uM_ABA_cDNA_P Parameter: Timepoint (hr) Value: 24
  misc_feature: MA Experiment 108609 PARAMETER Experiment Name: At_100uM_ABA_cDNA_P Parameter: Tissue Value: Aerial
  misc_feature: MA Experiment 108609 PARAMETER Experiment Name: At_100uM_ABA_cDNA_P Parameter: Treatment Value: 100uM ABA vs. No Treatment
  misc_feature: MA Experiment ID: 108667 Result: Up-regulated in Transcription
  misc_feature: MA Experiment 108667 PARAMETER Experiment Name: At_2mM_SA_cDNA_P Parameter: Plant Line Value: WS
  misc_feature: MA Experiment 108667 PARAMETER Experiment Name: At_2mM_SA_cDNA_P Parameter: Timepoint (hr) Value: 1
  misc_feature: MA Experiment 108667 PARAMETER Experiment Name: At_2mM_SA_cDNA_P Parameter: Treatment Value: 2mM SA vs. No Treatment
  misc_feature: MA Experiment ID: 108668 Result: Up-regulated in Transcription
  misc_feature: MA Experiment 108668 PARAMETER Experiment Name: At_2mM_SA_cDNA_P Parameter: Plant Line Value: WS
  misc_feature: MA Experiment 108668 PARAMETER Experiment Name: At_2mM_SA_cDNA_P Parameter: Timepoint (hr) Value: 6
  misc_feature: MA Experiment 108668 PARAMETER Experiment Name: At_2mM_SA_cDNA_P Parameter: Treatment Value: 2mM SA vs. No Treatment
  misc_feature: MA Experiment ID: 20000069 Result: Up-regulated in Transcription
  misc_feature: MA Experiment 20000069 PARAMETER Experiment Name: At_100uM_ABA_Mutants_cDNA_P Parameter: Plant Line Value: CS23
  misc_feature: MA Experiment 20000069 PARAMETER Experiment Name: At_100uM_ABA_Mutants_cDNA_P Parameter: Timepoint (hr) Value: 6
  misc_feature: MA Experiment 20000069 PARAMETER Experiment Name: At_100uM_ABA_Mutants_cDNA_P Parameter: Tissue Value: Aerial
  misc_feature: MA Experiment 20000069 PARAMETER Experiment Name: At_100uM_ABA_Mutants_cDNA_P Parameter: Treatment Value: 100uM ABA vs. No Treatment
  misc_feature: MA Experiment ID: 20000070 Result: Up-regulated in Transcription
  misc_feature: MA Experiment 20000070 PARAMETER Experiment Name: At_100uM_ABA_Mutants_cDNA_P Parameter: Plant Line Value: CS24
  misc_feature: MA Experiment 20000070 PARAMETER Experiment Name: At_100uM_ABA_Mutants_cDNA_P Parameter: Timepoint (hr) Value: 6
  misc_feature: MA Experiment 20000070 PARAMETER Experiment Name: At_100uM_ABA_Mutants_cDNA_P Parameter: Tissue Value: Aerial
  misc_feature: MA Experiment 20000070 PARAMETER Experiment Name: At_100uM_ABA_Mutants_cDNA_P Parameter: Treatment Value: 100uM ABA vs. No Treatment
  misc_feature: MA Experiment ID: 20000071 Result: Up-regulated in Transcription
  misc_feature: MA Experiment 20000071 PARAMETER Experiment Name: At_100uM_ABA_Mutants_cDNA_P Parameter: Plant Line Value: CS8104
  misc_feature: MA Experiment 20000071 PARAMETER Experiment Name: At_100uM_ABA_Mutants_cDNA_P Parameter: Timepoint (hr) Value: 6
  misc_feature: MA Experiment 20000071 PARAMETER Experiment Name: At_100uM_ABA_Mutants_cDNA_P Parameter: Tissue Value: Aerial
  misc_feature: MA Experiment 20000071 PARAMETER Experiment Name: At_100uM_ABA_Mutants_cDNA_P Parameter: Treatment Value: 100uM ABA vs. No Treatment
  misc_feature: MA Experiment ID: 20000086 Result: Up-regulated in Transcription
  misc_feature: MA Experiment 20000086 PARAMETER Experiment Name: At_100uM_ABA_Mutants_cDNA_P Parameter: Plant Line Value: CS22
  misc_feature: MA Experiment 20000086 PARAMETER Experiment Name: At_100uM_ABA_Mutants_cDNA_P Parameter: Timepoint (hr) Value: 6
  misc_feature: MA Experiment 20000086 PARAMETER Experiment Name: At_100uM_ABA_Mutants_cDNA_P Parameter: Tissue Value: Aerial
  misc_feature: MA Experiment 20000086 PARAMETER Experiment Name: At_100uM_ABA_Mutants_cDNA_P Parameter: Treatment Value: 100uM ABA vs. No Treatment
  misc_feature: MA Experiment ID: 20000087 Result: Up-regulated in Transcription
  misc_feature: MA Experiment 20000087 PARAMETER Experiment Name: At_100uM_ABA_Mutants_cDNA_P Parameter: Plant Line Value: WS
  misc_feature: MA Experiment 20000087 PARAMETER Experiment Name: At_100uM_ABA_Mutants_cDNA_P Parameter: Timepoint (hr) Value: 6
  misc_feature: MA Experiment 20000087 PARAMETER Experiment Name: At_100uM_ABA_Mutants_cDNA_P Parameter: Tissue Value: Aerial
  misc_feature: MA Experiment 20000087 PARAMETER Experiment Name: At_100uM_ABA_Mutants_cDNA_P Parameter: Treatment Value: 100uM ABA vs. No Treatment
  misc_feature: MA Experiment ID: 20000088 Result: Up-regulated in Transcription
  misc_feature: MA Experiment 20000088 PARAMETER Experiment Name: At_100uM_ABA_Mutants_cDNA_P Parameter: Plant Line Value: Landsberg
  misc_feature: MA Experiment 20000088 PARAMETER Experiment Name: At_100uM_ABA_Mutants_cDNA_P Parameter: Timepoint (hr) Value: 6
  misc_feature: MA Experiment 20000088 PARAMETER Experiment Name: At_100uM_ABA_Mutants_cDNA_P Parameter: Tissue Value: Aerial
  misc_feature: MA Experiment 20000088 PARAMETER Experiment Name: At_100uM_ABA_Mutants_cDNA_P Parameter: Treatment Value: 100uM ABA vs. No Treatment
  misc_feature: MA Experiment ID: 20000089 Result: Up-regulated in Transcription
  misc_feature: MA Experiment ID: 20000090 Result: Up-regulated in Transcription
  misc_feature: MA Experiment ID: 20000117 Result: Up-regulated in Transcription
  misc_feature: MA Experiment 20000117 PARAMETER Experiment Name: At_100uM_ABA_Mutants_cDNA_P Parameter: Plant Line Value: Columbia
  misc_feature: MA Experiment 20000117 PARAMETER Experiment Name: At_100uM_ABA_Mutants_cDNA_P Parameter: Timepoint (hr) Value: 6
  misc_feature: MA Experiment 20000117 PARAMETER Experiment Name: At_100uM_ABA_Mutants_cDNA_P Parameter: Tissue Value: Aerial
  misc_feature: MA Experiment 20000117 PARAMETER Experiment Name: At_100uM_ABA_Mutants_cDNA_P Parameter: Treatment Value: 100uM ABA vs. No Treatment
  misc_feature: MA Experiment ID: 20000182 Result: Up-regulated in Transcription
  misc_feature: MA Experiment 20000182 PARAMETER Experiment Name: At_2mM_SA_P Parameter: Age (day) Value: 14
  misc_feature: MA Experiment 20000182 PARAMETER Experiment Name: At_2mM_SA_P Parameter: Organism Value: A. thaliana
  misc_feature: MA Experiment 20000182 PARAMETER Experiment Name: At_2mM_SA_P Parameter: Plant Line Value: WS
  misc_feature: MA Experiment 20000182 PARAMETER Experiment Name: At_2mM_SA_P Parameter: Timepoint (hr) Value: 6
  misc_feature: MA Experiment 20000182 PARAMETER Experiment Name: At_2mM_SA_P Parameter: Tissue Value: Aerial
  misc_feature: MA Experiment 20000182 PARAMETER Experiment Name: At_2mM_SA_P Parameter: Treatment Value: 2mM SA vs. No Treatment
  misc_feature: MA Experiment ID: 20000185 Result: Up-regulated in Transcription
  misc_feature: MA Experiment 20000185 PARAMETER Experiment Name: At_Roots__P Parameter: Age (day) Value: 7 vs. 21
  misc_feature: MA Experiment 20000185 PARAMETER Experiment Name: At_Roots__P Parameter: Organism Value: A. thaliana
  misc_feature: MA Experiment 20000185 PARAMETER Experiment Name: At_Roots__P Parameter: Tissue Value: Roots vs. Whole Plant
  misc_feature: MA Experiment ID: 20000451 Result: Down-regulated in Transcription
  misc_feature: MA Experiment 20000451 PARAMETER Experiment Name: At_CS6879_Shoots-Roots_P Parameter: Age (day) Value: 14
  misc_feature: MA Experiment 20000451 PARAMETER Experiment Name: At_CS6879_Shoots-Roots_P Parameter: Organism Value: A. thaliana
  misc_feature: MA Experiment 20000451 PARAMETER Experiment Name: At_CS6879_Shoots-Roots_P Parameter: Plant Line Value: CS6879 vs. WS
  misc_feature: MA Experiment 20000451 PARAMETER Experiment Name: At_CS6879_Shoots-Roots_P Parameter: Tissue Value: Roots
  misc_feature: Phenotype: FERTILITY Fertility-Reduced
  misc_feature: Phenotype: FERTILITY Fertility-Reduced
  misc_feature: Phenotype: ROSETTE LEAVES Shape-Lanceolate
  misc_feature: Phenotype: ROSETTE LEAVES Other
  misc_feature: Phenotype: FERTILITY Fertility-Reduced
  misc_feature: Phenotype: FERTILITY Fertility-Reduced
  misc_feature: Phenotype: ROSETTE LEAVES Disorganized Rosette-Disorganized Rosette
  misc_feature: Phenotype: ROSETTE LEAVES Other
  misc_feature: Phenotype: INFLORESCENCE Flowering Time-Late Flowering

SEQ ID NO: 34145 - protein, 237 aa, Arabidopsis thaliana; identical to SEQ ID NO: 30555
  peptide (1)..(237): Ceres Seq. ID no. 13489839
  misc_feature (17)..(234): Homolog of NCBI NO: 24061762 NR Description: glutathione S-transferase [Capsicum annuum]
  misc_feature (17)..(235): Homolog of NCBI NO: 29420155 NR Description: glutathione S-transferase Z1 [Malva pusilla]
  misc_feature (24)..(236): Homolog of NCBI NO: 11132235 NR Description: Glutathione S-transferase zeta class
  misc_feature (22)..(235): Homolog of NCBI NO: 15226949 NR Description: glutathione transferase, putative [Arabidopsis
  misc_feature (17)..(237): Homolog of NCBI NO: 28932694 NR Description: glutathione S-transferase zeta [Brassica napus]
  misc_feature (17)..(237): Homolog of NCBI NO: 28932698 NR Description: glutathione S-transferase zeta [Brassica napus]
  misc_feature (17)..(236): Homolog of NCBI NO: 30677995 NR Description: glutathione transferase, putative [Arabidopsis
  misc_feature (17)..(236): Homolog of NCBI NO: 15226952 NR Description: glutathione transferase, putative [Arabidopsis

SEQ ID NO: 34146 - protein, 221 aa, Arabidopsis thaliana; identical to SEQ ID NO: 30556
  peptide (1)..(221): Ceres Seq. ID no. 13489840
  misc_feature (1)..(218): Homolog of NCBI NO: 24061762 NR Description: glutathione S-transferase [Capsicum annuum]
  misc_feature (1)..(219): Homolog of NCBI NO: 29420155 NR Description: glutathione S-transferase Z1 [Malva pusilla]
  misc_feature (8)..(220): Homolog of NCBI NO: 11132235 NR Description: Glutathione S-transferase zeta class
  misc_feature (6)..(219): Homolog of NCBI NO: 15226949 NR Description: glutathione transferase, putative [Arabidopsis
  misc_feature (1)..(221): Homolog of NCBI NO: 28932694 NR Description: glutathione S-transferase zeta [Brassica napus]
  misc_feature (1)..(221): Homolog of NCBI NO: 28932698 NR Description: glutathione S-transferase zeta [Brassica napus]
  misc_feature (1)..(220): Homolog of NCBI NO: 30677995 NR Description: glutathione transferase, putative [Arabidopsis
  misc_feature (1)..(220): Homolog of NCBI NO: 15226952 NR Description: glutathione transferase, putative [Arabidopsis

SEQ ID NO: 34147 - protein, 165 aa, Arabidopsis thaliana; identical to SEQ ID NO: 30557
  peptide (1)..(165): Ceres Seq. ID no. 13489841
  misc_feature (1)..(162): Homolog of NCBI NO: 24061762 NR Description: glutathione S-transferase [Capsicum annuum]
  misc_feature (1)..(163): Homolog of NCBI NO: 29420155 NR Description: glutathione S-transferase Z1 [Malva pusilla]
  misc_feature (1)..(164): Homolog of NCBI NO: 11132235 NR Description: Glutathione S-transferase zeta class
  misc_feature (1)..(163): Homolog of NCBI NO: 15226949 NR Description: glutathione transferase, putative [Arabidopsis
  misc_feature (1)..(165): Homolog of NCBI NO: 28932694 NR Description: glutathione S-transferase zeta [Brassica napus]
  misc_feature (1)..(165): Homolog of NCBI NO: 28932698 NR Description: glutathione S-transferase zeta [Brassica napus]
  misc_feature (1)..(164): Homolog of NCBI NO: 30677995 NR Description: glutathione transferase, putative [Arabidopsis
  misc_feature (1)..(164): Homolog of NCBI NO: 15226952 NR Description: glutathione transferase, putative [Arabidopsis

SEQ ID NO: 34148 - DNA, 691 bp, Arabidopsis thaliana; identical to SEQ ID NO: 30558
  misc_feature (1)..(691): Ceres Seq. ID no. 12332112
  misc_feature: MA Experiment ID: 108435 Result: Down-regulated in Transcription
  misc_feature: MA Experiment 108435 PARAMETER Experiment Name: At_stm_Mutants_cDNA_P Parameter: Plant Line Value: wt Landsburg vs stm
  misc_feature: MA Experiment 108435 PARAMETER Experiment Name: At_stm_Mutants_cDNA_P Parameter: Tissue Value: Shoot Apical Meristem Region
  misc_feature: MA Experiment ID: 108595 Result: Down-regulated in Transcription
  misc_feature: MA Experiment 108595 PARAMETER Experiment Name: At_Ler-pi_Ovule_cDNA_P Parameter: Plant Line Value: null
  misc_feature: MA Experiment ID: 20000086 Result: Down-regulated in Transcription
  misc_feature: MA Experiment 20000086 PARAMETER Experiment Name: At_100uM_ABA_Mutants_cDNA_P Parameter: Plant Line Value: CS22
  misc_feature: MA Experiment 20000086 PARAMETER Experiment Name: At_100uM_ABA_Mutants_cDNA_P Parameter: Timepoint (hr) Value: 6
  misc_feature: MA Experiment 20000086 PARAMETER Experiment Name: At_100uM_ABA_Mutants_cDNA_P Parameter: Tissue Value: Aerial
  misc_feature: MA Experiment 20000086 PARAMETER Experiment Name: At_100uM_ABA_Mutants_cDNA_P Parameter: Treatment Value: 100uM ABA vs. No Treatment
  misc_feature: MA Experiment ID: 20000090 Result: Down-regulated in Transcription
  misc_feature: MA Experiment ID: 20000185 Result: Down-regulated in Transcription
  misc_feature: MA Experiment 20000185 PARAMETER Experiment Name: At_Roots__P Parameter: Age (day) Value: 7 vs. 21
  misc_feature: MA Experiment 20000185 PARAMETER Experiment Name: At_Roots__P Parameter: Organism Value: A. thaliana
  misc_feature: MA Experiment 20000185 PARAMETER Experiment Name: At_Roots__P Parameter: Tissue Value: Roots vs. Whole Plant
  misc_feature: MA Experiment ID: 20000439 Result: Down-regulated in Transcription
  misc_feature: MA Experiment 20000439 PARAMETER Experiment Name: At_Roots__P Parameter: Age (day) Value: 14 vs. 21
  misc_feature: MA Experiment 20000439 PARAMETER Experiment Name: At_Roots__P Parameter: Organism Value: A. thaliana
  misc_feature: MA Experiment 20000439 PARAMETER Experiment Name: At_Roots__P Parameter: Tissue Value: Roots vs. Whole Plant
  misc_feature: MA Experiment ID: 20001248 Result: Down-regulated in Transcription
  misc_feature: MA Experiment 20001248 PARAMETER Experiment Name: At_Far-red-induction_P Parameter: Age (day) Value: 7
  misc_feature: MA Experiment 20001248 PARAMETER Experiment Name: At_Far-red-induction_P Parameter: Light Value: Far-red vs. White
  misc_feature: MA Experiment 20001248 PARAMETER Experiment Name: At_Far-red-induction_P Parameter: Organism Value: A. thaliana
  misc_feature: MA Experiment 20001248 PARAMETER Experiment Name: At_Far-red-induction_P Parameter: Plant Line Value: Columbia
  misc_feature: MA Experiment 20001248 PARAMETER Experiment Name: At_Far-red-induction_P Parameter: Timepoint (hr) Value: 4
  misc_feature: MA Experiment 20001248 PARAMETER Experiment Name: At_Far-red-induction_P Parameter: Tissue Value: Whole Plant
  misc_feature: MA Experiment ID: 20001450 Result: Down-regulated in Transcription
  misc_feature: MA Experiment 20001450 PARAMETER Experiment Name: At_Far-red-induction_P Parameter: Age (day) Value: 7
  misc_feature: MA Experiment 20001450 PARAMETER Experiment Name: At_Far-red-induction_P Parameter: Light Value: Far-red vs. White
  misc_feature: MA Experiment 20001450 PARAMETER Experiment Name: At_Far-red-induction_P Parameter: Organism Value: A. thaliana
  misc_feature: MA Experiment 20001450 PARAMETER Experiment Name: At_Far-red-induction_P Parameter: Plant Line Value: Columbia
  misc_feature: MA Experiment 20001450 PARAMETER Experiment Name: At_Far-red-induction_P Parameter: Timepoint (hr) Value: 8
  misc_feature: MA Experiment 20001450 PARAMETER Experiment Name: At_Far-red-induction_P Parameter: Tissue Value: Whole Plant

SEQ ID NO: 34149 - protein, 159 aa, Arabidopsis thaliana; identical to SEQ ID NO: 30559
  peptide (1)..(159): Ceres Seq. ID no. 12332113
  misc_feature (76)..(155): Homolog of NCBI NO: 33862055 NR Description: conserved hypothetical protein
  misc_feature (64)..(155): Homolog of NCBI NO: 33241103 NR Description: Uncharacterized conserved protein
  misc_feature (63)..(155): Homolog of NCBI NO: 33864059 NR Description: conserved hypothetical protein
  misc_feature (73)..(155): Homolog of NCBI NO: 37520315 NR Description: hypothetical protein gsl0746 [Gloeobacter
  misc_feature (76)..(155): Homolog of NCBI NO: 33866680 NR Description: conserved hypothetical protein [Synechococcus sp.
  misc_feature (76)..(155): Homolog of NCBI NO: 16331021 NR Description: unknown protein [Synechocystis sp. PCC 6803]
  misc_feature (76)..(154): Homolog of NCBI NO: 22297755 NR Description: ORF_ID:tll0211~hypothetical protein
  misc_feature (75)..(155): Homolog of NCBI NO: 17231817 NR Description: hypothetical protein [Nostoc sp. PCC 7120]
  misc_feature (76)..(155): Homolog of NCBI NO: 23043721 NR Description: hypothetical protein [Trichodesmium erythraeum
  misc_feature (1)..(159): Homolog of NCBI NO: 18409086 NR Description: expressed protein

SEQ ID NO: 34150 - protein, 121 aa, Arabidopsis thaliana; identical to SEQ ID NO: 30560
  peptide (1)..(121): Ceres Seq. ID no. 12332114
  misc_feature (38)..(117): Homolog of NCBI NO: 33862055 NR Description: conserved hypothetical protein
  misc_feature (26)..(117): Homolog of NCBI NO: 33241103 NR Description: Uncharacterized conserved protein
  misc_feature (25)..(117): Homolog of NCBI NO: 33864059 NR Description: conserved hypothetical protein
  misc_feature (35)..(117): Homolog of NCBI NO: 37520315 NR Description: hypothetical protein gsl0746 [Gloeobacter
  misc_feature (38)..(117): Homolog of NCBI NO: 33866680 NR Description: conserved hypothetical protein [Synechococcus sp.
  misc_feature (38)..(117): Homolog of NCBI NO: 16331021 NR Description: unknown protein [Synechocystis sp. PCC 6803]
  misc_feature (38)..(116): Homolog of NCBI NO: 22297755 NR Description: ORF_ID:tll0211~hypothetical protein
  misc_feature (37)..(117): Homolog of NCBI NO: 17231817 NR Description: hypothetical protein [Nostoc sp. PCC 7120]
  misc_feature (38)..(117): Homolog of NCBI NO: 23043721 NR Description: hypothetical protein [Trichodesmium erythraeum
  misc_feature (1)..(121): Homolog of NCBI NO: 18409086 NR Description: expressed protein

SEQ ID NO: 34151 - DNA, 618 bp, Arabidopsis thaliana; identical to SEQ ID NO: 30561
  misc_feature (1)..(618): Ceres Seq. ID no. 13497742
  misc_feature: MA Experiment ID: 108434 Result: Down-regulated in Transcription
  misc_feature: MA Experiment 108434 PARAMETER Experiment Name: At_Root_Tips_cDNA_P Parameter: Tissue Value: Root Tips
  misc_feature: MA Experiment ID: 108464 Result: Down-regulated in Transcription
  misc_feature: MA Experiment 108464 PARAMETER Experiment Name: At_Germinating_Seeds_cDNA_P Parameter: Age (day) Value: 4 vs. 0
  misc_feature: MA Experiment 108464 PARAMETER Experiment Name: At_Germinating_Seeds_cDNA_P Parameter: Tissue Value: Germinating Seeds
  misc_feature: MA Experiment ID: 108473 Result: Up-regulated in Transcription
  misc_feature: MA Experiment 108473 PARAMETER Experiment Name: At_Drought_Flowers_cDNA_P Parameter: Timepoint (hr) Value: 7 d
  misc_feature: MA Experiment 108473 PARAMETER Experiment Name: At_Drought_Flowers_cDNA_P Parameter: Tissue Value: Flower
  misc_feature: MA Experiment 108473 PARAMETER Experiment Name: At_Drought_Flowers_cDNA_P Parameter: Treatment Value: Drought vs. No Drought
  misc_feature: MA Experiment ID: 108489 Result: Up-regulated in Transcription
  misc_feature: MA Experiment ID: 108501 Result: Up-regulated in Transcription
  misc_feature: MA Experiment 108501 PARAMETER Experiment Name: At_ap2_floral_buds_cDNA_P Parameter: Plant Line Value: ap2 (Ler.)
  misc_feature: MA Experiment 108501 PARAMETER Experiment Name: At_ap2_floral_buds_cDNA_P Parameter: Tissue Value: Closed Flower
  misc_feature: MA Experiment ID: 108572 Result: Up-regulated in Transcription
  misc_feature: MA Experiment 108572 PARAMETER Experiment Name: At_Drought_cDNA_P Parameter: Timepoint (hr) Value: 1
  misc_feature: MA Experiment 108572 PARAMETER Experiment Name: At_Drought_cDNA_P Parameter: Tissue Value: Aerial
  misc_feature: MA Experiment 108572 PARAMETER Experiment Name: At_Drought_cDNA_P Parameter: Treatment Value: Drought vs. No Drought
  misc_feature: MA Experiment ID: 108573 Result: Up-regulated in Transcription
  misc_feature: MA Experiment 108573 PARAMETER Experiment Name: At_Drought_cDNA_P Parameter: Timepoint (hr) Value: 6
  misc_feature: MA Experiment 108573 PARAMETER Experiment Name: At_Drought_cDNA_P Parameter: Tissue Value: Aerial
  misc_feature: MA Experiment 108573 PARAMETER Experiment Name: At_Drought_cDNA_P Parameter: Treatment Value: Drought vs. No Drought
  misc_feature: MA Experiment ID: 108595 Result: Up-regulated in Transcription
  misc_feature: MA Experiment 108595 PARAMETER Experiment Name: At_Ler-pi_Ovule_cDNA_P Parameter: Plant Line Value: null
  misc_feature: MA Experiment ID: 108605 Result: Up-regulated in Transcription
  misc_feature: MA Experiment 108605 PARAMETER Experiment Name: At_100uM_ABA_cDNA_P Parameter: Timepoint (hr) Value: 6
  misc_feature: MA Experiment 108605 PARAMETER Experiment Name: At_100uM_ABA_cDNA_P Parameter: Tissue Value: Aerial
  misc_feature: MA Experiment 108605 PARAMETER Experiment Name: At_100uM_ABA_cDNA_P Parameter: Treatment Value: 100uM ABA vs. No Treatment
  misc_feature: MA Experiment ID: 108607 Result: Up-regulated in Transcription
  misc_feature: MA Experiment 108607 PARAMETER Experiment Name: At_100uM_ABA_cDNA_P Parameter: Timepoint (hr) Value: 4
  misc_feature: MA Experiment 108607 PARAMETER Experiment Name: At_100uM_ABA_cDNA_P Parameter: Tissue Value: Aerial
  misc_feature: MA Experiment 108607 PARAMETER Experiment Name: At_100uM_ABA_cDNA_P Parameter: Treatment Value: 100uM ABA vs. No Treatment
  misc_feature: MA Experiment ID: 20000069 Result: Up-regulated in Transcription
  misc_feature: MA Experiment 20000069 PARAMETER Experiment Name: At_100uM_ABA_Mutants_cDNA_P Parameter: Plant Line Value: CS23
  misc_feature: MA Experiment 20000069 PARAMETER Experiment Name: At_100uM_ABA_Mutants_cDNA_P Parameter: Timepoint (hr) Value: 6
  misc_feature: MA Experiment 20000069 PARAMETER Experiment Name: At_100uM_ABA_Mutants_cDNA_P Parameter: Tissue Value: Aerial
  misc_feature: MA Experiment 20000069 PARAMETER Experiment Name: At_100uM_ABA_Mutants_cDNA_P Parameter: Treatment Value: 100uM ABA vs. No Treatment
  misc_feature: MA Experiment ID: 20000070 Result: Up-regulated in Transcription
  misc_feature: MA Experiment 20000070 PARAMETER Experiment Name: At_100uM_ABA_Mutants_cDNA_P Parameter: Plant Line Value: CS24
  misc_feature: MA Experiment 20000070 PARAMETER Experiment Name: At_100uM_ABA_Mutants_cDNA_P Parameter: Timepoint (hr) Value: 6
  misc_feature: MA Experiment 20000070 PARAMETER Experiment Name: At_100uM_ABA_Mutants_cDNA_P Parameter: Tissue Value: Aerial
  misc_feature: MA Experiment 20000070 PARAMETER Experiment Name: At_100uM_ABA_Mutants_cDNA_P Parameter: Treatment Value: 100uM ABA vs. No Treatment
  misc_feature: MA Experiment ID: 20000071 Result: Up-regulated in Transcription
  misc_feature: MA Experiment 20000071 PARAMETER Experiment Name: At_100uM_ABA_Mutants_cDNA_P Parameter: Plant Line Value: CS8104
  misc_feature: MA Experiment 20000071 PARAMETER Experiment Name: At_100uM_ABA_Mutants_cDNA_P Parameter: Timepoint (hr) Value: 6
  misc_feature: MA Experiment 20000071 PARAMETER Experiment Name: At_100uM_ABA_Mutants_cDNA_P Parameter: Tissue Value: Aerial
  misc_feature: MA Experiment 20000071 PARAMETER Experiment Name: At_100uM_ABA_Mutants_cDNA_P Parameter: Treatment Value: 100uM ABA vs. No Treatment
  misc_feature: MA Experiment ID: 20000072 Result: Up-regulated in Transcription
  misc_feature: MA Experiment 20000072 PARAMETER Experiment Name: At_100uM_ABA_Mutants_cDNA_P Parameter: Plant Line Value: CS8105
  misc_feature: MA Experiment 20000072 PARAMETER Experiment Name: At_100uM_ABA_Mutants_cDNA_P Parameter: Timepoint (hr) Value: 6
  misc_feature: MA Experiment 20000072 PARAMETER Experiment Name: At_100uM_ABA_Mutants_cDNA_P Parameter: Tissue Value: Aerial
  misc_feature: MA Experiment 20000072 PARAMETER Experiment Name: At_100uM_ABA_Mutants_cDNA_P Parameter: Treatment Value: 100uM ABA vs. No Treatment
  misc_feature: MA Experiment ID: 20000117 Result: Up-regulated in Transcription
  misc_feature: MA Experiment 20000117 PARAMETER Experiment Name: At_100uM_ABA_Mutants_cDNA_P Parameter: Plant Line Value: Columbia
  misc_feature: MA Experiment 20000117 PARAMETER Experiment Name: At_100uM_ABA_Mutants_cDNA_P Parameter: Timepoint (hr) Value: 6
  misc_feature: MA Experiment 20000117 PARAMETER Experiment Name: At_100uM_ABA_Mutants_cDNA_P Parameter: Tissue Value: Aerial
  misc_feature: MA Experiment 20000117 PARAMETER Experiment Name: At_100uM_ABA_Mutants_cDNA_P Parameter: Treatment Value: 100uM ABA vs. No Treatment
  misc_feature: MA Experiment ID: 20000169 Result: Up-regulated in Transcription
  misc_feature: MA Experiment 20000169 PARAMETER Experiment Name: At_100uM_ABA_P Parameter: Age (day) Value: 14
  misc_feature: MA Experiment 20000169 PARAMETER Experiment Name: At_100uM_ABA_P Parameter: Organism Value: A. thaliana
  misc_feature: MA Experiment 20000169 PARAMETER Experiment Name: At_100uM_ABA_P Parameter: Plant Line Value: WS
  misc_feature: MA Experiment 20000169 PARAMETER Experiment Name: At_100uM_ABA_P Parameter: Timepoint (hr) Value: 6
  misc_feature: MA Experiment 20000169 PARAMETER Experiment Name: At_100uM_ABA_P Parameter: Tissue Value: Aerial
  misc_feature: MA Experiment 20000169 PARAMETER Experiment Name: At_100uM_ABA_P Parameter: Treatment Value: 100uM ABA vs. No Treatment
  misc_feature: MA Experiment ID: 20000184 Result: Up-regulated in Transcription
  misc_feature: MA Experiment 20000184 PARAMETER Experiment Name: At_Shoots__P Parameter: Age (day) Value: 7
  misc_feature: MA Experiment 20000184 PARAMETER Experiment Name: At_Shoots__P Parameter: Tissue Value: Shoots vs. Whole Plant
  misc_feature: MA Experiment ID: 20000185 Result: Down-regulated in Transcription
  misc_feature: MA Experiment 20000185 PARAMETER Experiment Name: At_Roots__P Parameter: Age (day) Value: 7 vs. 21
  misc_feature: MA Experiment 20000185 PARAMETER Experiment Name: At_Roots__P Parameter: Organism Value: A. thaliana
  misc_feature: MA Experiment 20000185 PARAMETER Experiment Name: At_Roots__P Parameter: Tissue Value: Roots vs. Whole Plant
  misc_feature: MA Experiment ID: 20000227 Result: Down-regulated in Transcription
  misc_feature: MA Experiment 20000227 PARAMETER Experiment Name: At_Root-Tips-vs-Tops_P Parameter: Tissue Value: Root Tips vs. Root Tops
  misc_feature: MA Experiment ID: 20000264 Result: Up-regulated in Transcription
  misc_feature: MA Experiment 20000264 PARAMETER Experiment Name: At_Open_Flower_P Parameter: Age (day) Value: 21
  misc_feature: MA Experiment 20000264 PARAMETER Experiment Name: At_Open_Flower_P Parameter: Plant Line Value: WS
  misc_feature: MA Experiment 20000264 PARAMETER Experiment Name: At_Open_Flower_P Parameter: Tissue Value: Open Flower vs. Whole Plant
  misc_feature: MA Experiment ID: 20000267 Result: Up-regulated in Transcription
  misc_feature: MA Experiment 20000267 PARAMETER Experiment Name: At_Drought_P Parameter: Age (day) Value: 7
  misc_feature: MA Experiment 20000267 PARAMETER Experiment Name: At_Drought_P Parameter: Organism Value: A. thaliana
  misc_feature: MA Experiment 20000267 PARAMETER Experiment Name: At_Drought_P Parameter: Plant Line Value: WS
  misc_feature: MA Experiment 20000267 PARAMETER Experiment Name: At_Drought_P Parameter: Timepoint (hr) Value: 6
  misc_feature: MA Experiment 20000267 PARAMETER Experiment Name: At_Drought_P Parameter: Tissue Value: Whole Plant
  misc_feature: MA Experiment 20000267 PARAMETER Experiment Name: At_Drought_P Parameter: Treatment Value: Drought vs. No Drought
  misc_feature: MA Experiment ID: 20000268 Result: Up-regulated in Transcription
  misc_feature: MA Experiment 20000268 PARAMETER Experiment Name: At_100mM_NaCl__P Parameter: Age (day) Value: 14
  misc_feature: MA Experiment 20000268 PARAMETER Experiment Name: At_100mM_NaCl__P Parameter: Organism Value: A. thaliana
  misc_feature: MA Experiment 20000268 PARAMETER Experiment Name: At_100mM_NaCl__P Parameter: Plant Line Value: WS
  misc_feature: MA Experiment 20000268 PARAMETER Experiment Name: At_100mM_NaCl__P Parameter: Timepoint (hr) Value: 6
  misc_feature: MA Experiment 20000268 PARAMETER Experiment Name: At_100mM_NaCl__P Parameter: Tissue Value: Whole Plant
  misc_feature: MA Experiment 20000268 PARAMETER Experiment Name: At_100mM_NaCl__P Parameter: Treatment Value: 100mM NaCl vs. No Treatment
  misc_feature: MA Experiment ID: 20000308 Result: Up-regulated in Transcription
  misc_feature: MA Experiment 20000308 PARAMETER Experiment Name: At_100mM_NaCl__P Parameter: Age (day) Value: 17
  misc_feature: MA Experiment 20000308 PARAMETER Experiment Name: At_100mM_NaCl__P Parameter: Organism Value: A. thaliana
  misc_feature: MA Experiment 20000308 PARAMETER Experiment Name: At_100mM_NaCl__P Parameter: Plant Line Value: WS
  misc_feature: MA Experiment 20000308 PARAMETER Experiment Name: At_100mM_NaCl__P Parameter: Timepoint (hr) Value: 72
  misc_feature: MA Experiment 20000308 PARAMETER Experiment Name: At_100mM_NaCl__P Parameter: Tissue Value: Whole Plant
  misc_feature: MA Experiment 20000308 PARAMETER Experiment Name: At_100mM_NaCl__P Parameter: Treatment Value: 100mM NaCl vs. No Treatment
  misc_feature: MA Experiment ID: 20000436 Result: Up-regulated in Transcription
  misc_feature: MA Experiment 20000436 PARAMETER Experiment Name: At_Drought_P Parameter: Age (day) Value: 7
  misc_feature: MA Experiment 20000436 PARAMETER Experiment Name: At_Drought_P Parameter: Organism Value: A. thaliana
  misc_feature: MA Experiment 20000436 PARAMETER Experiment Name: At_Drought_P Parameter: Plant Line Value: WS
  misc_feature: MA Experiment 20000436 PARAMETER Experiment Name: At_Drought_P Parameter: Timepoint (hr) Value: 12
  misc_feature: MA Experiment 20000436 PARAMETER Experiment Name: At_Drought_P Parameter: Tissue Value: Whole Plant
  misc_feature: MA Experiment 20000436 PARAMETER Experiment Name: At_Drought_P Parameter: Treatment Value: Drought vs. No Drought
  misc_feature: MA Experiment ID: 20000437 Result: Up-regulated in Transcription
  misc_feature: MA Experiment 20000437 PARAMETER Experiment Name: At_Drought_P Parameter: Age (day) Value: 8
  misc_feature: MA Experiment 20000437 PARAMETER Experiment Name: At_Drought_P Parameter: Organism Value: A. thaliana
  misc_feature: MA Experiment 20000437 PARAMETER Experiment Name: At_Drought_P Parameter: Plant Line Value: WS
  misc_feature: MA Experiment 20000437 PARAMETER Experiment Name: At_Drought_P Parameter: Timepoint (hr) Value: 24
  misc_feature: MA Experiment 20000437 PARAMETER Experiment Name: At_Drought_P Parameter: Tissue Value: Whole Plant
  misc_feature: MA Experiment 20000437 PARAMETER Experiment Name: At_Drought_P Parameter: Treatment Value: Drought vs. No Drought
  misc_feature: MA Experiment ID: 20000438 Result: Up-regulated in Transcription
  misc_feature: MA Experiment 20000438 PARAMETER Experiment Name: At_Shoots__P Parameter: Age (day) Value: 14
  misc_feature: MA Experiment 20000438 PARAMETER Experiment Name: At_Shoots__P Parameter: Tissue Value: Shoots vs. Whole Plant
  misc_feature: MA Experiment ID: 20000453 Result: Up-regulated in Transcription
  misc_feature: MA Experiment 20000453 PARAMETER Experiment Name: At_100uM_ABA_P Parameter: Age (day) Value: 15
  misc_feature: MA Experiment 20000453 PARAMETER Experiment Name: At_100uM_ABA_P Parameter: Organism Value: A. thaliana
  misc_feature: MA Experiment 20000453 PARAMETER Experiment Name: At_100uM_ABA_P Parameter: Plant Line Value: WS
  misc_feature: MA Experiment 20000453 PARAMETER Experiment Name: At_100uM_ABA_P Parameter: Timepoint (hr) Value: 24
  misc_feature: MA Experiment 20000453 PARAMETER Experiment Name: At_100uM_ABA_P Parameter: Tissue Value: Aerial
  misc_feature: MA Experiment 20000453 PARAMETER Experiment Name: At_100uM_ABA_P Parameter: Treatment Value: 100uM ABA vs. No Treatment
  misc_feature: MA Experiment ID: 20000455 Result: Up-regulated in Transcription
  misc_feature: MA Experiment 20000455 PARAMETER Experiment Name: At_100uM_ABA_P Parameter: Age (day) Value: 16
  misc_feature: MA Experiment 20000455 PARAMETER Experiment Name: At_100uM_ABA_P Parameter: Organism Value: A. thaliana
  misc_feature: MA Experiment 20000455 PARAMETER Experiment Name: At_100uM_ABA_P Parameter: Plant Line Value: WS
  misc_feature: MA Experiment 20000455 PARAMETER Experiment Name: At_100uM_ABA_P Parameter: Timepoint (hr) Value: 48
  misc_feature: MA Experiment 20000455 PARAMETER Experiment Name: At_100uM_ABA_P Parameter: Tissue Value: Aerial
  misc_feature: MA Experiment 20000455 PARAMETER Experiment Name: At_100uM_ABA_P Parameter: Treatment Value: 100uM ABA vs. No Treatment
  misc_feature: MA Experiment ID: 20000460 Result: Up-regulated in Transcription
  misc_feature: MA Experiment 20000460 PARAMETER Experiment Name: At_10percent_PEG_P Parameter: Age (day) Value: 12
  misc_feature: MA Experiment 20000460 PARAMETER Experiment Name: At_10percent_PEG_P Parameter: Organism Value: A. thaliana
  misc_feature: MA Experiment 20000460 PARAMETER Experiment Name: At_10percent_PEG_P Parameter: Plant Line Value: WS
  misc_feature: MA Experiment 20000460 PARAMETER Experiment Name: At_10percent_PEG_P Parameter: Timepoint (day) Value: 12
  misc_feature: MA Experiment 20000460 PARAMETER Experiment Name: At_10percent_PEG_P Parameter: Tissue Value: Whole Plant
  misc_feature: MA Experiment 20000460 PARAMETER Experiment Name: At_10percent_PEG_P Parameter: Treatment Value: 10percent PEG vs. No Treatment
  misc_feature: MA Experiment ID: 20000506 Result: Up-regulated in Transcription
  misc_feature: MA Experiment 20000506 PARAMETER Experiment Name: At_Wounding_P Parameter: Organism Value: A. thaliana
  misc_feature: MA Experiment 20000506 PARAMETER Experiment Name: At_Wounding_P Parameter: Plant Line Value: WS
  misc_feature: MA Experiment 20000506 PARAMETER Experiment Name: At_Wounding_P Parameter: Timepoint (hr) Value: 6
  misc_feature: MA Experiment 20000506 PARAMETER Experiment Name: At_Wounding_P Parameter: Tissue Value: Aerial
  misc_feature: MA Experiment 20000506 PARAMETER Experiment Name: At_Wounding_P Parameter: Treatment Value: Wounding vs. No Wounding
  misc_feature: MA Experiment ID: 20000573 Result: Down-regulated in Transcription
  misc_feature: MA Experiment 20000573 PARAMETER Experiment Name: At_100uM_ABA_Mutants__P Parameter: Organism Value: A. thaliana
  misc_feature: MA Experiment 20000573 PARAMETER Experiment Name: At_100uM_ABA_Mutants__P Parameter: Plant Line Value: CS22 vs. Ler wt
  misc_feature: MA Experiment 20000573 PARAMETER Experiment Name: At_100uM_ABA_Mutants__P Parameter: Timepoint (hr) Value: N/A
  misc_feature: MA Experiment 20000573 PARAMETER Experiment Name: At_100uM_ABA_Mutants__P Parameter: Tissue Value: Whole Plant
  misc_feature: MA Experiment 20000573 PARAMETER Experiment Name: At_100uM_ABA_Mutants__P Parameter: Treatment Value: None
  misc_feature: MA Experiment ID: 20001450 Result: Up-regulated in Transcription
  misc_feature: MA Experiment 20001450 PARAMETER Experiment Name: At_Far-red-induction_P Parameter: Age (day) Value: 7
  misc_feature: MA Experiment 20001450 PARAMETER Experiment Name: At_Far-red-induction_P Parameter: Light Value: Far-red vs. White
  misc_feature: MA Experiment 20001450 PARAMETER Experiment Name: At_Far-red-induction_P Parameter: Organism Value: A. thaliana
  misc_feature: MA Experiment 20001450 PARAMETER Experiment Name: At_Far-red-induction_P Parameter: Plant Line Value: Columbia
  misc_feature: MA Experiment 20001450 PARAMETER Experiment Name: At_Far-red-induction_P Parameter: Timepoint (hr) Value: 8
  misc_feature: MA Experiment 20001450 PARAMETER Experiment Name: At_Far-red-induction_P Parameter: Tissue Value: Whole Plant
  misc_feature: MA Experiment ID: 20001451 Result: Up-regulated in Transcription
  misc_feature: MA Experiment 20001451 PARAMETER Experiment Name: At_Far-red-induction_P Parameter: Age (day) Value: 7
  misc_feature: MA Experiment 20001451 PARAMETER Experiment Name: At_Far-red-induction_P Parameter: Light Value: Far-red vs. White
  misc_feature: MA Experiment 20001451 PARAMETER Experiment Name: At_Far-red-induction_P Parameter: Organism Value: A. thaliana
  misc_feature: MA Experiment 20001451 PARAMETER Experiment Name: At_Far-red-induction_P Parameter: Plant Line Value: Columbia
  misc_feature: MA Experiment 20001451 PARAMETER Experiment Name: At_Far-red-induction_P Parameter: Timepoint (hr) Value: 24
  misc_feature: MA Experiment 20001451 PARAMETER Experiment Name: At_Far-red-induction_P Parameter: Tissue Value: Whole Plant
  misc_feature: MA Experiment ID: 20001554 Result: Up-regulated in Transcription
  misc_feature: MA Experiment 20001554 PARAMETER Experiment Name: At_Drought_Soil_Dry_P Parameter: Age (day) Value: 21
  misc_feature: MA Experiment 20001554 PARAMETER Experiment Name: At_Drought_Soil_Dry_P Parameter: Organism Value: A. thaliana
  misc_feature: MA Experiment 20001554 PARAMETER Experiment Name: At_Drought_Soil_Dry_P Parameter: Plant Line Value: WS
  misc_feature: MA Experiment 20001554 PARAMETER Experiment Name: At_Drought_Soil_Dry_P Parameter: Post Timepoint (hr) Value: None
  misc_feature: MA Experiment 20001554 PARAMETER Experiment Name: At_Drought_Soil_Dry_P Parameter: Post-Treatment Value: None
  misc_feature: MA Experiment 20001554 PARAMETER Experiment Name: At_Drought_Soil_Dry_P Parameter: Timepoint (day) Value: 7
  misc_feature: MA Experiment 20001554 PARAMETER Experiment Name: At_Drought_Soil_Dry_P Parameter: Treatment Value: Drought vs. No Drought
  misc_feature: MA Experiment ID: 20001555 Result: Up-regulated in Transcription
  misc_feature: MA Experiment 20001555 PARAMETER Experiment Name: At_Drought_Soil_Dry_P Parameter: Age (day) Value: 24
  misc_feature: MA Experiment 20001555 PARAMETER Experiment Name: At_Drought_Soil_Dry_P Parameter: Organism Value: A. thaliana
  misc_feature: MA Experiment 20001555 PARAMETER Experiment Name: At_Drought_Soil_Dry_P Parameter: Plant Line Value: WS
  misc_feature: MA Experiment 20001555 PARAMETER Experiment Name: At_Drought_Soil_Dry_P Parameter: Post Timepoint (hr) Value: None
  misc_feature: MA Experiment 20001555 PARAMETER Experiment Name: At_Drought_Soil_Dry_P Parameter: Post-Treatment Value: None
  misc_feature: MA Experiment 20001555 PARAMETER Experiment Name: At_Drought_Soil_Dry_P Parameter: Timepoint (day) Value: 10
  misc_feature: MA Experiment 20001555 PARAMETER Experiment Name: At_Drought_Soil_Dry_P Parameter: Treatment Value: Drought vs. No Drought
  misc_feature: MA Experiment ID: 20001556 Result: Up-regulated in Transcription
  misc_feature: MA Experiment 20001556 PARAMETER Experiment Name: At_Drought_Soil_Dry_P Parameter: Age (day) Value: 26
  misc_feature: MA Experiment 20001556 PARAMETER Experiment Name: At_Drought_Soil_Dry_P Parameter: Organism Value: A. thaliana
  misc_feature: MA Experiment 20001556 PARAMETER Experiment Name: At_Drought_Soil_Dry_P Parameter: Plant Line Value: WS
  misc_feature: MA Experiment 20001556 PARAMETER Experiment Name: At_Drought_Soil_Dry_P Parameter: Post Timepoint (hr) Value: None
  misc_feature: MA Experiment 20001556 PARAMETER Experiment Name: At_Drought_Soil_Dry_P Parameter: Post-Treatment Value: None
  misc_feature: MA Experiment 20001556 PARAMETER Experiment Name: At_Drought_Soil_Dry_P Parameter: Timepoint (day) Value: 12
  misc_feature: MA Experiment 20001556 PARAMETER Experiment Name: At_Drought_Soil_Dry_P Parameter: Treatment Value: Drought vs. No Drought
  misc_feature: MA Experiment ID: 20001559 Result: Up-regulated in Transcription
  misc_feature: MA Experiment 20001559 PARAMETER Experiment Name: At_Drought_Soil_Dry_P Parameter: Age (day) Value: 28
  misc_feature: MA Experiment 20001559 PARAMETER Experiment Name: At_Drought_Soil_Dry_P Parameter: Organism Value: A. thaliana
  misc_feature: MA Experiment 20001559 PARAMETER Experiment Name: At_Drought_Soil_Dry_P Parameter: Plant Line Value: WS
  misc_feature: MA Experiment 20001559 PARAMETER Experiment Name: At_Drought_Soil_Dry_P Parameter: Post Timepoint (hr) Value: 29
  misc_feature: MA Experiment 20001559 PARAMETER Experiment Name: At_Drought_Soil_Dry_P Parameter: Post-Treatment Value: Re-Water vs. No Drought
  misc_feature: MA Experiment 20001559 PARAMETER Experiment Name: At_Drought_Soil_Dry_P Parameter: Timepoint (day) Value: 14
  misc_feature: MA Experiment 20001559 PARAMETER Experiment Name: At_Drought_Soil_Dry_P Parameter: Treatment Value: Drought vs. No Drought
  misc_feature: MA Experiment ID: 20001560 Result: Up-regulated in Transcription
  misc_feature: MA Experiment 20001560 PARAMETER Experiment Name: At_Drought_Soil_Dry_P Parameter: Age (day) Value: 28
  misc_feature: MA Experiment 20001560 PARAMETER Experiment Name: At_Drought_Soil_Dry_P Parameter: Organism Value: A. thaliana
  misc_feature: MA Experiment 20001560 PARAMETER Experiment Name: At_Drought_Soil_Dry_P Parameter: Plant Line Value: WS
  misc_feature: MA Experiment 20001560 PARAMETER Experiment Name: At_Drought_Soil_Dry_P Parameter: Post Timepoint (hr) Value: None
  misc_feature: MA Experiment 20001560 PARAMETER Experiment Name: At_Drought_Soil_Dry_P Parameter: Post-Treatment Value: None
  misc_feature: MA Experiment 20001560 PARAMETER Experiment Name: At_Drought_Soil_Dry_P Parameter: Timepoint (day) Value: 14
  misc_feature: MA Experiment 20001560 PARAMETER Experiment Name: At_Drought_Soil_Dry_P Parameter: Treatment Value: Drought vs. No Drought
  misc_feature: MA Experiment ID: 20001772 Result: Up-regulated in Transcription
  misc_feature: MA Experiment 20001772 PARAMETER Experiment Name: At_Far-red-enriched-adult_P Parameter: Age (day) Value: 29
  misc_feature: MA Experiment 20001772 PARAMETER Experiment Name: At_Far-red-enriched-adult_P Parameter: Light Value: Far-red enriched vs. White
  misc_feature: MA Experiment 20001772 PARAMETER Experiment Name: At_Far-red-enriched-adult_P Parameter: Organism Value: A. thaliana
  misc_feature: MA Experiment 20001772 PARAMETER Experiment Name: At_Far-red-enriched-adult_P Parameter: Plant Line Value: Columbia
  misc_feature: MA Experiment 20001772 PARAMETER Experiment Name: At_Far-red-enriched-adult_P Parameter: Timepoint (hr) Value: 24
  misc_feature: MA Experiment 20001772 PARAMETER Experiment Name: At_Far-red-enriched-adult_P Parameter: Tissue Value: Aerial
  misc_feature: MA Experiment ID: 20001904 Result: Up-regulated in Transcription
  misc_feature: MA Experiment 20001904 PARAMETER Experiment Name: At_Drought_Reproduction_P Parameter: Age (day) Value: 37
  misc_feature: MA Experiment 20001904 PARAMETER Experiment Name: At_Drought_Reproduction_P Parameter: Organism Value: A. thaliana
  misc_feature: MA Experiment 20001904 PARAMETER Experiment Name: At_Drought_Reproduction_P Parameter: Plant Line Value: WS
  misc_feature: MA Experiment 20001904 PARAMETER Experiment Name: At_Drought_Reproduction_P Parameter: Timepoint (day) Value: 7
  misc_feature: MA Experiment 20001904 PARAMETER Experiment Name: At_Drought_Reproduction_P Parameter: Tissue Value: Rosettes
  misc_feature: MA Experiment 20001904 PARAMETER Experiment Name: At_Drought_Reproduction_P Parameter: Treatment Value: Drought vs. No Drought
  misc_feature: MA Experiment ID: 20001905 Result: Up-regulated in Transcription
  misc_feature: MA Experiment 20001905 PARAMETER Experiment Name: At_Drought_Reproduction_P Parameter: Age (day) Value: 40
  misc_feature: MA Experiment 20001905 PARAMETER Experiment Name: At_Drought_Reproduction_P Parameter: Organism Value: A. thaliana
  misc_feature: MA Experiment 20001905 PARAMETER Experiment Name: At_Drought_Reproduction_P Parameter: Plant Line Value: WS
  misc_feature: MA Experiment 20001905 PARAMETER Experiment Name: At_Drought_Reproduction_P Parameter: Timepoint (day) Value: 10
  misc_feature: MA Experiment 20001905 PARAMETER Experiment Name: At_Drought_Reproduction_P Parameter: Tissue Value: Rosettes
  misc_feature: MA Experiment 20001905 PARAMETER Experiment Name: At_Drought_Reproduction_P Parameter: Treatment Value: Drought vs. No Drought
  misc_feature: MA Experiment ID: 20001908 Result: Up-regulated in Transcription
  misc_feature: MA Experiment 20001908 PARAMETER Experiment Name: At_Drought_Reproduction_P Parameter: Age (day) Value: 40
  misc_feature: MA Experiment 20001908 PARAMETER Experiment Name: At_Drought_Reproduction_P Parameter: Organism Value: A. thaliana
  misc_feature: MA Experiment 20001908 PARAMETER Experiment Name: At_Drought_Reproduction_P Parameter: Plant Line Value: WS
  misc_feature: MA Experiment 20001908 PARAMETER Experiment Name: At_Drought_Reproduction_P Parameter: Timepoint (day) Value: 10
  misc_feature: MA Experiment 20001908 PARAMETER Experiment Name: At_Drought_Reproduction_P Parameter: Tissue Value: Siliques
  misc_feature: MA Experiment 20001908 PARAMETER Experiment Name: At_Drought_Reproduction_P Parameter: Treatment Value: Drought vs. No Drought
  misc_feature: MA Experiment ID: 20001910 Result: Up-regulated in Transcription
  misc_feature: MA Experiment 20001910 PARAMETER Experiment Name: At_Drought_Reproduction_P Parameter: Age (day) Value: 37
  misc_feature: MA Experiment 20001910 PARAMETER Experiment Name: At_Drought_Reproduction_P Parameter: Organism Value: A. thaliana
  misc_feature: MA Experiment 20001910 PARAMETER Experiment Name: At_Drought_Reproduction_P Parameter: Plant Line Value: WS
  misc_feature: MA Experiment 20001910 PARAMETER Experiment Name: At_Drought_Reproduction_P Parameter: Timepoint (day) Value: 7
  misc_feature: MA Experiment 20001910 PARAMETER Experiment Name: At_Drought_Reproduction_P Parameter: Tissue Value: Flowers
  misc_feature: MA Experiment 20001910 PARAMETER Experiment Name: At_Drought_Reproduction_P Parameter: Treatment Value: Drought vs. No Drought

SEQ ID NO: 34152 - protein, 118 aa, Arabidopsis thaliana; identical to SEQ ID NO: 30562
  peptide (1)..(118): Ceres Seq. ID no. 13497743
  misc_feature (29)..(114): Pfam Name: Protease inhibitor/seed storage/LTP family Pfam Description: Protease inhibitor/seed storage/LTP family
  misc_feature (1)..(118): Homolog of NCBI NO: 2497740 NR Description: Nonspecific lipid-transfer protein D precursor
  misc_feature (1)..(118): Homolog of NCBI NO: 5777389 NR Description: non-specific lipid transfer protein [Brassica
  misc_feature (1)..(118): Homolog of NCBI NO: 2497738 NR Description: NONSPECIFIC LIPID-TRANSFER PROTEIN A PRECURSOR
  misc_feature (1)..(118): Homolog of NCBI NO: 2497737 NR Description: NONSPECIFIC LIPID-TRANSFER PROTEIN 3 PRECURSOR
  misc_feature (1)..(118): Homolog of NCBI NO: 15224899 NR Description: nonspecific lipid transfer protein 1 (LTP 1)
  misc_feature (1)..(118): Homolog of NCBI NO: 11273805 NR Description: lipid transfer protein [imported] - wild cabbage
  misc_feature (1)..(118): Homolog of NCBI NO: 2497739 NR Description: NONSPECIFIC LIPID-TRANSFER PROTEIN B PRECURSOR
  misc_feature (1)..(118): Homolog of NCBI NO: 2497736 NR Description: NONSPECIFIC LIPID-TRANSFER PROTEIN 2 PRECURSOR
  misc_feature (1)..(118): Homolog of NCBI NO: 2497735 NR Description: NONSPECIFIC LIPID-TRANSFER PROTEIN 1 PRECURSOR
  misc_feature (1)..(118): Homolog of NCBI NO: 15224898 NR Description: nonspecific lipid transfer protein 2 (LTP 2)

SEQ ID NO: 34153 - protein, 114 aa, Arabidopsis thaliana; identical to SEQ ID NO: 30563
  peptide (1)..(114): Ceres Seq. ID no. 13497744
  misc_feature (25)..(110): Pfam Name: Protease inhibitor/seed storage/LTP family Pfam Description: Protease inhibitor/seed storage/LTP family
  misc_feature (1)..(114): Homolog of NCBI NO: 2497740 NR Description: Nonspecific lipid-transfer protein D precursor
  misc_feature (1)..(114): Homolog of NCBI NO: 5777389 NR Description: non-specific lipid transfer protein [Brassica
  misc_feature (1)..(114): Homolog of NCBI NO: 2497738 NR Description: NONSPECIFIC LIPID-TRANSFER PROTEIN A PRECURSOR
  misc_feature (1)..(114): Homolog of NCBI NO: 2497737 NR Description: NONSPECIFIC LIPID-TRANSFER PROTEIN 3 PRECURSOR
  misc_feature (1)..(114): Homolog of NCBI NO: 15224899 NR Description: nonspecific lipid transfer protein 1 (LTP 1)
  misc_feature (1)..(114): Homolog of NCBI NO: 11273805 NR Description: lipid transfer protein [imported] - wild cabbage
  misc_feature (1)..(114): Homolog of NCBI NO: 2497739 NR Description: NONSPECIFIC LIPID-TRANSFER PROTEIN B PRECURSOR
  misc_feature (1)..(114): Homolog of NCBI NO: 2497736 NR Description: NONSPECIFIC LIPID-TRANSFER PROTEIN 2 PRECURSOR
  misc_feature (1)..(114): Homolog of NCBI NO: 2497735 NR Description: NONSPECIFIC LIPID-TRANSFER PROTEIN 1 PRECURSOR
  misc_feature (1)..(114): Homolog of NCBI NO: 15224898 NR Description: nonspecific lipid transfer protein 2 (LTP 2)

SEQ ID NO: 34154 - protein, 109 aa, Arabidopsis thaliana; identical to SEQ ID NO: 30564
  peptide (1)..(109): Ceres Seq. ID no. 13497745
  misc_feature (20)..(105): Pfam Name: Protease inhibitor/seed storage/LTP family Pfam Description: Protease inhibitor/seed storage/LTP family
  misc_feature (1)..(109): Homolog of NCBI NO: 2497740 NR Description: Nonspecific lipid-transfer protein D precursor
  misc_feature (1)..(109): Homolog of NCBI NO: 5777389 NR Description: non-specific lipid transfer protein [Brassica
  misc_feature (1)..(109): Homolog of NCBI NO: 2497738 NR Description: NONSPECIFIC LIPID-TRANSFER PROTEIN A PRECURSOR
  misc_feature (1)..(109): Homolog of NCBI NO: 2497737 NR Description: NONSPECIFIC LIPID-TRANSFER PROTEIN 3 PRECURSOR
  misc_feature (1)..(109): Homolog of NCBI NO: 15224899 NR Description: nonspecific lipid transfer protein 1 (LTP 1)
  misc_feature (1)..(109): Homolog of NCBI NO: 11273805 NR Description: lipid transfer protein [imported] - wild cabbage
  misc_feature (1)..(109): Homolog of NCBI NO: 2497739 NR Description: NONSPECIFIC LIPID-TRANSFER PROTEIN B PRECURSOR
  misc_feature (1)..(109): Homolog of NCBI NO: 2497736 NR Description: NONSPECIFIC LIPID-TRANSFER PROTEIN 2 PRECURSOR
  misc_feature (1)..(109): Homolog of NCBI NO: 2497735 NR Description: NONSPECIFIC LIPID-TRANSFER PROTEIN 1 PRECURSOR
  misc_feature (1)..(109): Homolog of NCBI NO: 15224898 NR Description: nonspecific lipid transfer protein 2 (LTP 2)

SEQ ID NO: 34155 - DNA, 1065 bp, Arabidopsis thaliana; identical to SEQ ID NO: 30565
  misc_feature (1)..(1065): Ceres Seq. ID no. 12370948
  misc_feature: MA Experiment ID: 108433 Result: Down-regulated in Transcription
  misc_feature: MA Experiment 108433 PARAMETER Experiment Name: At_rhl_Mutant2_cDNA_P Parameter: Age (day) Value: 7
  misc_feature: MA Experiment 108433 PARAMETER Experiment Name: At_rhl_Mutant2_cDNA_P Parameter: Organism Value: A. thaliana
  misc_feature: MA Experiment 108433 PARAMETER Experiment Name: At_rhl_Mutant2_cDNA_P Parameter: Plant Line Value: rhl Mutant vs. wt landsburg
  misc_feature: MA Experiment 108433 PARAMETER Experiment Name: At_rhl_Mutant2_cDNA_P Parameter: Tissue Value: Roots
  misc_feature: MA Experiment ID: 108434 Result: Up-regulated in Transcription
  misc_feature: MA Experiment 108434 PARAMETER Experiment Name: At_Root_Tips_cDNA_P Parameter: Tissue Value: Root Tips
  misc_feature: MA Experiment ID: 108462 Result: Down-regulated in Transcription
  misc_feature: MA Experiment 108462 PARAMETER Experiment Name: At_Germinating_Seeds_cDNA_P Parameter: Age (day) Value: 2 vs. 0
  misc_feature: MA Experiment 108462 PARAMETER Experiment Name: At_Germinating_Seeds_cDNA_P Parameter: Tissue Value: Germinating Seeds
  misc_feature: MA Experiment ID: 108463 Result: Down-regulated in Transcription
  misc_feature: MA Experiment 108463 PARAMETER Experiment Name: At_Germinating_Seeds_cDNA_P Parameter: Age (day) Value: 3 vs. 0
  misc_feature: MA Experiment 108463 PARAMETER Experiment Name: At_Germinating_Seeds_cDNA_P Parameter: Tissue Value: Germinating Seeds
  misc_feature: MA Experiment ID: 108464 Result: Down-regulated in Transcription
  misc_feature: MA Experiment 108464 PARAMETER Experiment Name: At_Germinating_Seeds_cDNA_P Parameter: Age (day) Value: 4 vs. 0
  misc_feature: MA Experiment 108464 PARAMETER Experiment Name: At_Germinating_Seeds_cDNA_P Parameter: Tissue Value: Germinating Seeds
  misc_feature: MA Experiment ID: 20000117 Result: Down-regulated in Transcription
  misc_feature: MA Experiment 20000117 PARAMETER Experiment Name: At_100uM_ABA_Mutants_cDNA_P Parameter: Plant Line Value: Columbia
  misc_feature: MA Experiment 20000117 PARAMETER Experiment Name: At_100uM_ABA_Mutants_cDNA_P Parameter: Timepoint (hr) Value: 6
  misc_feature: MA Experiment 20000117 PARAMETER Experiment Name: At_100uM_ABA_Mutants_cDNA_P Parameter: Tissue Value: Aerial
  misc_feature: MA Experiment 20000117 PARAMETER Experiment Name: At_100uM_ABA_Mutants_cDNA_P Parameter: Treatment Value: 100uM ABA vs. No Treatment
  misc_feature: MA Experiment ID: 20000234 Result: Up-regulated in Transcription
  misc_feature: MA Experiment 20000234 PARAMETER Experiment Name: At_Siliques_P Parameter: Age (day) Value: 21
  misc_feature: MA Experiment 20000234 PARAMETER Experiment Name: At_Siliques_P Parameter: Organism Value: A. thaliana
  misc_feature: MA Experiment 20000234 PARAMETER Experiment Name: At_Siliques_P Parameter: Plant Line Value: WS
  misc_feature: MA Experiment 20000234 PARAMETER Experiment Name: At_Siliques_P Parameter: Tissue Value: Less Than 5mm Siliques vs. Whole Plant
  misc_feature: MA Experiment ID: 20000235 Result: Up-regulated in Transcription
  misc_feature: MA Experiment 20000235 PARAMETER Experiment Name: At_Siliques_P Parameter: Age (day) Value: 21
  misc_feature: MA Experiment 20000235 PARAMETER Experiment Name: At_Siliques_P Parameter: Organism Value: A. thaliana
  misc_feature: MA Experiment 20000235 PARAMETER Experiment Name: At_Siliques_P Parameter: Plant Line Value: WS
  misc_feature: MA Experiment 20000235 PARAMETER Experiment Name: At_Siliques_P Parameter: Tissue Value: 5-10mm Siliques vs. Whole Plant
  misc_feature: MA Experiment ID: 20000265 Result: Up-regulated in Transcription
  misc_feature: MA Experiment 20000265 PARAMETER Experiment Name: At_Open_Flower_P Parameter: Age (day) Value: 21
  misc_feature: MA Experiment 20000265 PARAMETER Experiment Name: At_Open_Flower_P Parameter: Plant Line Value: WS
  misc_feature: MA Experiment 20000265 PARAMETER Experiment Name: At_Open_Flower_P Parameter: Tissue Value: Closed Flower vs. Whole Plant
  misc_feature: MA Experiment ID: 20000437 Result: Down-regulated in Transcription
  misc_feature: MA Experiment 20000437 PARAMETER Experiment Name: At_Drought_P Parameter: Age (day) Value: 8
  misc_feature: MA Experiment 20000437 PARAMETER Experiment Name: At_Drought_P Parameter: Organism Value: A. thaliana
  misc_feature: MA Experiment 20000437 PARAMETER Experiment Name: At_Drought_P Parameter: Plant Line Value: WS
  misc_feature: MA Experiment 20000437 PARAMETER Experiment Name: At_Drought_P Parameter: Timepoint (hr) Value: 24
  misc_feature: MA Experiment 20000437 PARAMETER Experiment Name: At_Drought_P Parameter: Tissue Value: Whole Plant
  misc_feature: MA Experiment 20000437 PARAMETER Experiment Name: At_Drought_P Parameter: Treatment Value: Drought vs. No Drought
  misc_feature: MA Experiment ID: 20000794 Result: Down-regulated in Transcription
  misc_feature: MA Experiment 20000794 PARAMETER Experiment Name: At_Petals_P Parameter: Age (day) Value: 23-25 days
  misc_feature: MA Experiment 20000794 PARAMETER Experiment Name: At_Petals_P Parameter: Plant Line Value: WS
  misc_feature: MA Experiment 20000794 PARAMETER Experiment Name: At_Petals_P Parameter: Tissue Value: Petals vs. Whole plant
  misc_feature: MA Experiment ID: 20001558 Result: Up-regulated in Transcription
  misc_feature: MA Experiment 20001558 PARAMETER Experiment Name: At_Drought_Soil_Dry_P Parameter: Age (day) Value: 27
  misc_feature: MA Experiment 20001558 PARAMETER Experiment Name: At_Drought_Soil_Dry_P Parameter: Organism Value: A. thaliana
  misc_feature: MA Experiment 20001558 PARAMETER Experiment Name: At_Drought_Soil_Dry_P Parameter: Plant Line Value: WS
  misc_feature: MA Experiment 20001558 PARAMETER Experiment Name: At_Drought_Soil_Dry_P Parameter: Post Timepoint (hr) Value: 6
  misc_feature: MA Experiment 20001558 PARAMETER Experiment Name: At_Drought_Soil_Dry_P Parameter: Post-Treatment Value: Re-Water vs. No Drought
  misc_feature: MA Experiment 20001558 PARAMETER Experiment Name: At_Drought_Soil_Dry_P Parameter: Timepoint (day) Value: 13
  misc_feature: MA Experiment 20001558 PARAMETER Experiment Name: At_Drought_Soil_Dry_P Parameter: Treatment Value: Drought vs. No Drought
  misc_feature: MA Experiment ID: 20001757 Result: Up-regulated in Transcription
  misc_feature: MA Experiment 20001757 PARAMETER Experiment Name: At_50mM_NH4NO3_L-to-H_P Parameter: Timepoint (hr) Value: 6
  misc_feature: MA Experiment 20001757 PARAMETER Experiment Name: At_50mM_NH4NO3_L-to-H_P Parameter: Tissue Value: Leaf
  misc_feature: MA Experiment 20001757 PARAMETER Experiment Name: At_50mM_NH4NO3_L-to-H_P Parameter: Treatment Value: 50mM NH4NO3 vs 100mM Mannitol
  misc_feature: MA Experiment ID: 20001911 Result: Down-regulated in Transcription
  misc_feature: MA Experiment 20001911 PARAMETER Experiment Name: At_Drought_Reproduction_P Parameter: Age (day) Value: 40
  misc_feature: MA Experiment 20001911 PARAMETER Experiment Name: At_Drought_Reproduction_P Parameter: Organism Value: A. thaliana
  misc_feature: MA Experiment 20001911 PARAMETER Experiment Name: At_Drought_Reproduction_P Parameter: Plant Line Value: WS
  misc_feature: MA Experiment 20001911 PARAMETER Experiment Name: At_Drought_Reproduction_P Parameter: Timepoint (day) Value: 10
  misc_feature: MA Experiment 20001911 PARAMETER Experiment Name: At_Drought_Reproduction_P Parameter: Tissue Value: Flowers
  misc_feature: MA Experiment 20001911 PARAMETER Experiment Name: At_Drought_Reproduction_P Parameter: Treatment Value: Drought vs. No Drought

SEQ ID NO: 34156 - protein, 271 aa, Arabidopsis thaliana; identical to SEQ ID NO: 30566
  peptide (1)..(271): Ceres Seq. ID no. 12370949
  misc_feature (109)..(213): Pfam Name: Ribosomal protein L22p/L17e Pfam Description: Ribosomal protein L22p/L17e
  misc_feature (102)..(223): Homolog of NCBI NO: 13470556 NR Description: 50S ribosomal protein L22 [Mesorhizobium loti]
  misc_feature (103)..(223): Homolog of NCBI NO: 15889237 NR Description: AGR_C_3548p [Agrobacterium tumefaciens]
  misc_feature (75)..(217): Homolog of NCBI NO: 23010684 NR Description: hypothetical protein [Magnetospirillum
  misc_feature (93)..(220): Homolog of NCBI NO: 15965114 NR Description: PROBABLE 50S RIBOSOMAL PROTEIN L22 [Sinorhizobium
  misc_feature (65)..(267): Homolog of NCBI NO: 25407603 NR Description: copper-binding protein-like [imported] -
  misc_feature (1)..(255): Homolog of NCBI NO: 34912678 NR Description: P0686E09.8 [Oryza sativa (japonica
  misc_feature (65)..(269): Homolog of NCBI NO: 25405544 NR Description: hypothetical protein F19K6.5 [imported] -
  misc_feature (45)..(267): Homolog of NCBI NO: 7485901 NR Description: hypothetical protein F20O9.30 - Arabidopsis
  misc_feature (1)..(269): Homolog of NCBI NO: 22330190 NR Description: chloroplast 50S ribosomal protein L22, putative
  misc_feature (1)..(271): Homolog of NCBI NO: 18417177 NR Description: Expressed protein

SEQ ID NO: 34157 - protein, 141 aa, Arabidopsis thaliana; identical to SEQ ID NO: 30567
  peptide (1)..(141): Ceres Seq. ID no. 12370950
  misc_feature (1)..(83): Pfam Name: Ribosomal protein L22p/L17e Pfam Description: Ribosomal protein L22p/L17e
  misc_feature (1)..(93): Homolog of NCBI NO: 13470556 NR Description: 50S ribosomal protein L22 [Mesorhizobium loti]
  misc_feature (1)..(93): Homolog of NCBI NO: 15889237 NR Description: AGR_C_3548p [Agrobacterium tumefaciens]
  misc_feature (1)..(87): Homolog of NCBI NO: 23010684 NR Description: hypothetical protein [Magnetospirillum
  misc_feature (1)..(90): Homolog of NCBI NO: 15965114 NR Description: PROBABLE 50S RIBOSOMAL PROTEIN L22 [Sinorhizobium
  misc_feature (1)..(137): Homolog of NCBI NO: 25407603 NR Description: copper-binding protein-like [imported] -
  misc_feature (1)..(125): Homolog of NCBI NO: 34912678 NR Description: P0686E09.8 [Oryza sativa (japonica
  misc_feature (1)..(139): Homolog of NCBI NO: 25405544 NR Description: hypothetical protein F19K6.5 [imported] -
  misc_feature (1)..(137): Homolog of NCBI NO: 7485901 NR Description: hypothetical protein F20O9.30 - Arabidopsis
  misc_feature (1)..(139): Homolog of NCBI NO: 22330190 NR Description: chloroplast 50S ribosomal protein L22, putative
  misc_feature (1)..(141): Homolog of NCBI NO: 18417177 NR Description: Expressed protein

SEQ ID NO: 34158 - DNA, 1580 bp, Arabidopsis thaliana; identical to SEQ ID NO: 30568
  misc_feature (1)..(1580): Ceres Seq. ID no. 12334488
  misc_feature: MA Experiment ID: 108434 Result: Up-regulated in Transcription
  misc_feature: MA Experiment 108434 PARAMETER Experiment Name: At_Root_Tips_cDNA_P Parameter: Tissue Value: Root Tips
  misc_feature: MA Experiment ID: 108462 Result: Up-regulated in Transcription
  misc_feature: MA Experiment 108462 PARAMETER Experiment Name: At_Germinating_Seeds_cDNA_P Parameter: Age (day) Value: 2 vs. 0
  misc_feature: MA Experiment 108462 PARAMETER Experiment Name: At_Germinating_Seeds_cDNA_P Parameter: Tissue Value: Germinating Seeds
  misc_feature: MA Experiment ID: 108463 Result: Up-regulated in Transcription
  misc_feature: MA Experiment 108463 PARAMETER Experiment Name: At_Germinating_Seeds_cDNA_P Parameter: Age (day) Value: 3 vs. 0
  misc_feature: MA Experiment 108463 PARAMETER Experiment Name: At_Germinating_Seeds_cDNA_P Parameter: Tissue Value: Germinating Seeds
  misc_feature: MA Experiment ID: 20000264 Result: Up-regulated in Transcription
  misc_feature: MA Experiment 20000264 PARAMETER Experiment Name: At_Open_Flower_P Parameter: Age (day) Value: 21
  misc_feature: MA Experiment 20000264 PARAMETER Experiment Name: At_Open_Flower_P Parameter: Plant Line Value: WS
  misc_feature: MA Experiment 20000264 PARAMETER Experiment Name: At_Open_Flower_P Parameter: Tissue Value: Open Flower vs. Whole Plant
  misc_feature: MA Experiment ID: 20000265 Result: Up-regulated in Transcription
  misc_feature: MA Experiment 20000265 PARAMETER Experiment Name: At_Open_Flower_P Parameter: Age (day) Value: 21
  misc_feature: MA Experiment 20000265 PARAMETER Experiment Name: At_Open_Flower_P Parameter: Plant Line Value: WS
  misc_feature: MA Experiment 20000265 PARAMETER Experiment Name: At_Open_Flower_P Parameter: Tissue Value: Closed Flower vs. Whole Plant
  misc_feature: MA Experiment ID: 20000286 Result: Up-regulated in Transcription
  misc_feature: MA Experiment 20000286 PARAMETER Experiment Name: At_Open_Flower_P Parameter: Age (day) Value: 21
  misc_feature: MA Experiment 20000286 PARAMETER Experiment Name: At_Open_Flower_P Parameter: Plant Line Value: WS
  misc_feature: MA Experiment 20000286 PARAMETER Experiment Name: At_Open_Flower_P Parameter: Tissue Value: Half Open vs. Whole Plant
  misc_feature: MA Experiment ID: 20000496 Result: Up-regulated in Transcription
  misc_feature: MA Experiment 20000496 PARAMETER Experiment Name: At_Guard_Cells_P Parameter: Harvest Date Value: 7/19/2002
  misc_feature: MA Experiment 20000496 PARAMETER Experiment Name: At_Guard_Cells_P Parameter: Organism Value: Canola
  misc_feature: MA Experiment 20000496 PARAMETER Experiment Name: At_Guard_Cells_P Parameter: Tissue Value: Guard Cells vs. Leaves
  misc_feature: MA Experiment ID: 20000794 Result: Up-regulated in Transcription
  misc_feature: MA Experiment 20000794 PARAMETER Experiment Name: At_Petals_P Parameter: Age (day) Value: 23-25 days
  misc_feature: MA Experiment 20000794 PARAMETER Experiment Name: At_Petals_P Parameter: Plant Line Value: WS
  misc_feature: MA Experiment 20000794 PARAMETER Experiment Name: At_Petals_P Parameter: Tissue Value: Petals vs. Whole plant
  misc_feature: MA Experiment ID: 20001248 Result: Up-regulated in Transcription
  misc_feature: MA Experiment 20001248 PARAMETER Experiment Name: At_Far-red-induction_P Parameter: Age (day) Value: 7
  misc_feature: MA Experiment 20001248 PARAMETER Experiment Name: At_Far-red-induction_P Parameter: Light Value: Far-red vs. White
  misc_feature: MA Experiment 20001248 PARAMETER Experiment Name: At_Far-red-induction_P Parameter: Organism Value: A. thaliana
  misc_feature: MA Experiment 20001248 PARAMETER Experiment Name: At_Far-red-induction_P Parameter: Plant Line Value: Columbia
  misc_feature: MA Experiment 20001248 PARAMETER Experiment Name: At_Far-red-induction_P Parameter: Timepoint (hr) Value: 4
  misc_feature: MA Experiment 20001248 PARAMETER Experiment Name: At_Far-red-induction_P Parameter: Tissue Value: Whole Plant

SEQ ID NO: 34159 - protein, 198 aa, Arabidopsis thaliana; identical to SEQ ID NO: 30569
  peptide (1)..(198): Ceres Seq. ID no. 12334489
  misc_feature (1)..(197): Pfam Name: Glycosyl hydrolase family 10 Pfam Description: Glycosyl hydrolase family 10
  misc_feature (1)..(197): Homolog of NCBI NO: 15235098 NR Description: glycosyl hydrolase family 10; protein id:
  misc_feature (1)..(197): Homolog of NCBI NO: 37533262 NR Description: putative 1,4-beta-xylanase
  misc_feature (1)..(197): Homolog of NCBI NO: 23429644 NR Description: endoxylanase [Carica papaya]
  misc_feature (1)..(197): Homolog of NCBI NO: 30689830 NR Description: glycosyl hydrolase family 10 [Arabidopsis
  misc_feature (1)..(197): Homolog of NCBI NO: 7485619 NR Description: hypothetical protein F17I5.30 - Arabidopsis
  misc_feature (1)..(197): Homolog of NCBI NO: 15235131 NR Description: glycosyl hydrolase family 10; protein id:
  misc_feature (1)..(197): Homolog of NCBI NO: 15235134 NR Description: glycosyl hydrolase family 10; protein id:
  misc_feature (1)..(179): Homolog of NCBI NO: 15233783 NR Description: glycosyl hydrolase family 10; protein id:
  misc_feature (1)..(197): Homolog of NCBI NO: 15233983 NR Description: glycosyl hydrolase family 10; protein id:
  misc_feature (1)..(197): Homolog of NCBI NO: 28416709 NR Description: At4g38650 [Arabidopsis thaliana]

SEQ ID NO: 34160 - protein, 197 aa, Arabidopsis thaliana; identical to SEQ ID NO: 30570
  peptide (1)..(197): Ceres Seq. ID no. 12334490
  misc_feature (1)..(196): Pfam Name: Glycosyl hydrolase family 10 Pfam Description: Glycosyl hydrolase family 10
  misc_feature (1)..(196): Homolog of NCBI NO: 15235098 NR Description: glycosyl hydrolase family 10; protein id:
  misc_feature (1)..(196): Homolog of NCBI NO: 37533262 NR Description: putative 1,4-beta-xylanase
  misc_feature (1)..(196): Homolog of NCBI NO: 23429644 NR Description: endoxylanase [Carica papaya]
  misc_feature (1)..(196): Homolog of NCBI NO: 30689830 NR Description: glycosyl hydrolase family 10 [Arabidopsis
  misc_feature (1)..(196): Homolog of NCBI NO: 7485619 NR Description: hypothetical protein F17I5.30 - Arabidopsis
  misc_feature (1)..(196): Homolog of NCBI NO: 15235131 NR Description: glycosyl hydrolase family 10; protein id:
  misc_feature (1)..(196): Homolog of NCBI NO: 15235134 NR Description: glycosyl hydrolase family 10; protein id:
  misc_feature (1)..(178): Homolog of NCBI NO: 15233783 NR Description: glycosyl hydrolase family 10; protein id:
  misc_feature (1)..(196): Homolog of NCBI NO: 15233983 NR Description: glycosyl hydrolase family 10; protein id:
  misc_feature (1)..(196): Homolog of NCBI NO: 28416709 NR Description: At4g38650 [Arabidopsis thaliana]

SEQ ID NO: 34161 - protein, 150 aa, Arabidopsis thaliana; identical to SEQ ID NO: 30571
  peptide (1)..(150): Ceres Seq. ID no. 12334491
  misc_feature (1)..(149): Pfam Name: Glycosyl hydrolase family 10 Pfam Description: Glycosyl hydrolase family 10
  misc_feature (1)..(149): Homolog of NCBI NO: 15235098 NR Description: glycosyl hydrolase family 10; protein id:
  misc_feature (1)..(149): Homolog of NCBI NO: 37533262 NR Description: putative 1,4-beta-xylanase
  misc_feature (1)..(149): Homolog of NCBI NO: 23429644 NR Description: endoxylanase [Carica papaya]
  misc_feature (1)..(149): Homolog of NCBI NO: 30689830 NR Description: glycosyl hydrolase family 10 [Arabidopsis
  misc_feature (1)..(149): Homolog of NCBI NO: 7485619 NR Description: hypothetical protein F17I5.30 - Arabidopsis
  misc_feature (1)..(149): Homolog of NCBI NO: 15235131 NR Description: glycosyl hydrolase family 10; protein id:
  misc_feature (1)..(149): Homolog of NCBI NO: 15235134 NR Description: glycosyl hydrolase family 10; protein id:
  misc_feature (1)..(131): Homolog of NCBI NO: 15233783 NR Description: glycosyl hydrolase family 10; protein id:
  misc_feature (1)..(149): Homolog of NCBI NO: 15233983 NR Description: glycosyl hydrolase family 10; protein id:
  misc_feature (1)..(149): Homolog of NCBI NO: 28416709 NR Description: At4g38650 [Arabidopsis thaliana]

SEQ ID NO: 34162 - DNA, 1205 bp, Arabidopsis thaliana; identical to SEQ ID NO: 30572
  misc_feature (1)..(1205): Ceres Seq. ID no. 12348519
  misc_feature: MA Experiment ID: 108461 Result: Up-regulated in Transcription
  misc_feature: MA Experiment 108461 PARAMETER Experiment Name: At_Germinating_Seeds_cDNA_P Parameter: Age (day) Value: 1 vs. 0
  misc_feature: MA Experiment 108461 PARAMETER Experiment Name: At_Germinating_Seeds_cDNA_P Parameter: Tissue Value: Germinating Seeds
  misc_feature: MA Experiment ID: 108462 Result: Up-regulated in Transcription
  misc_feature: MA Experiment 108462 PARAMETER Experiment Name: At_Germinating_Seeds_cDNA_P Parameter: Age (day) Value: 2 vs. 0
  misc_feature: MA Experiment 108462 PARAMETER Experiment Name: At_Germinating_Seeds_cDNA_P Parameter: Tissue Value: Germinating Seeds
  misc_feature: MA Experiment ID: 108463 Result: Up-regulated in Transcription
  misc_feature: MA Experiment 108463 PARAMETER Experiment Name: At_Germinating_Seeds_cDNA_P Parameter: Age (day) Value: 3 vs. 0
  misc_feature: MA Experiment 108463 PARAMETER Experiment Name: At_Germinating_Seeds_cDNA_P Parameter: Tissue Value: Germinating Seeds
  misc_feature: MA Experiment ID: 108464 Result: Up-regulated in Transcription
  misc_feature: MA Experiment 108464 PARAMETER Experiment Name: At_Germinating_Seeds_cDNA_P Parameter: Age (day) Value: 4 vs. 0
  misc_feature: MA Experiment 108464 PARAMETER Experiment Name: At_Germinating_Seeds_cDNA_P Parameter: Tissue Value: Germinating Seeds
  misc_feature: MA Experiment ID: 108473 Result: Down-regulated in Transcription
  misc_feature: MA Experiment 108473 PARAMETER Experiment Name: At_Drought_Flowers_cDNA_P Parameter: Timepoint (hr) Value: 7 d
  misc_feature: MA Experiment 108473 PARAMETER Experiment Name: At_Drought_Flowers_cDNA_P Parameter: Tissue Value: Flower
  misc_feature: MA Experiment 108473 PARAMETER Experiment Name: At_Drought_Flowers_cDNA_P Parameter: Treatment Value: Drought vs. No Drought
  misc_feature: MA Experiment ID: 108573 Result: Down-regulated in Transcription
  misc_feature: MA Experiment 108573 PARAMETER Experiment Name: At_Drought_cDNA_P Parameter: Timepoint (hr) Value: 6
  misc_feature: MA Experiment 108573 PARAMETER Experiment Name: At_Drought_cDNA_P Parameter: Tissue Value: Aerial
  misc_feature: MA Experiment 108573 PARAMETER Experiment Name: At_Drought_cDNA_P Parameter: Treatment Value: Drought vs. No Drought
  misc_feature: MA Experiment ID: 108579 Result: Down-regulated in Transcription
  misc_feature: MA Experiment 108579 PARAMETER Experiment Name: At_4deg_Cold_cDNA_P Parameter: Temperature (deg C) Value: 4 vs. 22
  misc_feature: MA Experiment 108579 PARAMETER Experiment Name: At_4deg_Cold_cDNA_P Parameter: Timepoint (hr) Value: 6
  misc_feature: MA Experiment 108579 PARAMETER Experiment Name: At_4deg_Cold_cDNA_P Parameter: Tissue Value: Aerial
  misc_feature: MA Experiment ID: 108585 Result: Down-regulated in Transcription
  misc_feature: MA Experiment 108585 PARAMETER Experiment Name: At_5mM_NaNP_cDNA_P Parameter: Timepoint (hr) Value: 6
  misc_feature: MA Experiment 108585 PARAMETER Experiment Name: At_5mM_NaNP_cDNA_P Parameter: Tissue Value: Aerial
  misc_feature: MA Experiment 108585 PARAMETER Experiment Name: At_5mM_NaNP_cDNA_P Parameter: Treatment Value: null
  misc_feature: MA Experiment ID: 108595 Result: Down-regulated in Transcription
  misc_feature: MA Experiment 108595 PARAMETER Experiment Name: At_Ler-pi_Ovule_cDNA_P Parameter: Plant Line Value: null
  misc_feature: MA Experiment ID: 20000166 Result: Up-regulated in Transcription
  misc_feature: MA Experiment 20000166 PARAMETER Experiment Name: At_100uM_ABA_P Parameter: Age (day) Value: 14
  misc_feature: MA Experiment 20000166 PARAMETER Experiment Name: At_100uM_ABA_P Parameter: Organism Value: A. thaliana
  misc_feature: MA Experiment 20000166 PARAMETER Experiment Name: At_100uM_ABA_P Parameter: Plant Line Value: WS
  misc_feature: MA Experiment 20000166 PARAMETER Experiment Name: At_100uM_ABA_P Parameter: Timepoint (hr) Value: 1
  misc_feature: MA Experiment 20000166 PARAMETER Experiment Name: At_100uM_ABA_P Parameter: Tissue Value: Aerial
  misc_feature: MA Experiment 20000166 PARAMETER Experiment Name: At_100uM_ABA_P Parameter: Treatment Value: 100uM ABA vs. No Treatment
  misc_feature: MA Experiment ID: 20000173 Result: Down-regulated in Transcription
  misc_feature: MA Experiment 20000173 PARAMETER Experiment Name: At_42deg_Heat_P Parameter: Age (day) Value: 14
  misc_feature: MA Experiment 20000173 PARAMETER Experiment Name: At_42deg_Heat_P Parameter: Organism Value: A. thaliana
  misc_feature: MA Experiment 20000173 PARAMETER Experiment Name: At_42deg_Heat_P Parameter: Plant Line Value: WS
  misc_feature: MA Experiment 20000173 PARAMETER Experiment Name: At_42deg_Heat_P Parameter: Temperature (deg C) Value: 42 vs. 22
  misc_feature: MA Experiment 20000173 PARAMETER Experiment Name: At_42deg_Heat_P Parameter: Timepoint (hr) Value: 6
  misc_feature: MA Experiment 20000173 PARAMETER Experiment Name: At_42deg_Heat_P Parameter: Tissue Value: Aerial
  misc_feature: MA Experiment ID: 20000180 Result: Up-regulated in Transcription
  misc_feature: MA Experiment 20000180 PARAMETER Experiment Name: At_Germinating_Seeds_P Parameter: Age (hr) Value: 24 vs. 0
  misc_feature: MA Experiment 20000180 PARAMETER Experiment Name: At_Germinating_Seeds_P Parameter: Tissue Value: Germinating Seeds
  misc_feature: MA Experiment ID: 20000185 Result: Down-regulated in Transcription
  misc_feature: MA Experiment 20000185 PARAMETER Experiment Name: At_Roots__P Parameter: Age (day) Value: 7 vs. 21
  misc_feature: MA Experiment 20000185 PARAMETER Experiment Name: At_Roots__P Parameter: Organism Value: A. thaliana
  misc_feature: MA Experiment 20000185 PARAMETER Experiment Name: At_Roots__P Parameter: Tissue Value: Roots vs. Whole Plant
  misc_feature: MA Experiment ID: 20000234 Result: Up-regulated in Transcription
  misc_feature: MA Experiment 20000234 PARAMETER Experiment Name: At_Siliques_P Parameter: Age (day) Value: 21
  misc_feature: MA Experiment 20000234 PARAMETER Experiment Name: At_Siliques_P Parameter: Organism Value: A. thaliana
  misc_feature: MA Experiment 20000234 PARAMETER Experiment Name: At_Siliques_P Parameter: Plant Line Value: WS
  misc_feature: MA Experiment 20000234 PARAMETER Experiment Name: At_Siliques_P Parameter: Tissue Value: Less Than 5mm Siliques vs. Whole Plant
  misc_feature: MA Experiment ID: 20000265 Result: Up-regulated in Transcription
  misc_feature: MA Experiment 20000265 PARAMETER Experiment Name: At_Open_Flower_P Parameter: Age (day) Value: 21
  misc_feature: MA Experiment 20000265 PARAMETER Experiment Name: At_Open_Flower_P Parameter: Plant Line Value: WS
  misc_feature: MA Experiment 20000265 PARAMETER Experiment Name: At_Open_Flower_P Parameter: Tissue Value: Closed Flower vs. Whole Plant
  misc_feature: MA Experiment ID: 20000437 Result: Down-regulated in Transcription
  misc_feature: MA Experiment 20000437 PARAMETER Experiment Name: At_Drought_P Parameter: Age (day) Value: 8
  misc_feature: MA Experiment 20000437 PARAMETER Experiment Name: At_Drought_P Parameter: Organism Value: A. thaliana
  misc_feature: MA Experiment 20000437 PARAMETER Experiment Name: At_Drought_P Parameter: Plant Line Value: WS
  misc_feature: MA Experiment 20000437 PARAMETER Experiment Name: At_Drought_P Parameter: Timepoint (hr) Value: 24
  misc_feature: MA Experiment 20000437 PARAMETER Experiment Name: At_Drought_P Parameter: Tissue Value: Whole Plant
  misc_feature: MA Experiment 20000437 PARAMETER Experiment Name: At_Drought_P Parameter: Treatment Value: Drought vs. No Drought
  misc_feature: MA Experiment ID: 20000439 Result: Down-regulated in Transcription
  misc_feature: MA Experiment 20000439 PARAMETER Experiment Name: At_Roots__P Parameter: Age (day) Value: 14 vs. 21
  misc_feature: MA Experiment 20000439 PARAMETER Experiment Name: At_Roots__P Parameter: Organism Value: A. thaliana
  misc_feature: MA Experiment 20000439 PARAMETER Experiment Name: At_Roots__P Parameter: Tissue Value: Roots vs. Whole Plant
  misc_feature: MA Experiment ID: 20000495 Result: Up-regulated in Transcription
  misc_feature: MA Experiment 20000495 PARAMETER Experiment Name: At_Guard_Cells_P Parameter: Harvest Date Value: 8/2/2002
  misc_feature: MA Experiment 20000495 PARAMETER Experiment Name: At_Guard_Cells_P Parameter: Organism Value: A. thaliana
  misc_feature: MA Experiment 20000495 PARAMETER Experiment Name: At_Guard_Cells_P Parameter: Tissue Value: Guard Cells vs. Leaves
  misc_feature: MA Experiment ID: 20001248 Result: Down-regulated in Transcription
  misc_feature: MA Experiment 20001248 PARAMETER Experiment Name: At_Far-red-induction_P Parameter: Age (day) Value: 7
  misc_feature: MA Experiment 20001248 PARAMETER Experiment Name: At_Far-red-induction_P Parameter: Light Value: Far-red vs. White
  misc_feature: MA Experiment 20001248 PARAMETER Experiment Name: At_Far-red-induction_P Parameter: Organism Value: A. thaliana
  misc_feature: MA Experiment 20001248 PARAMETER Experiment Name: At_Far-red-induction_P Parameter: Plant Line Value: Columbia
  misc_feature: MA Experiment 20001248 PARAMETER Experiment Name: At_Far-red-induction_P Parameter: Timepoint (hr) Value: 4
  misc_feature: MA Experiment 20001248 PARAMETER Experiment Name: At_Far-red-induction_P Parameter: Tissue Value: Whole Plant
  misc_feature: MA Experiment ID: 20001451 Result: Up-regulated in Transcription
  misc_feature: MA Experiment 20001451 PARAMETER Experiment Name: At_Far-red-induction_P Parameter: Age (day) Value: 7
  misc_feature: MA Experiment 20001451 PARAMETER Experiment Name: At_Far-red-induction_P Parameter: Light Value: Far-red vs. White
  misc_feature: MA Experiment 20001451 PARAMETER Experiment Name: At_Far-red-induction_P Parameter: Organism Value: A. thaliana
  misc_feature: MA Experiment 20001451 PARAMETER Experiment Name: At_Far-red-induction_P Parameter: Plant Line Value: Columbia
  misc_feature: MA Experiment 20001451 PARAMETER Experiment Name: At_Far-red-induction_P Parameter: Timepoint (hr) Value: 24
  misc_feature: MA Experiment 20001451 PARAMETER Experiment Name: At_Far-red-induction_P Parameter: Tissue Value: Whole Plant
  misc_feature: MA Experiment ID: 20001757 Result: Up-regulated in Transcription
  misc_feature: MA Experiment 20001757 PARAMETER Experiment Name: At_50mM_NH4NO3_L-to-H_P Parameter: Timepoint (hr) Value: 6
  misc_feature: MA Experiment 20001757 PARAMETER Experiment Name: At_50mM_NH4NO3_L-to-H_P Parameter: Tissue Value: Leaf
  misc_feature: MA Experiment 20001757 PARAMETER Experiment Name: At_50mM_NH4NO3_L-to-H_P Parameter: Treatment Value: 50mM NH4NO3 vs 100mM Mannitol
  misc_feature: MA Experiment ID: 20001904 Result: Down-regulated in Transcription
  misc_feature: MA Experiment 20001904 PARAMETER Experiment Name: At_Drought_Reproduction_P Parameter: Age (day) Value: 37
  misc_feature: MA Experiment 20001904 PARAMETER Experiment Name: At_Drought_Reproduction_P Parameter: Organism Value: A. thaliana
  misc_feature: MA Experiment 20001904 PARAMETER Experiment Name: At_Drought_Reproduction_P Parameter: Plant Line Value: WS
  misc_feature: MA Experiment 20001904 PARAMETER Experiment Name: At_Drought_Reproduction_P Parameter: Timepoint (day) Value: 7
  misc_feature: MA Experiment 20001904 PARAMETER Experiment Name: At_Drought_Reproduction_P Parameter: Tissue Value: Rosettes
  misc_feature: MA Experiment 20001904 PARAMETER Experiment Name: At_Drought_Reproduction_P Parameter: Treatment Value: Drought vs. No Drought
  misc_feature: MA Experiment ID: 20001905 Result: Down-regulated in Transcription
  misc_feature: MA Experiment 20001905 PARAMETER Experiment Name: At_Drought_Reproduction_P Parameter: Age (day) Value: 40
  misc_feature: MA Experiment 20001905 PARAMETER Experiment Name: At_Drought_Reproduction_P Parameter: Organism Value: A. thaliana
  misc_feature: MA Experiment 20001905 PARAMETER Experiment Name: At_Drought_Reproduction_P Parameter: Plant Line Value: WS
  misc_feature: MA Experiment 20001905 PARAMETER Experiment Name: At_Drought_Reproduction_P Parameter: Timepoint (day) Value: 10
  misc_feature: MA Experiment 20001905 PARAMETER Experiment Name: At_Drought_Reproduction_P Parameter: Tissue Value: Rosettes
  misc_feature: MA Experiment 20001905 PARAMETER Experiment Name: At_Drought_Reproduction_P Parameter: Treatment Value: Drought vs. No Drought
  misc_feature: MA Experiment ID: 20001906 Result: Down-regulated in Transcription
  misc_feature: MA Experiment 20001906 PARAMETER Experiment Name: At_Drought_Reproduction_P Parameter: Age (day) Value: 35
  misc_feature: MA Experiment 20001906 PARAMETER Experiment Name: At_Drought_Reproduction_P Parameter: Organism Value: A. thaliana
  misc_feature: MA Experiment 20001906 PARAMETER Experiment Name: At_Drought_Reproduction_P Parameter: Plant Line Value: WS
  misc_feature: MA Experiment 20001906 PARAMETER Experiment Name: At_Drought_Reproduction_P Parameter: Timepoint (day) Value: 5
  misc_feature: MA Experiment 20001906 PARAMETER Experiment Name: At_Drought_Reproduction_P Parameter: Tissue Value: Siliques
  misc_feature: MA Experiment 20001906 PARAMETER Experiment Name: At_Drought_Reproduction_P Parameter: Treatment Value: Drought vs. No Drought
  misc_feature: MA Experiment ID: 20001908 Result: Down-regulated in Transcription
  misc_feature: MA Experiment 20001908 PARAMETER Experiment Name: At_Drought_Reproduction_P Parameter: Age (day) Value: 40
  misc_feature: MA Experiment 20001908 PARAMETER Experiment Name: At_Drought_Reproduction_P Parameter: Organism Value: A. thaliana
  misc_feature: MA Experiment 20001908 PARAMETER Experiment Name: At_Drought_Reproduction_P Parameter: Plant Line Value: WS
  misc_feature: MA Experiment 20001908 PARAMETER Experiment Name: At_Drought_Reproduction_P Parameter: Timepoint (day) Value: 10
  misc_feature: MA Experiment 20001908 PARAMETER Experiment Name: At_Drought_Reproduction_P Parameter: Tissue Value: Siliques
  misc_feature: MA Experiment 20001908 PARAMETER Experiment Name: At_Drought_Reproduction_P Parameter: Treatment Value: Drought vs. No Drought
  misc_feature: MA Experiment ID: 20001911 Result: Down-regulated in Transcription
  misc_feature: MA Experiment 20001911 PARAMETER Experiment Name: At_Drought_Reproduction_P Parameter: Age (day) Value: 40
  misc_feature: MA Experiment 20001911 PARAMETER Experiment Name: At_Drought_Reproduction_P Parameter: Organism Value: A. thaliana
  misc_feature: MA Experiment 20001911 PARAMETER Experiment Name: At_Drought_Reproduction_P Parameter: Plant Line Value: WS
  misc_feature: MA Experiment 20001911 PARAMETER Experiment Name: At_Drought_Reproduction_P Parameter: Timepoint (day) Value: 10
  misc_feature: MA Experiment 20001911 PARAMETER Experiment Name: At_Drought_Reproduction_P Parameter: Tissue Value: Flowers
  misc_feature: MA Experiment 20001911 PARAMETER Experiment Name: At_Drought_Reproduction_P Parameter: Treatment Value: Drought vs. No Drought

SEQ ID NO: 34163 - protein, 160 aa, Arabidopsis thaliana; identical to SEQ ID NO: 30573
  peptide (1)..(160): Ceres Seq. ID no. 12348520
  misc_feature (1)..(30): Homolog of NCBI NO: 15233066 NR Description: myb DNA-binding protein (MYB17); protein id:
  misc_feature (1)..(47): Homolog of NCBI NO: 4886264 NR Description: Myb-related transcription factor mixta-like 1
  misc_feature (1)..(14): Homolog of NCBI NO: 28628947 NR Description: MYB1 [Dendrobium sp. XMW-2002-1]
  misc_feature (1)..(159): Homolog of NCBI NO: 38344966 NR Description: OSJNBa0072F16.11 [Oryza sativa (japonica
  misc_feature (1)..(160): Homolog of NCBI NO: 20340243 NR Description: myb-related protein-like protein [Thellungiella
  misc_feature (68)..(160): Homolog of NCBI NO: 282964 NR Description: myb-related protein 1 - garden petunia
  misc_feature (1)..(65): Homolog of NCBI NO: 15232045 NR Description: myb family transcription factor
  misc_feature (61)..(160): Homolog of NCBI NO: 15232045 NR Description: myb family transcription factor
  misc_feature (1)..(160): Homolog of NCBI NO: 15242272 NR Description: myb family transcription factor

SEQ ID NO: 34164 - protein, 156 aa, Arabidopsis thaliana; identical to SEQ ID NO: 30574
  peptide (1)..(156): Ceres Seq. ID no. 12348521
  misc_feature (14)..(61): Pfam Name: Myb-like DNA-binding domain Pfam Description: Myb-like DNA-binding domain
  misc_feature (1)..(150): Homolog of NCBI NO: 629737 NR Description: myb-related protein MIXTA - garden snapdragon
  misc_feature (1)..(156): Homolog of NCBI NO: 27125807 NR Description: MYB27 protein [Oryza sativa (japonica
  misc_feature (1)..(150): Homolog of NCBI NO: 13346188 NR Description: GHMYB25 [Gossypium hirsutum]
  misc_feature (1)..(150): Homolog of NCBI NO: 4886264 NR Description: Myb-related transcription factor mixta-like 1
  misc_feature (1)..(150): Homolog of NCBI NO: 28628947 NR Description: MYB1 [Dendrobium sp. XMW-2002-1]
  misc_feature (1)..(131): Homolog of NCBI NO: 38344966 NR Description: OSJNBa0072F16.11 [Oryza sativa (japonica
  misc_feature (119)..(150): Homolog of NCBI NO: 20340243 NR Description: myb-related protein-like protein [Thellungiella
  misc_feature (1)..(156): Homolog of NCBI NO: 282964 NR Description: myb-related protein 1 - garden petunia
  misc_feature (1)..(150): Homolog of NCBI NO: 15232045 NR Description: myb family transcription factor
  misc_feature (1)..(150): Homolog of NCBI NO: 15242272 NR Description: myb family transcription factor

SEQ ID NO: 34165 - protein, 106 aa, Arabidopsis thaliana; identical to SEQ ID NO: 30575
  peptide (1)..(106): Ceres Seq. ID no. 12348522
  misc_feature (1)..(105): Homolog of NCBI NO: 38344966 NR Description: OSJNBa0072F16.11 [Oryza sativa (japonica
  misc_feature (1)..(106): Homolog of NCBI NO: 20340243 NR Description: myb-related protein-like protein [Thellungiella
  misc_feature (14)..(106): Homolog of NCBI NO: 282964 NR Description: myb-related protein 1 - garden petunia
  misc_feature (1)..(11): Homolog of NCBI NO: 15232045 NR Description: myb family transcription factor
  misc_feature (7)..(106): Homolog of NCBI NO: 15232045 NR Description: myb family transcription factor
  misc_feature (1)..(106): Homolog of NCBI NO: 15242272 NR Description: myb family transcription factor

SEQ ID NO: 34166 - DNA, 1812 bp, Arabidopsis thaliana; identical to SEQ ID NO: 30576
  misc_feature (1)..(1812): Ceres Seq. ID no. 12327219
  misc_feature: MA Experiment ID: 108576 Result: Up-regulated in Transcription
  misc_feature: MA Experiment 108576 PARAMETER Experiment Name: At_42deg_Heat_cDNA_P Parameter: Temperature (deg C) Value: 42 vs. 22
  misc_feature: MA Experiment 108576 PARAMETER Experiment Name: At_42deg_Heat_cDNA_P Parameter: Timepoint (hr) Value: 1
  misc_feature: MA Experiment 108576 PARAMETER Experiment Name: At_42deg_Heat_cDNA_P Parameter: Tissue Value: Aerial

SEQ ID NO: 34167 - protein, 331 aa, Arabidopsis thaliana; identical to SEQ ID NO: 30577
  peptide (1)..(331): Ceres Seq. ID no. 12327220
  misc_feature (47)..(326): Pfam Name: Cytochrome P450 Pfam Description: Cytochrome P450
  misc_feature (1)..(326): Homolog of NCBI NO: 28393336 NR Description: putative cytochrome p450 [Arabidopsis thaliana]
  misc_feature (1)..(326): Homolog of NCBI NO: 15228331 NR Description: cytochrome p450, putative; protein id:
  misc_feature (4)..(326): Homolog of NCBI NO: 21595357 NR Description: cytochrom P450-like protein [Arabidopsis thaliana]
  misc_feature (4)..(326): Homolog of NCBI NO: 15238249 NR Description: cytochrome p450, putative
  misc_feature (19)..(326): Homolog of NCBI NO: 15238242 NR Description: cytochrome p450 monooxygenase, putative; protein
  misc_feature (1)..(326): Homolog of NCBI NO: 15228330 NR Description: cytochrome P450 monooxygenase, putative; protein

SEQ ID NO: 34168 - protein, 239 aa, Arabidopsis thaliana; identical to SEQ ID NO: 30578
  peptide (1)..(239): Ceres Seq. ID no. 12327221
  misc_feature (1)..(234): Pfam Name: Cytochrome P450 Pfam Description: Cytochrome P450
  misc_feature (1)..(234): Homolog of NCBI NO: 28393336 NR Description: putative cytochrome p450 [Arabidopsis thaliana]
  misc_feature (1)..(234): Homolog of NCBI NO: 15228331 NR Description: cytochrome p450, putative; protein id:
  misc_feature (1)..(234): Homolog of NCBI NO: 21595357 NR Description: cytochrom P450-like protein [Arabidopsis thaliana]
  misc_feature (1)..(234): Homolog of NCBI NO: 15238249 NR Description: cytochrome p450, putative
  misc_feature (1)..(234): Homolog of NCBI NO: 15238242 NR Description: cytochrome p450 monooxygenase, putative; protein
  misc_feature (1)..(234): Homolog of NCBI NO: 15228330 NR Description: cytochrome P450 monooxygenase, putative; protein

SEQ ID NO: 34169 - protein, 195 aa, Arabidopsis thaliana; identical to SEQ ID NO: 30579
  peptide (1)..(195): Ceres Seq. ID no. 12327222
  misc_feature (1)..(190): Pfam Name: Cytochrome P450 Pfam Description: Cytochrome P450
  misc_feature (1)..(190): Homolog of NCBI NO: 28393336 NR Description: putative cytochrome p450 [Arabidopsis thaliana]
  misc_feature (1)..(190): Homolog of NCBI NO: 15228331 NR Description: cytochrome p450, putative; protein id:
  misc_feature (1)..(190): Homolog of NCBI NO: 21595357 NR Description: cytochrom P450-like protein [Arabidopsis thaliana]
  misc_feature (1)..(190): Homolog of NCBI NO: 15238249 NR Description: cytochrome p450, putative
  misc_feature (1)..(190): Homolog of NCBI NO: 15238242 NR Description: cytochrome p450 monooxygenase, putative; protein
  misc_feature (1)..(190): Homolog of NCBI NO: 15228330 NR Description: cytochrome P450 monooxygenase, putative; protein

SEQ ID NO: 34170 - DNA, 1370 bp, Arabidopsis thaliana; identical to SEQ ID NO: 30580
  misc_feature (1)..(1370): Ceres Seq. ID no. 13574978
  misc_feature: MA Experiment ID: 20000171 Result: Down-regulated in Transcription
  misc_feature: MA Experiment 20000171 PARAMETER Experiment Name: At_42deg_Heat_P Parameter: Age (day) Value: 14
  misc_feature: MA Experiment 20000171 PARAMETER Experiment Name: At_42deg_Heat_P Parameter: Organism Value: A. thaliana
  misc_feature: MA Experiment 20000171 PARAMETER Experiment Name: At_42deg_Heat_P Parameter: Plant Line Value: WS
  misc_feature: MA Experiment 20000171 PARAMETER Experiment Name: At_42deg_Heat_P Parameter: Temperature (deg C) Value: 42 vs. 22
  misc_feature: MA Experiment 20000171 PARAMETER Experiment Name: At_42deg_Heat_P Parameter: Timepoint (hr) Value: 1
  misc_feature: MA Experiment 20000171 PARAMETER Experiment Name: At_42deg_Heat_P Parameter: Tissue Value: Aerial
  misc_feature: MA Experiment ID: 20000173 Result: Down-regulated in Transcription
  misc_feature: MA Experiment 20000173 PARAMETER Experiment Name: At_42deg_Heat_P Parameter: Age (day) Value: 14
  misc_feature: MA Experiment 20000173 PARAMETER Experiment Name: At_42deg_Heat_P Parameter: Organism Value: A. thaliana
  misc_feature: MA Experiment 20000173 PARAMETER Experiment Name: At_42deg_Heat_P Parameter: Plant Line Value: WS
  misc_feature: MA Experiment 20000173 PARAMETER Experiment Name: At_42deg_Heat_P Parameter: Temperature (deg C) Value: 42 vs. 22
  misc_feature: MA Experiment 20000173 PARAMETER Experiment Name: At_42deg_Heat_P Parameter: Timepoint (hr) Value: 6
  misc_feature: MA Experiment 20000173 PARAMETER Experiment Name: At_42deg_Heat_P Parameter: Tissue Value: Aerial
  misc_feature: MA Experiment ID: 20000179 Result: Up-regulated in Transcription
  misc_feature: MA Experiment 20000179 PARAMETER Experiment Name: At_Germinating_Seeds_P Parameter: Age (hr) Value: 6 vs. 0
  misc_feature: MA Experiment 20000179 PARAMETER Experiment Name: At_Germinating_Seeds_P Parameter: Tissue Value: Germinating Seeds
  misc_feature: MA Experiment ID: 20000182 Result: Down-regulated in Transcription
  misc_feature: MA Experiment 20000182 PARAMETER Experiment Name: At_2mM_SA_P Parameter: Age (day) Value: 14
  misc_feature: MA Experiment 20000182 PARAMETER Experiment Name: At_2mM_SA_P Parameter: Organism Value: A. thaliana
  misc_feature: MA Experiment 20000182 PARAMETER Experiment Name: At_2mM_SA_P Parameter: Plant Line Value: WS
  misc_feature: MA Experiment 20000182 PARAMETER Experiment Name: At_2mM_SA_P Parameter: Timepoint (hr) Value: 6
  misc_feature: MA Experiment 20000182 PARAMETER Experiment Name: At_2mM_SA_P Parameter: Tissue Value: Aerial
  misc_feature: MA Experiment 20000182 PARAMETER Experiment Name: At_2mM_SA_P Parameter: Treatment Value: 2mM SA vs. No Treatment
  misc_feature: MA Experiment ID: 20000184 Result: Up-regulated in Transcription
  misc_feature: MA Experiment 20000184 PARAMETER Experiment Name: At_Shoots__P Parameter: Age (day) Value: 7
  misc_feature: MA Experiment 20000184 PARAMETER Experiment Name: At_Shoots__P Parameter: Tissue Value: Shoots vs. Whole Plant
  misc_feature: MA Experiment ID: 20000185 Result: Down-regulated in Transcription
  misc_feature: MA Experiment 20000185 PARAMETER Experiment Name: At_Roots__P Parameter: Age (day) Value: 7 vs. 21
  misc_feature: MA Experiment 20000185 PARAMETER Experiment Name: At_Roots__P Parameter: Organism Value: A. thaliana
  misc_feature: MA Experiment 20000185 PARAMETER Experiment Name: At_Roots__P Parameter: Tissue Value: Roots vs. Whole Plant
  misc_feature: MA Experiment ID: 20000234 Result: Up-regulated in Transcription
  misc_feature: MA Experiment 20000234 PARAMETER Experiment Name: At_Siliques_P Parameter: Age (day) Value: 21
  misc_feature: MA Experiment 20000234 PARAMETER Experiment Name: At_Siliques_P Parameter: Organism Value: A. thaliana
  misc_feature: MA Experiment 20000234 PARAMETER Experiment Name: At_Siliques_P Parameter: Plant Line Value: WS
  misc_feature: MA Experiment 20000234 PARAMETER Experiment Name: At_Siliques_P Parameter: Tissue Value: Less Than 5mm Siliques vs. Whole Plant
  misc_feature: MA Experiment ID: 20000264 Result: Up-regulated in Transcription
  misc_feature: MA Experiment 20000264 PARAMETER Experiment Name: At_Open_Flower_P Parameter: Age (day) Value: 21
  misc_feature: MA Experiment 20000264 PARAMETER Experiment Name: At_Open_Flower_P Parameter: Plant Line Value: WS
  misc_feature: MA Experiment 20000264 PARAMETER Experiment Name: At_Open_Flower_P Parameter: Tissue Value: Open Flower vs. Whole Plant
  misc_feature: MA Experiment ID: 20000265 Result: Up-regulated in Transcription
  misc_feature: MA Experiment 20000265 PARAMETER Experiment Name: At_Open_Flower_P Parameter: Age (day) Value: 21
  misc_feature: MA Experiment 20000265 PARAMETER Experiment Name: At_Open_Flower_P Parameter: Plant Line Value: WS
  misc_feature: MA Experiment 20000265 PARAMETER Experiment Name: At_Open_Flower_P Parameter: Tissue Value: Closed Flower vs. Whole Plant
  misc_feature: MA Experiment ID: 20000286 Result: Up-regulated in Transcription
  misc_feature: MA Experiment 20000286 PARAMETER Experiment Name: At_Open_Flower_P Parameter: Age (day) Value: 21
  misc_feature: MA Experiment 20000286 PARAMETER Experiment Name: At_Open_Flower_P Parameter: Plant Line Value: WS
  misc_feature: MA Experiment 20000286 PARAMETER Experiment Name: At_Open_Flower_P Parameter: Tissue Value: Half Open vs. Whole Plant
  misc_feature: MA Experiment ID: 20000436 Result: Down-regulated in Transcription
  misc_feature: MA Experiment 20000436 PARAMETER Experiment Name: At_Drought_P Parameter: Age (day) Value: 7
  misc_feature: MA Experiment 20000436 PARAMETER Experiment Name: At_Drought_P Parameter: Organism Value: A. thaliana
  misc_feature: MA Experiment 20000436 PARAMETER Experiment Name: At_Drought_P Parameter: Plant Line Value: WS
  misc_feature: MA Experiment 20000436 PARAMETER Experiment Name: At_Drought_P Parameter: Timepoint (hr) Value: 12
  misc_feature: MA Experiment 20000436 PARAMETER Experiment Name: At_Drought_P Parameter: Tissue Value: Whole Plant
  misc_feature: MA Experiment 20000436 PARAMETER Experiment Name: At_Drought_P Parameter: Treatment Value: Drought vs. No Drought
  misc_feature: MA Experiment ID: 20000437 Result: Down-regulated in Transcription
  misc_feature: MA Experiment 20000437 PARAMETER Experiment Name: At_Drought_P Parameter: Age (day) Value: 8
  misc_feature: MA Experiment 20000437 PARAMETER Experiment Name: At_Drought_P Parameter: Organism Value: A. thaliana
  misc_feature: MA Experiment 20000437 PARAMETER Experiment Name: At_Drought_P Parameter: Plant Line Value: WS
  misc_feature: MA Experiment 20000437 PARAMETER Experiment Name: At_Drought_P Parameter: Timepoint (hr) Value: 24
  misc_feature: MA Experiment 20000437 PARAMETER Experiment Name: At_Drought_P Parameter: Tissue Value: Whole Plant
  misc_feature: MA Experiment 20000437 PARAMETER Experiment Name: At_Drought_P Parameter: Treatment Value: Drought vs. No Drought
  misc_feature: MA Experiment ID: 20000438 Result: Up-regulated in Transcription
  misc_feature: MA Experiment 20000438 PARAMETER Experiment Name: At_Shoots__P Parameter: Age (day) Value: 14
  misc_feature: MA Experiment 20000438 PARAMETER Experiment Name: At_Shoots__P Parameter: Tissue Value: Shoots vs. Whole Plant
  misc_feature: MA Experiment ID: 20000439 Result: Down-regulated in Transcription
  misc_feature: MA Experiment 20000439 PARAMETER Experiment Name: At_Roots__P Parameter: Age (day) Value: 14 vs. 21
  misc_feature: MA Experiment 20000439 PARAMETER Experiment Name: At_Roots__P Parameter: Organism Value: A. thaliana
  misc_feature: MA Experiment 20000439 PARAMETER Experiment Name: At_Roots__P Parameter: Tissue Value: Roots vs. Whole Plant
  misc_feature: MA Experiment ID: 20000445 Result: Down-regulated in Transcription
  misc_feature: MA Experiment 20000445 PARAMETER Experiment Name: At_100uM_NAA__P Parameter: Age (day) Value: 14
  misc_feature: MA Experiment 20000445 PARAMETER Experiment Name: At_100uM_NAA__P Parameter: Organism Value: A. thaliana
  misc_feature: MA Experiment 20000445 PARAMETER Experiment Name: At_100uM_NAA__P Parameter: Plant Line Value: WS
  misc_feature: MA Experiment 20000445 PARAMETER Experiment Name: At_100uM_NAA__P Parameter: Timepoint (hr) Value: 6
  misc_feature: MA Experiment 20000445 PARAMETER Experiment Name: At_100uM_NAA__P Parameter: Tissue Value: Aerial
  misc_feature: MA Experiment 20000445 PARAMETER Experiment Name: At_100uM_NAA__P Parameter: Treatment Value: 100uM NAA vs. No Treatment
  misc_feature: MA Experiment ID: 20000451 Result: Up-regulated in Transcription
  misc_feature: MA Experiment 20000451 PARAMETER Experiment Name: At_CS6879_Shoots-Roots_P Parameter: Age (day) Value: 14
  misc_feature: MA Experiment 20000451 PARAMETER Experiment Name: At_CS6879_Shoots-Roots_P Parameter: Organism Value: A. thaliana
  misc_feature: MA Experiment 20000451 PARAMETER Experiment Name: At_CS6879_Shoots-Roots_P Parameter: Plant Line Value: CS6879 vs. WS
  misc_feature: MA Experiment 20000451 PARAMETER Experiment Name: At_CS6879_Shoots-Roots_P Parameter: Tissue Value: Roots
  misc_feature: MA Experiment ID: 20000453 Result: Down-regulated in Transcription
  misc_feature: MA Experiment 20000453 PARAMETER Experiment Name: At_100uM_ABA_P Parameter: Age (day) Value: 15
  misc_feature: MA Experiment 20000453 PARAMETER Experiment Name: At_100uM_ABA_P Parameter: Organism Value: A. thaliana
  misc_feature: MA Experiment 20000453 PARAMETER Experiment Name: At_100uM_ABA_P Parameter: Plant Line Value: WS
  misc_feature: MA Experiment 20000453 PARAMETER Experiment Name: At_100uM_ABA_P Parameter: Timepoint (hr) Value: 24
  misc_feature: MA Experiment 20000453 PARAMETER Experiment Name: At_100uM_ABA_P Parameter: Tissue Value: Aerial
  misc_feature: MA Experiment 20000453 PARAMETER Experiment Name: At_100uM_ABA_P Parameter: Treatment Value: 100uM ABA vs. No Treatment
  misc_feature: MA Experiment ID: 20000573 Result: Down-regulated in Transcription
  misc_feature: MA Experiment 20000573 PARAMETER Experiment Name: At_100uM_ABA_Mutants__P Parameter: Organism Value: A. thaliana
  misc_feature: MA Experiment 20000573 PARAMETER Experiment Name: At_100uM_ABA_Mutants__P Parameter: Plant Line Value: CS22 vs. Ler wt
  misc_feature: MA Experiment 20000573 PARAMETER Experiment Name: At_100uM_ABA_Mutants__P Parameter: Timepoint (hr) Value: N/A
  misc_feature: MA Experiment 20000573 PARAMETER Experiment Name: At_100uM_ABA_Mutants__P Parameter: Tissue Value: Whole Plant
  misc_feature: MA Experiment 20000573 PARAMETER Experiment Name: At_100uM_ABA_Mutants__P Parameter: Treatment Value: None
  misc_feature: MA Experiment ID: 20000574 Result: Down-regulated in Transcription
  misc_feature: MA Experiment 20000574 PARAMETER Experiment Name: At_100uM_ABA_Mutants__P Parameter: Organism Value: A. thaliana
  misc_feature: MA Experiment 20000574 PARAMETER Experiment Name: At_100uM_ABA_Mutants__P Parameter: Plant Line Value: CS23 vs. Ler wt
  misc_feature: MA Experiment 20000574 PARAMETER Experiment Name: At_100uM_ABA_Mutants__P Parameter: Timepoint (hr) Value: N/A
  misc_feature: MA Experiment 20000574 PARAMETER Experiment Name: At_100uM_ABA_Mutants__P Parameter: Tissue Value: Whole Plant
  misc_feature: MA Experiment 20000574 PARAMETER Experiment Name: At_100uM_ABA_Mutants__P Parameter: Treatment Value: None
  misc_feature: MA Experiment ID: 20000794 Result: Down-regulated in Transcription
  misc_feature: MA Experiment 20000794 PARAMETER Experiment Name: At_Petals_P Parameter: Age (day) Value: 23-25 days
  misc_feature: MA Experiment 20000794 PARAMETER Experiment Name: At_Petals_P Parameter: Plant Line Value: WS
  misc_feature: MA Experiment 20000794 PARAMETER Experiment Name: At_Petals_P Parameter: Tissue Value: Petals vs. Whole plant
  misc_feature: MA Experiment ID: 20001248 Result: Down-regulated in Transcription
  misc_feature: MA Experiment 20001248 PARAMETER Experiment Name: At_Far-red-induction_P Parameter: Age (day) Value: 7
  misc_feature: MA Experiment 20001248 PARAMETER Experiment Name: At_Far-red-induction_P Parameter: Light Value: Far-red vs. White
  misc_feature: MA Experiment 20001248 PARAMETER Experiment Name: At_Far-red-induction_P Parameter: Organism Value: A. thaliana
  misc_feature: MA Experiment 20001248 PARAMETER Experiment Name: At_Far-red-induction_P Parameter: Plant Line Value: Columbia
  misc_feature: MA Experiment 20001248 PARAMETER Experiment Name: At_Far-red-induction_P Parameter: Timepoint (hr) Value: 4
  misc_feature: MA Experiment 20001248 PARAMETER Experiment Name: At_Far-red-induction_P Parameter: Tissue Value: Whole Plant
  misc_feature: MA Experiment ID: 20001457 Result: Up-regulated in Transcription
  misc_feature: MA Experiment 20001457 PARAMETER Experiment Name: At_50mM_NH4NO3_L-to-H_P Parameter: Age (day) Value: Undefined
  misc_feature: MA Experiment 20001457 PARAMETER Experiment Name: At_50mM_NH4NO3_L-to-H_P Parameter: Organism Value: Undefined
  misc_feature: MA Experiment 20001457 PARAMETER Experiment Name: At_50mM_NH4NO3_L-to-H_P Parameter: Plant Line Value: Undefined
  misc_feature: MA Experiment 20001457 PARAMETER Experiment Name: At_50mM_NH4NO3_L-to-H_P Parameter: Timepoint (hr) Value: 0.5
  misc_feature: MA Experiment 20001457 PARAMETER Experiment Name: At_50mM_NH4NO3_L-to-H_P Parameter: Tissue Value: Siliques
  misc_feature: MA Experiment 20001457 PARAMETER Experiment Name: At_50mM_NH4NO3_L-to-H_P Parameter: Treatment Value: 50mM NH4NO3 vs. 100mM Manitol
  misc_feature: MA Experiment ID: 20001555 Result: Down-regulated in Transcription
  misc_feature: MA Experiment 20001555 PARAMETER Experiment Name: At_Drought_Soil_Dry_P Parameter: Age (day) Value: 24
  misc_feature: MA Experiment 20001555 PARAMETER Experiment Name: At_Drought_Soil_Dry_P Parameter: Organism Value: A. thaliana
  misc_feature: MA Experiment 20001555 PARAMETER Experiment Name: At_Drought_Soil_Dry_P Parameter: Plant Line Value: WS
  misc_feature: MA Experiment 20001555 PARAMETER Experiment Name: At_Drought_Soil_Dry_P Parameter: Post Timepoint (hr) Value: None
  misc_feature: MA Experiment 20001555 PARAMETER Experiment Name: At_Drought_Soil_Dry_P Parameter: Post-Treatment Value: None
  misc_feature: MA Experiment 20001555 PARAMETER Experiment Name: At_Drought_Soil_Dry_P Parameter: Timepoint (day) Value: 10
  misc_feature: MA Experiment 20001555 PARAMETER Experiment Name: At_Drought_Soil_Dry_P Parameter: Treatment Value: Drought vs. No Drought
  misc_feature: MA Experiment ID: 20001556 Result: Down-regulated in Transcription
  misc_feature: MA Experiment 20001556 PARAMETER Experiment Name: At_Drought_Soil_Dry_P Parameter: Age (day) Value: 26
  misc_feature: MA Experiment 20001556 PARAMETER Experiment Name: At_Drought_Soil_Dry_P Parameter: Organism Value: A. thaliana
  misc_feature: MA Experiment 20001556 PARAMETER Experiment Name: At_Drought_Soil_Dry_P Parameter: Plant Line Value: WS
  misc_feature: MA Experiment 20001556 PARAMETER Experiment Name: At_Drought_Soil_Dry_P Parameter: Post Timepoint (hr) Value: None
  misc_feature: MA Experiment 20001556 PARAMETER Experiment Name: At_Drought_Soil_Dry_P Parameter: Post-Treatment Value: None
  misc_feature: MA Experiment 20001556 PARAMETER Experiment Name: At_Drought_Soil_Dry_P Parameter: Timepoint (day) Value: 12
  misc_feature: MA Experiment 20001556 PARAMETER Experiment Name: At_Drought_Soil_Dry_P Parameter: Treatment Value: Drought vs. No Drought
  misc_feature: MA Experiment ID: 20001557 Result: Up-regulated in Transcription
  misc_feature: MA Experiment 20001557 PARAMETER Experiment Name: At_Drought_Soil_Dry_P Parameter: Age (day) Value: 27
  misc_feature: MA Experiment 20001557 PARAMETER Experiment Name: At_Drought_Soil_Dry_P Parameter: Organism Value: A. thaliana
  misc_feature: MA Experiment 20001557 PARAMETER Experiment Name: At_Drought_Soil_Dry_P Parameter: Plant Line Value: WS
  misc_feature: MA Experiment 20001557 PARAMETER Experiment Name: At_Drought_Soil_Dry_P Parameter: Post Timepoint (hr) Value: 3
  misc_feature: MA Experiment 20001557 PARAMETER Experiment Name: At_Drought_Soil_Dry_P Parameter: Post-Treatment Value: Re-Water vs. No Drought
  misc_feature: MA Experiment 20001557 PARAMETER Experiment Name: At_Drought_Soil_Dry_P Parameter: Timepoint (day) Value: 13
  misc_feature: MA Experiment 20001557 PARAMETER Experiment Name: At_Drought_Soil_Dry_P Parameter: Treatment Value: Drought vs. No Drought
  misc_feature: MA Experiment ID: 20001558 Result: Up-regulated in Transcription
  misc_feature: MA Experiment 20001558 PARAMETER Experiment Name: At_Drought_Soil_Dry_P Parameter: Age (day) Value: 27
  misc_feature: MA Experiment 20001558 PARAMETER Experiment Name: At_Drought_Soil_Dry_P Parameter: Organism Value: A. thaliana
  misc_feature: MA Experiment 20001558 PARAMETER Experiment Name: At_Drought_Soil_Dry_P Parameter: Plant Line Value: WS
  misc_feature: MA Experiment 20001558 PARAMETER Experiment Name: At_Drought_Soil_Dry_P Parameter: Post Timepoint (hr) Value: 6
  misc_feature: MA Experiment 20001558 PARAMETER Experiment Name: At_Drought_Soil_Dry_P Parameter: Post-Treatment Value: Re-Water vs. No Drought
  misc_feature: MA Experiment 20001558 PARAMETER Experiment Name: At_Drought_Soil_Dry_P Parameter: Timepoint (day) Value: 13
  misc_feature: MA Experiment 20001558 PARAMETER Experiment Name: At_Drought_Soil_Dry_P Parameter: Treatment Value: Drought vs. No Drought
  misc_feature: MA Experiment ID: 20001560 Result: Up-regulated in Transcription
  misc_feature: MA Experiment 20001560 PARAMETER Experiment Name: At_Drought_Soil_Dry_P Parameter: Age (day) Value: 28
  misc_feature: MA Experiment 20001560 PARAMETER Experiment Name: At_Drought_Soil_Dry_P Parameter: Organism Value: A. thaliana
  misc_feature: MA Experiment 20001560 PARAMETER Experiment Name: At_Drought_Soil_Dry_P Parameter: Plant Line Value: WS
  misc_feature: MA Experiment 20001560 PARAMETER Experiment Name: At_Drought_Soil_Dry_P Parameter: Post Timepoint (hr) Value: None
  misc_feature: MA Experiment 20001560 PARAMETER Experiment Name: At_Drought_Soil_Dry_P Parameter: Post-Treatment Value: None
  misc_feature: MA Experiment 20001560 PARAMETER Experiment Name: At_Drought_Soil_Dry_P Parameter: Timepoint (day) Value: 14
  misc_feature: MA Experiment 20001560 PARAMETER Experiment Name: At_Drought_Soil_Dry_P Parameter: Treatment Value: Drought vs. No Drought
  misc_feature: MA Experiment ID: 20001757 Result: Up-regulated in Transcription
  misc_feature: MA Experiment 20001757 PARAMETER Experiment Name: At_50mM_NH4NO3_L-to-H_P Parameter: Timepoint (hr) Value: 6
  misc_feature: MA Experiment 20001757 PARAMETER Experiment Name: At_50mM_NH4NO3_L-to-H_P Parameter: Tissue Value: Leaf
  misc_feature: MA Experiment 20001757 PARAMETER Experiment Name: At_50mM_NH4NO3_L-to-H_P Parameter: Treatment Value: 50mM NH4NO3 vs 100mM Mannitol
  misc_feature: MA Experiment ID: 20001911 Result: Down-regulated in Transcription
  misc_feature: MA Experiment 20001911 PARAMETER Experiment Name: At_Drought_Reproduction_P Parameter: Age (day) Value: 40
  misc_feature: MA Experiment 20001911 PARAMETER Experiment Name: At_Drought_Reproduction_P Parameter: Organism Value: A. thaliana
  misc_feature: MA Experiment 20001911 PARAMETER Experiment Name: At_Drought_Reproduction_P Parameter: Plant Line Value: WS
  misc_feature: MA Experiment 20001911 PARAMETER Experiment Name: At_Drought_Reproduction_P Parameter: Timepoint (day) Value: 10
  misc_feature: MA Experiment 20001911 PARAMETER Experiment Name: At_Drought_Reproduction_P Parameter: Tissue Value: Flowers
  misc_feature: MA Experiment 20001911 PARAMETER Experiment Name: At_Drought_Reproduction_P Parameter: Treatment Value: Drought vs. No Drought

SEQ ID NO: 34171 - protein, 362 aa, Arabidopsis thaliana; identical to SEQ ID NO: 30581
  peptide (1)..(362): Ceres Seq. ID no. 13574979
  misc_feature (30)..(342): Pfam Name: GDSL-like Lipase/Acylhydrolase Pfam Description: GDSL-like Lipase/Acylhydrolase
  misc_feature (30)..(342): Pfam Name: GDSL-like Lipase/Acylhydrolase Pfam Description: GDSL-like Lipase/Acylhydrolase
  misc_feature (1)..(362): Homolog of NCBI NO: 34910808 NR Description: GDSL-motif lipase/hydrolase-like protein
  misc_feature (10)..(362): Homolog of NCBI NO: 21594055 NR Description: lipase/hydrolase, putative [Arabidopsis thaliana]
  misc_feature (10)..(362): Homolog of NCBI NO: 15220512 NR Description: GDSL-motif lipase/hydrolase protein [Arabidopsis
  misc_feature (1)..(362): Homolog of NCBI NO: 21592417 NR Description: lipase/hydrolase, putative [Arabidopsis thaliana]
  misc_feature (1)..(362): Homolog of NCBI NO: 15220514 NR Description: GDSL-motif lipase/hydrolase protein [Arabidopsis
  misc_feature (1)..(362): Homolog of NCBI NO: 34910808 NR Description: GDSL-motif lipase/hydrolase-like protein
  misc_feature (10)..(362): Homolog of NCBI NO: 15220512 NR Description: GDSL-motif lipase/hydrolase protein [Arabidopsis
  misc_feature (1)..(362): Homolog of NCBI NO: 15220514 NR Description: GDSL-motif lipase/hydrolase protein [Arabidopsis
  misc_feature (1)..(362): Homolog of NCBI NO: 15242458 NR Description: GDSL-motif lipase/hydrolase protein [Arabidopsis
  misc_feature (1)..(362): Homolog of NCBI NO: 21553940 NR Description: GDSL-motif lipase/hydrolase-like protein
  misc_feature (1)..(362): Homolog of NCBI NO: 7485419 NR Description: hypothetical protein F13C5.140 - Arabidopsis
  misc_feature (1)..(362): Homolog of NCBI NO: 18415211 NR Description: GDSL-motif lipase/hydrolase protein [Arabidopsis
  misc_feature (1)..(362): Homolog of NCBI NO: 21618199 NR Description: GDSL-motif lipase/hydrolase-like protein
  misc_feature (1)..(362): Homolog of NCBI NO: 21592417 NR Description: lipase/hydrolase, putative [Arabidopsis thaliana]
  misc_feature (10)..(362): Homolog of NCBI NO: 21594055 NR Description: lipase/hydrolase, putative [Arabidopsis thaliana]
  misc_feature (1)..(362): Homolog of NCBI NO: 21618199 NR Description: GDSL-motif lipase/hydrolase-like protein
  misc_feature (1)..(362): Homolog of NCBI NO: 18415211 NR Description: GDSL-motif lipase/hydrolase protein [Arabidopsis
  misc_feature (1)..(362): Homolog of NCBI NO: 7485419 NR Description: hypothetical protein F13C5.140 - Arabidopsis
  misc_feature (1)..(362): Homolog of NCBI NO: 21553940 NR Description: GDSL-motif lipase/hydrolase-like protein
  misc_feature (1)..(362): Homolog of NCBI NO: 15242458 NR Description: GDSL-motif lipase/hydrolase protein [Arabidopsis

SEQ ID NO: 34172 - protein, 359 aa, Arabidopsis thaliana; identical to SEQ ID NO: 30582
  peptide (1)..(359): Ceres Seq. ID no. 13574980
  misc_feature (27)..(339): Pfam Name: GDSL-like Lipase/Acylhydrolase Pfam Description: GDSL-like Lipase/Acylhydrolase
  misc_feature (27)..(339): Pfam Name: GDSL-like Lipase/Acylhydrolase Pfam Description: GDSL-like Lipase/Acylhydrolase
  misc_feature (1)..(359): Homolog of NCBI NO: 34910808 NR Description: GDSL-motif lipase/hydrolase-like protein
  misc_feature (7)..(359): Homolog of NCBI NO: 21594055 NR Description: lipase/hydrolase, putative [Arabidopsis thaliana]
  misc_feature (7)..(359): Homolog of NCBI NO: 15220512 NR Description: GDSL-motif lipase/hydrolase protein [Arabidopsis
  misc_feature (1)..(359): Homolog of NCBI NO: 21592417 NR Description: lipase/hydrolase, putative [Arabidopsis thaliana]
  misc_feature (1)..(359): Homolog of NCBI NO: 15220514 NR Description: GDSL-motif lipase/hydrolase protein [Arabidopsis
  misc_feature (1)..(359): Homolog of NCBI NO: 34910808 NR Description: GDSL-motif lipase/hydrolase-like protein
  misc_feature (7)..(359): Homolog of NCBI NO: 15220512 NR Description: GDSL-motif lipase/hydrolase protein [Arabidopsis
  misc_feature (1)..(359): Homolog of NCBI NO: 15220514 NR Description: GDSL-motif lipase/hydrolase protein [Arabidopsis
  misc_feature (1)..(359): Homolog of NCBI NO: 15242458 NR Description: GDSL-motif lipase/hydrolase protein [Arabidopsis
  misc_feature (1)..(359): Homolog of NCBI NO: 21553940 NR Description: GDSL-motif lipase/hydrolase-like protein
  misc_feature (1)..(359): Homolog of NCBI NO: 7485419 NR Description: hypothetical protein F13C5.140 - Arabidopsis
  misc_feature (1)..(359): Homolog of NCBI NO: 18415211 NR Description: GDSL-motif lipase/hydrolase protein [Arabidopsis
  misc_feature (1)..(359): Homolog of NCBI NO: 21618199 NR Description: GDSL-motif lipase/hydrolase-like protein
  misc_feature (1)..(359): Homolog of NCBI NO: 21592417 NR Description: lipase/hydrolase, putative [Arabidopsis thaliana]
  misc_feature (7)..(359): Homolog of NCBI NO: 21594055 NR Description: lipase/hydrolase, putative [Arabidopsis thaliana]
  misc_feature (1)..(359): Homolog of NCBI NO: 21618199 NR Description: GDSL-motif lipase/hydrolase-like protein
  misc_feature (1)..(359): Homolog of NCBI NO: 18415211 NR Description: GDSL-motif lipase/hydrolase protein [Arabidopsis
  misc_feature (1)..(359): Homolog of NCBI NO: 7485419 NR Description: hypothetical protein F13C5.140 - Arabidopsis
  misc_feature (1)..(359): Homolog of NCBI NO: 21553940 NR Description: GDSL-motif lipase/hydrolase-like protein
  misc_feature (1)..(359): Homolog of NCBI NO: 15242458 NR Description: GDSL-motif lipase/hydrolase protein [Arabidopsis

SEQ ID NO: 34173 - protein, 356 aa, Arabidopsis thaliana; identical to SEQ ID NO: 30583
  peptide (1)..(356): Ceres Seq. ID no. 13574981
  misc_feature (24)..(336): Pfam Name: GDSL-like Lipase/Acylhydrolase Pfam Description: GDSL-like Lipase/Acylhydrolase
  misc_feature (24)..(336): Pfam Name: GDSL-like Lipase/Acylhydrolase Pfam Description: GDSL-like Lipase/Acylhydrolase
  misc_feature (1)..(356): Homolog of NCBI NO: 34910808 NR Description: GDSL-motif lipase/hydrolase-like protein
  misc_feature (4)..(356): Homolog of NCBI NO: 21594055 NR Description: lipase/hydrolase, putative [Arabidopsis thaliana]
  misc_feature (4)..(356): Homolog of NCBI NO: 15220512 NR Description: GDSL-motif lipase/hydrolase protein [Arabidopsis
  misc_feature (1)..(356): Homolog of NCBI NO: 21592417 NR Description: lipase/hydrolase, putative [Arabidopsis thaliana]
  misc_feature (1)..(356): Homolog of NCBI NO: 15220514 NR Description: GDSL-motif lipase/hydrolase protein [Arabidopsis
  misc_feature (1)..(356): Homolog of NCBI NO: 34910808 NR Description: GDSL-motif lipase/hydrolase-like protein
  misc_feature (4)..(356): Homolog of NCBI NO: 15220512 NR Description: GDSL-motif lipase/hydrolase protein [Arabidopsis
  misc_feature (1)..(356): Homolog of NCBI NO: 15220514 NR Description: GDSL-motif lipase/hydrolase protein [Arabidopsis
  misc_feature (1)..(356): Homolog of NCBI NO: 15242458 NR Description: GDSL-motif lipase/hydrolase protein [Arabidopsis
  misc_feature (1)..(356): Homolog of NCBI NO: 21553940 NR Description: GDSL-motif lipase/hydrolase-like protein
  misc_feature (1)..(356): Homolog of NCBI NO: 7485419 NR Description: hypothetical protein F13C5.140 - Arabidopsis
  misc_feature (1)..(356): Homolog of NCBI NO: 18415211 NR Description: GDSL-motif lipase/hydrolase protein [Arabidopsis
  misc_feature (1)..(356): Homolog of NCBI NO: 21618199 NR Description: GDSL-motif lipase/hydrolase-like protein
  misc_feature (1)..(356): Homolog of NCBI NO: 21592417 NR Description: lipase/hydrolase, putative [Arabidopsis thaliana]
  misc_feature (4)..(356): Homolog of NCBI NO: 21594055 NR Description: lipase/hydrolase, putative [Arabidopsis thaliana]
  misc_feature (1)..(356): Homolog of NCBI NO: 21618199 NR Description: GDSL-motif lipase/hydrolase-like protein
  misc_feature (1)..(356): Homolog of NCBI NO: 18415211 NR Description: GDSL-motif lipase/hydrolase protein [Arabidopsis
  misc_feature (1)..(356): Homolog of NCBI NO: 7485419 NR Description: hypothetical protein F13C5.140 - Arabidopsis
  misc_feature (1)..(356): Homolog of NCBI NO: 21553940 NR Description: GDSL-motif lipase/hydrolase-like protein
  misc_feature (1)..(356): Homolog of NCBI NO: 15242458 NR Description: GDSL-motif lipase/hydrolase protein [Arabidopsis

SEQ ID NO: 34174 - DNA, 1592 bp, Arabidopsis thaliana; identical to SEQ ID NO: 30584
  misc_feature (1)..(1592): Ceres Seq. ID no. 13487835
  misc_feature: MA Experiment ID: 108434 Result: Up-regulated in Transcription
  misc_feature: MA Experiment 108434 PARAMETER Experiment Name: At_Root_Tips_cDNA_P Parameter: Tissue Value: Root Tips
  misc_feature: MA Experiment ID: 20000179 Result: Up-regulated in Transcription
  misc_feature: MA Experiment 20000179 PARAMETER Experiment Name: At_Germinating_Seeds_P Parameter: Age (hr) Value: 6 vs. 0
  misc_feature: MA Experiment 20000179 PARAMETER Experiment Name: At_Germinating_Seeds_P Parameter: Tissue Value: Germinating Seeds
  misc_feature: MA Experiment ID: 20000180 Result: Up-regulated in Transcription
  misc_feature: MA Experiment 20000180 PARAMETER Experiment Name: At_Germinating_Seeds_P Parameter: Age (hr) Value: 24 vs. 0
  misc_feature: MA Experiment 20000180 PARAMETER Experiment Name: At_Germinating_Seeds_P Parameter: Tissue Value: Germinating Seeds
  misc_feature: MA Experiment ID: 20000185 Result: Up-regulated in Transcription
  misc_feature: MA Experiment 20000185 PARAMETER Experiment Name: At_Roots__P Parameter: Age (day) Value: 7 vs. 21
  misc_feature: MA Experiment 20000185 PARAMETER Experiment Name: At_Roots__P Parameter: Organism Value: A. thaliana
  misc_feature: MA Experiment 20000185 PARAMETER Experiment Name: At_Roots__P Parameter: Tissue Value: Roots vs. Whole Plant
  misc_feature: MA Experiment ID: 20000227 Result: Up-regulated in Transcription
  misc_feature: MA Experiment 20000227 PARAMETER Experiment Name: At_Root-Tips-vs-Tops_P Parameter: Tissue Value: Root Tips vs. Root Tops
  misc_feature: MA Experiment ID: 20001451 Result: Down-regulated in Transcription
  misc_feature: MA Experiment 20001451 PARAMETER Experiment Name: At_Far-red-induction_P Parameter: Age (day) Value: 7
  misc_feature: MA Experiment 20001451 PARAMETER Experiment Name: At_Far-red-induction_P Parameter: Light Value: Far-red vs. White
  misc_feature: MA Experiment 20001451 PARAMETER Experiment Name: At_Far-red-induction_P Parameter: Organism Value: A. thaliana
  misc_feature: MA Experiment 20001451 PARAMETER Experiment Name: At_Far-red-induction_P Parameter: Plant Line Value: Columbia
  misc_feature: MA Experiment 20001451 PARAMETER Experiment Name: At_Far-red-induction_P Parameter: Timepoint (hr) Value: 24
  misc_feature: MA Experiment 20001451 PARAMETER Experiment Name: At_Far-red-induction_P Parameter: Tissue Value: Whole Plant

SEQ ID NO: 34175 - protein, 437 aa, Arabidopsis thaliana; identical to SEQ ID NO: 23044
  peptide (1)..(437): Ceres Seq. ID no. 13487836
  misc_feature (8)..(437): Pfam Name: Dolichyl-diphosphooligosaccharide-protein Pfam Description: Dolichyl-diphosphooligosaccharide-protein
  misc_feature (1)..(437): Homolog of NCBI NO: 730241 NR Description: Dolichyl-diphosphooligosaccharide--protein
  misc_feature (1)..(437): Homolog of NCBI NO: 2662375 NR Description: oligosaccharyltransferase [Homo sapiens]
  misc_feature (1)..(437): Homolog of NCBI NO: 30584753 NR Description: Homo sapiens
  misc_feature (1)..(437): Homolog of NCBI NO: 21104416 NR Description: dolichyl-diphosphooligosaccharide-protein
  misc_feature (1)..(437): Homolog of NCBI NO: 20070197 NR Description: dolichyl-diphosphooligosaccharide-protein
  misc_feature (1)..(437): Homolog of NCBI NO: 38175467 NR Description: putative dolichyl-di-phosphooligosaccharide-
  misc_feature (1)..(437): Homolog of NCBI NO: 8843726 NR Description: dolichyl-di-phosphooligosaccharide-protein
  misc_feature (1)..(437): Homolog of NCBI NO: 14334506 NR Description: putative
  misc_feature (1)..(437): Homolog of NCBI NO: 21553942 NR Description: dolichyl-di-phosphooligosaccharide-protein
  misc_feature (1)..(437): Homolog of NCBI NO: 18425101 NR Description: dolichyl-di-phosphooligosaccharide-protein

SEQ ID NO: 34176 - protein, 296 aa, Arabidopsis thaliana; identical to SEQ ID NO: 23045
  peptide (1)..(296): Ceres Seq. ID no. 13487837
  misc_feature (1)..(296): Pfam Name: Dolichyl-diphosphooligosaccharide-protein Pfam Description: Dolichyl-diphosphooligosaccharide-protein
  misc_feature (1)..(296): Homolog of NCBI NO: 730241 NR Description: Dolichyl-diphosphooligosaccharide--protein
  misc_feature (1)..(296): Homolog of NCBI NO: 2662375 NR Description: oligosaccharyltransferase [Homo sapiens]
  misc_feature (1)..(296): Homolog of NCBI NO: 30584753 NR Description: Homo sapiens
  misc_feature (1)..(296): Homolog of NCBI NO: 21104416 NR Description: dolichyl-diphosphooligosaccharide-protein
  misc_feature (1)..(296): Homolog of NCBI NO: 20070197 NR Description: dolichyl-diphosphooligosaccharide-protein
  misc_feature (1)..(296): Homolog of NCBI NO: 38175467 NR Description: putative dolichyl-di-phosphooligosaccharide-
  misc_feature (1)..(296): Homolog of NCBI NO: 8843726 NR Description: dolichyl-di-phosphooligosaccharide-protein
  misc_feature (1)..(296): Homolog of NCBI NO: 14334506 NR Description: putative
  misc_feature (1)..(296): Homolog of NCBI NO: 21553942 NR Description: dolichyl-di-phosphooligosaccharide-protein
  misc_feature (1)..(296): Homolog of NCBI NO: 18425101 NR Description: dolichyl-di-phosphooligosaccharide-protein

SEQ ID NO: 34177 - DNA, 1337 bp, Arabidopsis thaliana; identical to SEQ ID NO: 30587
  misc_feature (1)..(1337): Ceres Seq. ID no. 12396217
  misc_feature: MA Experiment ID: 20001451 Result: Down-regulated in Transcription
  misc_feature: MA Experiment 20001451 PARAMETER Experiment Name: At_Far-red-induction_P Parameter: Age (day) Value: 7
  misc_feature: MA Experiment 20001451 PARAMETER Experiment Name: At_Far-red-induction_P Parameter: Light Value: Far-red vs. White
  misc_feature: MA Experiment 20001451 PARAMETER Experiment Name: At_Far-red-induction_P Parameter: Organism Value: A. thaliana
  misc_feature: MA Experiment 20001451 PARAMETER Experiment Name: At_Far-red-induction_P Parameter: Plant Line Value: Columbia
  misc_feature: MA Experiment 20001451 PARAMETER Experiment Name: At_Far-red-induction_P Parameter: Timepoint (hr) Value: 24
  misc_feature: MA Experiment 20001451 PARAMETER Experiment Name: At_Far-red-induction_P Parameter: Tissue Value: Whole Plant

SEQ ID NO: 34178 - protein, 321 aa, Arabidopsis thaliana; identical to SEQ ID NO: 30588
  peptide (1)..(321): Ceres Seq. ID no. 12396218
  misc_feature (56)..(118): Homolog of NCBI NO: 25405838 NR Description: hypothetical protein T5A14.4 [imported] -
  misc_feature (119)..(321): Homolog of NCBI NO: 21618303 NR Description: unknown [Arabidopsis thaliana]
  misc_feature (1)..(321): Homolog of NCBI NO: 30682651 NR Description: expressed protein [Arabidopsis thaliana]
  misc_feature (1)..(321): Homolog of NCBI NO: 24417230 NR Description: unknown [Arabidopsis thaliana]

SEQ ID NO: 34179 - protein, 266 aa, Arabidopsis thaliana; identical to SEQ ID NO: 30589
  peptide (1)..(266): Ceres Seq. ID no. 12396219
  misc_feature (1)..(63): Homolog of NCBI NO: 25405838 NR Description: hypothetical protein T5A14.4 [imported] -
  misc_feature (64)..(266): Homolog of NCBI NO: 21618303 NR Description: unknown [Arabidopsis thaliana]
  misc_feature (1)..(266): Homolog of NCBI NO: 30682651 NR Description: expressed protein [Arabidopsis thaliana]
  misc_feature (1)..(266): Homolog of NCBI NO: 24417230 NR Description: unknown [Arabidopsis thaliana]

SEQ ID NO: 34180 - protein, 183 aa, Arabidopsis thaliana; identical to SEQ ID NO: 30590
  peptide (1)..(183): Ceres Seq. ID no. 12396220
  misc_feature (1)..(183): Homolog of NCBI NO: 21618303 NR Description: unknown [Arabidopsis thaliana]
  misc_feature (1)..(183): Homolog of NCBI NO: 30682651 NR Description: expressed protein [Arabidopsis thaliana]
  misc_feature (1)..(183): Homolog of NCBI NO: 24417230 NR Description: unknown [Arabidopsis thaliana]

SEQ ID NO: 34181 - DNA, 1378 bp, Arabidopsis thaliana; identical to SEQ ID NO: 30591
  misc_feature (1)..(1378): Ceres Seq. ID no. 12738505
  misc_feature: MA Experiment ID: 108435 Result: Down-regulated in Transcription
  misc_feature: MA Experiment 108435 PARAMETER Experiment Name: At_stm_Mutants_cDNA_P Parameter: Plant Line Value: wt Landsburg vs stm
  misc_feature: MA Experiment 108435 PARAMETER Experiment Name: At_stm_Mutants_cDNA_P Parameter: Tissue Value: Shoot Apical Meristem Region
  misc_feature: MA Experiment ID: 108463 Result: Up-regulated in Transcription
  misc_feature: MA Experiment 108463 PARAMETER Experiment Name: At_Germinating_Seeds_cDNA_P Parameter: Age (day) Value: 3 vs. 0
  misc_feature: MA Experiment 108463 PARAMETER Experiment Name: At_Germinating_Seeds_cDNA_P Parameter: Tissue Value: Germinating Seeds
  misc_feature: MA Experiment ID: 108464 Result: Up-regulated in Transcription
  misc_feature: MA Experiment 108464 PARAMETER Experiment Name: At_Germinating_Seeds_cDNA_P Parameter: Age (day) Value: 4 vs. 0
  misc_feature: MA Experiment 108464 PARAMETER Experiment Name: At_Germinating_Seeds_cDNA_P Parameter: Tissue Value: Germinating Seeds
  misc_feature: MA Experiment ID: 108573 Result: Up-regulated in Transcription
  misc_feature: MA Experiment 108573 PARAMETER Experiment Name: At_Drought_cDNA_P Parameter: Timepoint (hr) Value: 6
  misc_feature: MA Experiment 108573 PARAMETER Experiment Name: At_Drought_cDNA_P Parameter: Tissue Value: Aerial
  misc_feature: MA Experiment 108573 PARAMETER Experiment Name: At_Drought_cDNA_P Parameter: Treatment Value: Drought vs. No Drought
  misc_feature: MA Experiment ID: 108595 Result: Down-regulated in Transcription
  misc_feature: MA Experiment 108595 PARAMETER Experiment Name: At_Ler-pi_Ovule_cDNA_P Parameter: Plant Line Value: null
  misc_feature: MA Experiment ID: 20000113 Result: Up-regulated in Transcription
  misc_feature: MA Experiment 20000113 PARAMETER Experiment Name: At_42deg_Heat_cDNA_P Parameter: Temperature (deg C) Value: 42 vs. 22
  misc_feature: MA Experiment 20000113 PARAMETER Experiment Name: At_42deg_Heat_cDNA_P Parameter: Timepoint (hr) Value: 8
  misc_feature: MA Experiment 20000113 PARAMETER Experiment Name: At_42deg_Heat_cDNA_P Parameter: Tissue Value: Aerial
  misc_feature: MA Experiment ID: 20000227 Result: Down-regulated in Transcription
  misc_feature: MA Experiment 20000227 PARAMETER Experiment Name: At_Root-Tips-vs-Tops_P Parameter: Tissue Value: Root Tips vs. Root Tops
  misc_feature: MA Experiment ID: 20000234 Result: Down-regulated in Transcription
  misc_feature: MA Experiment 20000234 PARAMETER Experiment Name: At_Siliques_P Parameter: Age (day) Value: 21
  misc_feature: MA Experiment 20000234 PARAMETER Experiment Name: At_Siliques_P Parameter: Organism Value: A. thaliana
  misc_feature: MA Experiment 20000234 PARAMETER Experiment Name: At_Siliques_P Parameter: Plant Line Value: WS
  misc_feature: MA Experiment 20000234 PARAMETER Experiment Name: At_Siliques_P Parameter: Tissue Value: Less Than 5mm Siliques vs. Whole Plant
  misc_feature: MA Experiment ID: 20000235 Result: Down-regulated in Transcription
  misc_feature: MA Experiment 20000235 PARAMETER Experiment Name: At_Siliques_P Parameter: Age (day) Value: 21
  misc_feature: MA Experiment 20000235 PARAMETER Experiment Name: At_Siliques_P Parameter: Organism Value: A. thaliana
  misc_feature: MA Experiment 20000235 PARAMETER Experiment Name: At_Siliques_P Parameter: Plant Line Value: WS
  misc_feature: MA Experiment 20000235 PARAMETER Experiment Name: At_Siliques_P Parameter: Tissue Value: 5-10mm Siliques vs. Whole Plant
  misc_feature: MA Experiment ID: 20000264 Result: Down-regulated in Transcription
  misc_feature: MA Experiment 20000264 PARAMETER Experiment Name: At_Open_Flower_P Parameter: Age (day) Value: 21
  misc_feature: MA Experiment 20000264 PARAMETER Experiment Name: At_Open_Flower_P Parameter: Plant Line Value: WS
  misc_feature: MA Experiment 20000264 PARAMETER Experiment Name: At_Open_Flower_P Parameter: Tissue Value: Open Flower vs. Whole Plant
  misc_feature: MA Experiment ID: 20000265 Result: Down-regulated in Transcription
  misc_feature: MA Experiment 20000265 PARAMETER Experiment Name: At_Open_Flower_P Parameter: Age (day) Value: 21
  misc_feature: MA Experiment 20000265 PARAMETER Experiment Name: At_Open_Flower_P Parameter: Plant Line Value: WS
  misc_feature: MA Experiment 20000265 PARAMETER Experiment Name: At_Open_Flower_P Parameter: Tissue Value: Closed Flower vs. Whole Plant
  misc_feature: MA Experiment ID: 20000286 Result: Down-regulated in Transcription
  misc_feature: MA Experiment 20000286 PARAMETER Experiment Name: At_Open_Flower_P Parameter: Age (day) Value: 21
  misc_feature: MA Experiment 20000286 PARAMETER Experiment Name: At_Open_Flower_P Parameter: Plant Line Value: WS
  misc_feature: MA Experiment 20000286 PARAMETER Experiment Name: At_Open_Flower_P Parameter: Tissue Value: Half Open vs. Whole Plant
  misc_feature: MA Experiment ID: 20000439 Result: Down-regulated in Transcription
  misc_feature: MA Experiment 20000439 PARAMETER Experiment Name: At_Roots__P Parameter: Age (day) Value: 14 vs. 21
  misc_feature: MA Experiment 20000439 PARAMETER Experiment Name: At_Roots__P Parameter: Organism Value: A. thaliana
  misc_feature: MA Experiment 20000439 PARAMETER Experiment Name: At_Roots__P Parameter: Tissue Value: Roots vs. Whole Plant
  misc_feature: MA Experiment ID: 20000794 Result: Down-regulated in Transcription
  misc_feature: MA Experiment 20000794 PARAMETER Experiment Name: At_Petals_P Parameter: Age (day) Value: 23-25 days
  misc_feature: MA Experiment 20000794 PARAMETER Experiment Name: At_Petals_P Parameter: Plant Line Value: WS
  misc_feature: MA Experiment 20000794 PARAMETER Experiment Name: At_Petals_P Parameter: Tissue Value: Petals vs. Whole plant
  misc_feature: MA Experiment ID: 20001557 Result: Down-regulated in Transcription
  misc_feature: MA Experiment 20001557 PARAMETER Experiment Name: At_Drought_Soil_Dry_P Parameter: Age (day) Value: 27
  misc_feature: MA Experiment 20001557 PARAMETER Experiment Name: At_Drought_Soil_Dry_P Parameter: Organism Value: A. thaliana
  misc_feature: MA Experiment 20001557 PARAMETER Experiment Name: At_Drought_Soil_Dry_P Parameter: Plant Line Value: WS
  misc_feature: MA Experiment 20001557 PARAMETER Experiment Name: At_Drought_Soil_Dry_P Parameter: Post Timepoint (hr) Value: 3
  misc_feature: MA Experiment 20001557 PARAMETER Experiment Name: At_Drought_Soil_Dry_P Parameter: Post-Treatment Value: Re-Water vs. No Drought
  misc_feature: MA Experiment 20001557 PARAMETER Experiment Name: At_Drought_Soil_Dry_P Parameter: Timepoint (day) Value: 13
  misc_feature: MA Experiment 20001557 PARAMETER Experiment Name: At_Drought_Soil_Dry_P Parameter: Treatment Value: Drought vs. No Drought
  misc_feature: MA Experiment ID: 20001558 Result: Down-regulated in Transcription
  misc_feature: MA Experiment 20001558 PARAMETER Experiment Name: At_Drought_Soil_Dry_P Parameter: Age (day) Value: 27
  misc_feature: MA Experiment 20001558 PARAMETER Experiment Name: At_Drought_Soil_Dry_P Parameter: Organism Value: A. thaliana
  misc_feature: MA Experiment 20001558 PARAMETER Experiment Name: At_Drought_Soil_Dry_P Parameter: Plant Line Value: WS
  misc_feature: MA Experiment 20001558 PARAMETER Experiment Name: At_Drought_Soil_Dry_P Parameter: Post Timepoint (hr) Value: 6
  misc_feature: MA Experiment 20001558 PARAMETER Experiment Name: At_Drought_Soil_Dry_P Parameter: Post-Treatment Value: Re-Water vs. No Drought
  misc_feature: MA Experiment 20001558 PARAMETER Experiment Name: At_Drought_Soil_Dry_P Parameter: Timepoint (day) Value: 13
  misc_feature: MA Experiment 20001558 PARAMETER Experiment Name: At_Drought_Soil_Dry_P Parameter: Treatment Value: Drought vs. No Drought
  misc_feature: MA Experiment ID: 20001560 Result: Down-regulated in Transcription
  misc_feature: MA Experiment 20001560 PARAMETER Experiment Name: At_Drought_Soil_Dry_P Parameter: Age (day) Value: 28
  misc_feature: MA Experiment 20001560 PARAMETER Experiment Name: At_Drought_Soil_Dry_P Parameter: Organism Value: A. thaliana
  misc_feature: MA Experiment 20001560 PARAMETER Experiment Name: At_Drought_Soil_Dry_P Parameter: Plant Line Value: WS
  misc_feature: MA Experiment 20001560 PARAMETER Experiment Name: At_Drought_Soil_Dry_P Parameter: Post Timepoint (hr) Value: None
  misc_feature: MA Experiment 20001560 PARAMETER Experiment Name: At_Drought_Soil_Dry_P Parameter: Post-Treatment Value: None
  misc_feature: MA Experiment 20001560 PARAMETER Experiment Name: At_Drought_Soil_Dry_P Parameter: Timepoint (day) Value: 14
  misc_feature: MA Experiment 20001560 PARAMETER Experiment Name: At_Drought_Soil_Dry_P Parameter: Treatment Value: Drought vs. No Drought
  misc_feature: MA Experiment ID: 20001905 Result: Down-regulated in Transcription
  misc_feature: MA Experiment 20001905 PARAMETER Experiment Name: At_Drought_Reproduction_P Parameter: Age (day) Value: 40
  misc_feature: MA Experiment 20001905 PARAMETER Experiment Name: At_Drought_Reproduction_P Parameter: Organism Value: A. thaliana
  misc_feature: MA Experiment 20001905 PARAMETER Experiment Name: At_Drought_Reproduction_P Parameter: Plant Line Value: WS
  misc_feature: MA Experiment 20001905 PARAMETER Experiment Name: At_Drought_Reproduction_P Parameter: Timepoint (day) Value: 10
  misc_feature: MA Experiment 20001905 PARAMETER Experiment Name: At_Drought_Reproduction_P Parameter: Tissue Value: Rosettes
  misc_feature: MA Experiment 20001905 PARAMETER Experiment Name: At_Drought_Reproduction_P Parameter: Treatment Value: Drought vs. No Drought

SEQ ID NO: 34182 - protein, 358 aa, Arabidopsis thaliana; identical to SEQ ID NO: 30592
  peptide (1)..(358): Ceres Seq. ID no. 12738506
  misc_feature (1)..(358): Homolog of NCBI NO: 15226027 NR Description: unknown protein

SEQ ID NO: 34183 - protein, 279 aa, Arabidopsis thaliana; identical to SEQ ID NO: 30593
  peptide (1)..(279): Ceres Seq. ID no. 12738507
  misc_feature (1)..(279): Homolog of NCBI NO: 15226027 NR Description: unknown protein

SEQ ID NO: 34184 - protein, 272 aa, Arabidopsis thaliana; identical to SEQ ID NO: 30594
  peptide (1)..(272): Ceres Seq. ID no. 12738508
  misc_feature (1)..(272): Homolog of NCBI NO: 15226027 NR Description: unknown protein

SEQ ID NO: 34185 - DNA, 843 bp, Arabidopsis thaliana; identical to SEQ ID NO: 30595
  misc_feature (1)..(843): Ceres Seq. ID no. 12338037
  misc_feature: MA Experiment ID: 108464 Result: Down-regulated in Transcription
  misc_feature: MA Experiment 108464 PARAMETER Experiment Name: At_Germinating_Seeds_cDNA_P Parameter: Age (day) Value: 4 vs. 0
  misc_feature: MA Experiment 108464 PARAMETER Experiment Name: At_Germinating_Seeds_cDNA_P Parameter: Tissue Value: Germinating Seeds
  misc_feature: MA Experiment ID: 108573 Result: Down-regulated in Transcription
  misc_feature: MA Experiment 108573 PARAMETER Experiment Name: At_Drought_cDNA_P Parameter: Timepoint (hr) Value: 6
  misc_feature: MA Experiment 108573 PARAMETER Experiment Name: At_Drought_cDNA_P Parameter: Tissue Value: Aerial
  misc_feature: MA Experiment 108573 PARAMETER Experiment Name: At_Drought_cDNA_P Parameter: Treatment Value: Drought vs. No Drought
  misc_feature: MA Experiment ID: 108585 Result: Down-regulated in Transcription
  misc_feature: MA Experiment 108585 PARAMETER Experiment Name: At_5mM_NaNP_cDNA_P Parameter: Timepoint (hr) Value: 6
  misc_feature: MA Experiment 108585 PARAMETER Experiment Name: At_5mM_NaNP_cDNA_P Parameter: Tissue Value: Aerial
  misc_feature: MA Experiment 108585 PARAMETER Experiment Name: At_5mM_NaNP_cDNA_P Parameter: Treatment Value: null
  misc_feature: MA Experiment ID: 108595 Result: Down-regulated in Transcription
  misc_feature: MA Experiment 108595 PARAMETER Experiment Name: At_Ler-pi_Ovule_cDNA_P Parameter: Plant Line Value: null
  misc_feature: MA Experiment ID: 20000180 Result: Up-regulated in Transcription
  misc_feature: MA Experiment 20000180 PARAMETER Experiment Name: At_Germinating_Seeds_P Parameter: Age (hr) Value: 24 vs. 0
  misc_feature: MA Experiment 20000180 PARAMETER Experiment Name: At_Germinating_Seeds_P Parameter: Tissue Value: Germinating Seeds
  misc_feature: MA Experiment ID: 20000437 Result: Down-regulated in Transcription
  misc_feature: MA Experiment 20000437 PARAMETER Experiment Name: At_Drought_P Parameter: Age (day) Value: 8
  misc_feature: MA Experiment 20000437 PARAMETER Experiment Name: At_Drought_P Parameter: Organism Value: A. thaliana
  misc_feature: MA Experiment 20000437 PARAMETER Experiment Name: At_Drought_P Parameter: Plant Line Value: WS
  misc_feature: MA Experiment 20000437 PARAMETER Experiment Name: At_Drought_P Parameter: Timepoint (hr) Value: 24
  misc_feature: MA Experiment 20000437 PARAMETER Experiment Name: At_Drought_P Parameter: Tissue Value: Whole Plant
  misc_feature: MA Experiment 20000437 PARAMETER Experiment Name: At_Drought_P Parameter: Treatment Value: Drought vs. No Drought
  misc_feature: MA Experiment ID: 20001557 Result: Up-regulated in Transcription
  misc_feature: MA Experiment 20001557 PARAMETER Experiment Name: At_Drought_Soil_Dry_P Parameter: Age (day) Value: 27
  misc_feature: MA Experiment 20001557 PARAMETER Experiment Name: At_Drought_Soil_Dry_P Parameter: Organism Value: A. thaliana
  misc_feature: MA Experiment 20001557 PARAMETER Experiment Name: At_Drought_Soil_Dry_P Parameter: Plant Line Value: WS
  misc_feature: MA Experiment 20001557 PARAMETER Experiment Name: At_Drought_Soil_Dry_P Parameter: Post Timepoint (hr) Value: 3
  misc_feature: MA Experiment 20001557 PARAMETER Experiment Name: At_Drought_Soil_Dry_P Parameter: Post-Treatment Value: Re-Water vs. No Drought
  misc_feature: MA Experiment 20001557 PARAMETER Experiment Name: At_Drought_Soil_Dry_P Parameter: Timepoint (day) Value: 13
  misc_feature: MA Experiment 20001557 PARAMETER Experiment Name: At_Drought_Soil_Dry_P Parameter: Treatment Value: Drought vs. No Drought
  misc_feature: MA Experiment ID: 20001558 Result: Up-regulated in Transcription
  misc_feature: MA Experiment 20001558 PARAMETER Experiment Name: At_Drought_Soil_Dry_P Parameter: Age (day) Value: 27
  misc_feature: MA Experiment 20001558 PARAMETER Experiment Name: At_Drought_Soil_Dry_P Parameter: Organism Value: A. thaliana
  misc_feature: MA Experiment 20001558 PARAMETER Experiment Name: At_Drought_Soil_Dry_P Parameter: Plant Line Value: WS
  misc_feature: MA Experiment 20001558 PARAMETER Experiment Name: At_Drought_Soil_Dry_P Parameter: Post Timepoint (hr) Value: 6
  misc_feature: MA Experiment 20001558 PARAMETER Experiment Name: At_Drought_Soil_Dry_P Parameter: Post-Treatment Value: Re-Water vs. No Drought
  misc_feature: MA Experiment 20001558 PARAMETER Experiment Name: At_Drought_Soil_Dry_P Parameter: Timepoint (day) Value: 13
  misc_feature: MA Experiment 20001558 PARAMETER Experiment Name: At_Drought_Soil_Dry_P Parameter: Treatment Value: Drought vs. No Drought

SEQ ID NO: 34186 - protein, 187 aa, Arabidopsis thaliana; identical to SEQ ID NO: 30596
  peptide (1)..(187): Ceres Seq. ID no. 12338038
  misc_feature (6)..(184): Homolog of NCBI NO: 29367497 NR Description: unknown [Oryza sativa (japonica cultivar-group)]
  misc_feature (1)..(187): Homolog of NCBI NO: 30683552 NR Description: expressed protein [Arabidopsis thaliana]
  misc_feature (1)..(187): Homolog of NCBI NO: 8953389 NR Description: putative protein [Arabidopsis thaliana]

SEQ ID NO: 34187 - protein, 121 aa, Arabidopsis thaliana; identical to SEQ ID NO: 30597
  peptide (1)..(121): Ceres Seq. ID no. 12338039
  misc_feature (1)..(118): Homolog of NCBI NO: 29367497 NR Description: unknown [Oryza sativa (japonica cultivar-group)]
  misc_feature (1)..(121): Homolog of NCBI NO: 30683552 NR Description: expressed protein [Arabidopsis thaliana]
  misc_feature (1)..(121): Homolog of NCBI NO: 8953389 NR Description: putative protein [Arabidopsis thaliana]

SEQ ID NO: 34188 - DNA, 1262 bp, Arabidopsis thaliana; identical to SEQ ID NO: 30598
  misc_feature (1)..(1262): Ceres Seq. ID no. 12395955
  misc_feature: MA Experiment ID: 108594 Result: Down-regulated in Transcription
  misc_feature: MA Experiment 108594 PARAMETER Experiment Name: At_Ler-rhl_Root_cDNA_P Parameter: Plant Line Value: null
  misc_feature: MA Experiment ID: 108595 Result: Down-regulated in Transcription
  misc_feature: MA Experiment 108595 PARAMETER Experiment Name: At_Ler-pi_Ovule_cDNA_P Parameter: Plant Line Value: null
  misc_feature: MA Experiment ID: 20000179 Result: Up-regulated in Transcription
  misc_feature: MA Experiment 20000179 PARAMETER Experiment Name: At_Germinating_Seeds_P Parameter: Age (hr) Value: 6 vs. 0
  misc_feature: MA Experiment 20000179 PARAMETER Experiment Name: At_Germinating_Seeds_P Parameter: Tissue Value: Germinating Seeds
  misc_feature: MA Experiment ID: 20000180 Result: Up-regulated in Transcription
  misc_feature: MA Experiment 20000180 PARAMETER Experiment Name: At_Germinating_Seeds_P Parameter: Age (hr) Value: 24 vs. 0
  misc_feature: MA Experiment 20000180 PARAMETER Experiment Name: At_Germinating_Seeds_P Parameter: Tissue Value: Germinating Seeds
  misc_feature: MA Experiment ID: 20000184 Result: Down-regulated in Transcription
  misc_feature: MA Experiment 20000184 PARAMETER Experiment Name: At_Shoots__P Parameter: Age (day) Value: 7
  misc_feature: MA Experiment 20000184 PARAMETER Experiment Name: At_Shoots__P Parameter: Tissue Value: Shoots vs. Whole Plant
  misc_feature: MA Experiment ID: 20000234 Result: Down-regulated in Transcription
  misc_feature: MA Experiment 20000234 PARAMETER Experiment Name: At_Siliques_P Parameter: Age (day) Value: 21
  misc_feature: MA Experiment 20000234 PARAMETER Experiment Name: At_Siliques_P Parameter: Organism Value: A. thaliana
  misc_feature: MA Experiment 20000234 PARAMETER Experiment Name: At_Siliques_P Parameter: Plant Line Value: WS
  misc_feature: MA Experiment 20000234 PARAMETER Experiment Name: At_Siliques_P Parameter: Tissue Value: Less Than 5mm Siliques vs. Whole Plant
  misc_feature: MA Experiment ID: 20000235 Result: Down-regulated in Transcription
  misc_feature: MA Experiment 20000235 PARAMETER Experiment Name: At_Siliques_P Parameter: Age (day) Value: 21
  misc_feature: MA Experiment 20000235 PARAMETER Experiment Name: At_Siliques_P Parameter: Organism Value: A. thaliana
  misc_feature: MA Experiment 20000235 PARAMETER Experiment Name: At_Siliques_P Parameter: Plant Line Value: WS
  misc_feature: MA Experiment 20000235 PARAMETER Experiment Name: At_Siliques_P Parameter: Tissue Value: 5-10mm Siliques vs. Whole Plant
  misc_feature: MA Experiment ID: 20000286 Result: Down-regulated in Transcription
  misc_feature: MA Experiment 20000286 PARAMETER Experiment Name: At_Open_Flower_P Parameter: Age (day) Value: 21
  misc_feature: MA Experiment 20000286 PARAMETER Experiment Name: At_Open_Flower_P Parameter: Plant Line Value: WS
  misc_feature: MA Experiment 20000286 PARAMETER Experiment Name: At_Open_Flower_P Parameter: Tissue Value: Half Open vs. Whole Plant
  misc_feature: MA Experiment ID: 20001451 Result: Down-regulated in Transcription
  misc_feature: MA Experiment 20001451 PARAMETER Experiment Name: At_Far-red-induction_P Parameter: Age (day) Value: 7
  misc_feature: MA Experiment 20001451 PARAMETER Experiment Name: At_Far-red-induction_P Parameter: Light Value: Far-red vs. White
  misc_feature: MA Experiment 20001451 PARAMETER Experiment Name: At_Far-red-induction_P Parameter: Organism Value: A. thaliana
  misc_feature: MA Experiment 20001451 PARAMETER Experiment Name: At_Far-red-induction_P Parameter: Plant Line Value: Columbia
  misc_feature: MA Experiment 20001451 PARAMETER Experiment Name: At_Far-red-induction_P Parameter: Timepoint (hr) Value: 24
  misc_feature: MA Experiment 20001451 PARAMETER Experiment Name: At_Far-red-induction_P Parameter: Tissue Value: Whole Plant
  misc_feature: MA Experiment ID: 20001557 Result: Down-regulated in Transcription
  misc_feature: MA Experiment 20001557 PARAMETER Experiment Name: At_Drought_Soil_Dry_P Parameter: Age (day) Value: 27
  misc_feature: MA Experiment 20001557 PARAMETER Experiment Name: At_Drought_Soil_Dry_P Parameter: Organism Value: A. thaliana
  misc_feature: MA Experiment 20001557 PARAMETER Experiment Name: At_Drought_Soil_Dry_P Parameter: Plant Line Value: WS
  misc_feature: MA Experiment 20001557 PARAMETER Experiment Name: At_Drought_Soil_Dry_P Parameter: Post Timepoint (hr) Value: 3
  misc_feature: MA Experiment 20001557 PARAMETER Experiment Name: At_Drought_Soil_Dry_P Parameter: Post-Treatment Value: Re-Water vs. No Drought
  misc_feature: MA Experiment 20001557 PARAMETER Experiment Name: At_Drought_Soil_Dry_P Parameter: Timepoint (day) Value: 13
  misc_feature: MA Experiment 20001557 PARAMETER Experiment Name: At_Drought_Soil_Dry_P Parameter: Treatment Value: Drought vs. No Drought
  misc_feature: MA Experiment ID: 20001558 Result: Down-regulated in Transcription
  misc_feature: MA Experiment 20001558 PARAMETER Experiment Name: At_Drought_Soil_Dry_P Parameter: Age (day) Value: 27
  misc_feature: MA Experiment 20001558 PARAMETER Experiment Name: At_Drought_Soil_Dry_P Parameter: Organism Value: A. thaliana
  misc_feature: MA Experiment 20001558 PARAMETER Experiment Name: At_Drought_Soil_Dry_P Parameter: Plant Line Value: WS
  misc_feature: MA Experiment 20001558 PARAMETER Experiment Name: At_Drought_Soil_Dry_P Parameter: Post Timepoint (hr) Value: 6
  misc_feature: MA Experiment 20001558 PARAMETER Experiment Name: At_Drought_Soil_Dry_P Parameter: Post-Treatment Value: Re-Water vs. No Drought
  misc_feature: MA Experiment 20001558 PARAMETER Experiment Name: At_Drought_Soil_Dry_P Parameter: Timepoint (day) Value: 13
  misc_feature: MA Experiment 20001558 PARAMETER Experiment Name: At_Drought_Soil_Dry_P Parameter: Treatment Value: Drought vs. No Drought
  misc_feature: MA Experiment ID: 20001560 Result: Down-regulated in Transcription
  misc_feature: MA Experiment 20001560 PARAMETER Experiment Name: At_Drought_Soil_Dry_P Parameter: Age (day) Value: 28
  misc_feature: MA Experiment 20001560 PARAMETER Experiment Name: At_Drought_Soil_Dry_P Parameter: Organism Value: A. thaliana
  misc_feature: MA Experiment 20001560 PARAMETER Experiment Name: At_Drought_Soil_Dry_P Parameter: Plant Line Value: WS
  misc_feature: MA Experiment 20001560 PARAMETER Experiment Name: At_Drought_Soil_Dry_P Parameter: Post Timepoint (hr) Value: None
  misc_feature: MA Experiment 20001560 PARAMETER Experiment Name: At_Drought_Soil_Dry_P Parameter: Post-Treatment Value: None
  misc_feature: MA Experiment 20001560 PARAMETER Experiment Name: At_Drought_Soil_Dry_P Parameter: Timepoint (day) Value: 14
  misc_feature: MA Experiment 20001560 PARAMETER Experiment Name: At_Drought_Soil_Dry_P Parameter: Treatment Value: Drought vs. No Drought

SEQ ID NO: 34189 - protein, 270 aa, Arabidopsis thaliana; identical to SEQ ID NO: 30599
  peptide (1)..(270): Ceres Seq. ID no. 12395956
  misc_feature (9)..(75): Pfam Name: PQ loop repeat Pfam Description: PQ loop repeat
  misc_feature (14)..(246): Homolog of NCBI NO: 34872731 NR Description: similar to cystinosin [Rattus norvegicus]
  misc_feature (150)..(270): Homolog of NCBI NO: 7497270 NR Description: hypothetical protein C41C4.7 - Caenorhabditis
  misc_feature (9)..(170): Homolog of NCBI NO: 7497270 NR Description: hypothetical protein C41C4.7 - Caenorhabditis
  misc_feature (6)..(246): Homolog of NCBI NO: 4826682 NR Description: cystinosis, nephropathic; Cystinosis [Homo
  misc_feature (9)..(254): Homolog of NCBI NO: 32565006 NR Description: Cystinosin/ERS1p repeat (42.2 kD) (2I426)
  misc_feature (9)..(270): Homolog of NCBI NO: 39587268 NR Description: Hypothetical protein CBG00747 [Caenorhabditis
  misc_feature (6)..(258): Homolog of NCBI NO: 23273064 NR Description: cystinosis, nephropathic [Homo sapiens]
  misc_feature (9)..(270): Homolog of NCBI NO: 17532373 NR Description: Cystinosis nephropathic (45.4 kD) [Caenorhabditis
  misc_feature (1)..(270): Homolog of NCBI NO: 21553944 NR Description: unknown [Arabidopsis thaliana]
  misc_feature (1)..(270): Homolog of NCBI NO: 15237468 NR Description: putative protein

SEQ ID NO: 34190 - protein, 221 aa, Arabidopsis thaliana; identical to SEQ ID NO: 30600
  peptide (1)..(221): Ceres Seq. ID no. 12395957
  misc_feature (1)..(197): Homolog of NCBI NO: 34872731 NR Description: similar to cystinosin [Rattus norvegicus]
  misc_feature (101)..(221): Homolog of NCBI NO: 7497270 NR Description: hypothetical protein C41C4.7 - Caenorhabditis
  misc_feature (1)..(121): Homolog of NCBI NO: 7497270 NR Description: hypothetical protein C41C4.7 - Caenorhabditis
  misc_feature (1)..(197): Homolog of NCBI NO: 4826682 NR Description: cystinosis, nephropathic; Cystinosis [Homo
  misc_feature (1)..(205): Homolog of NCBI NO: 32565006 NR Description: Cystinosin/ERS1p repeat (42.2 kD) (2I426)
  misc_feature (1)..(221): Homolog of NCBI NO: 39587268 NR Description: Hypothetical protein CBG00747 [Caenorhabditis
  misc_feature (1)..(209): Homolog of NCBI NO: 23273064 NR Description: cystinosis, nephropathic [Homo sapiens]
  misc_feature (1)..(221): Homolog of NCBI NO: 17532373 NR Description: Cystinosis nephropathic (45.4 kD) [Caenorhabditis
  misc_feature (1)..(221): Homolog of NCBI NO: 21553944 NR Description: unknown [Arabidopsis thaliana]
  misc_feature (1)..(221): Homolog of NCBI NO: 15237468 NR Description: putative protein

SEQ ID NO: 34191 - protein, 211 aa, Arabidopsis thaliana; identical to SEQ ID NO: 30601
  peptide (1)..(211): Ceres Seq. ID no. 12395958
  misc_feature (1)..(187): Homolog of NCBI NO: 34872731 NR Description: similar to cystinosin [Rattus norvegicus]
  misc_feature (91)..(211): Homolog of NCBI NO: 7497270 NR Description: hypothetical protein C41C4.7 - Caenorhabditis
  misc_feature (1)..(111): Homolog of NCBI NO: 7497270 NR Description: hypothetical protein C41C4.7 - Caenorhabditis
  misc_feature (1)..(187): Homolog of NCBI NO: 4826682 NR Description: cystinosis, nephropathic; Cystinosis [Homo
  misc_feature (1)..(195): Homolog of NCBI NO: 32565006 NR Description: Cystinosin/ERS1p repeat (42.2 kD) (2I426)
  misc_feature (1)..(211): Homolog of NCBI NO: 39587268 NR Description: Hypothetical protein CBG00747 [Caenorhabditis
  misc_feature (1)..(199): Homolog of NCBI NO: 23273064 NR Description: cystinosis, nephropathic [Homo sapiens]
  misc_feature (1)..(211): Homolog of NCBI NO: 17532373 NR Description: Cystinosis nephropathic (45.4 kD) [Caenorhabditis
  misc_feature (1)..(211): Homolog of NCBI NO: 21553944 NR Description: unknown [Arabidopsis thaliana]
  misc_feature (1)..(211): Homolog of NCBI NO: 15237468 NR Description: putative protein

SEQ ID NO: 34192 - DNA, 756 bp, Arabidopsis thaliana; identical to SEQ ID NO: 30602
  misc_feature (1)..(756): Ceres Seq. ID no. 12562490
  misc_feature: MA Experiment ID: 108434 Result: Up-regulated in Transcription
  misc_feature: MA Experiment 108434 PARAMETER Experiment Name: At_Root_Tips_cDNA_P Parameter: Tissue Value: Root Tips
  misc_feature: MA Experiment ID: 108462 Result: Down-regulated in Transcription
  misc_feature: MA Experiment 108462 PARAMETER Experiment Name: At_Germinating_Seeds_cDNA_P Parameter: Age (day) Value: 2 vs. 0
  misc_feature: MA Experiment 108462 PARAMETER Experiment Name: At_Germinating_Seeds_cDNA_P Parameter: Tissue Value: Germinating Seeds
  misc_feature: MA Experiment ID: 108463 Result: Down-regulated in Transcription
  misc_feature: MA Experiment 108463 PARAMETER Experiment Name: At_Germinating_Seeds_cDNA_P Parameter: Age (day) Value: 3 vs. 0
  misc_feature: MA Experiment 108463 PARAMETER Experiment Name: At_Germinating_Seeds_cDNA_P Parameter: Tissue Value: Germinating Seeds
  misc_feature: MA Experiment ID: 108464 Result: Down-regulated in Transcription
  misc_feature: MA Experiment 108464 PARAMETER Experiment Name: At_Germinating_Seeds_cDNA_P Parameter: Age (day) Value: 4 vs. 0
  misc_feature: MA Experiment 108464 PARAMETER Experiment Name: At_Germinating_Seeds_cDNA_P Parameter: Tissue Value: Germinating Seeds
  misc_feature: MA Experiment ID: 108561 Result: Down-regulated in Transcription
  misc_feature: MA Experiment 108561 PARAMETER Experiment Name: At_100uM_ABA_cDNA_P Parameter: Timepoint (hr) Value: 6
  misc_feature: MA Experiment 108561 PARAMETER Experiment Name: At_100uM_ABA_cDNA_P Parameter: Tissue Value: Aerial
  misc_feature: MA Experiment 108561 PARAMETER Experiment Name: At_100uM_ABA_cDNA_P Parameter: Treatment Value: 100uM ABA vs. No Treatment
  misc_feature: MA Experiment ID: 108573 Result: Down-regulated in Transcription
  misc_feature: MA Experiment 108573 PARAMETER Experiment Name: At_Drought_cDNA_P Parameter: Timepoint (hr) Value: 6
  misc_feature: MA Experiment 108573 PARAMETER Experiment Name: At_Drought_cDNA_P Parameter: Tissue Value: Aerial
  misc_feature: MA Experiment 108573 PARAMETER Experiment Name: At_Drought_cDNA_P Parameter: Treatment Value: Drought vs. No Drought
  misc_feature: MA Experiment ID: 108576 Result: Down-regulated in Transcription
  misc_feature: MA Experiment 108576 PARAMETER Experiment Name: At_42deg_Heat_cDNA_P Parameter: Temperature (deg C) Value: 42 vs. 22
  misc_feature: MA Experiment 108576 PARAMETER Experiment Name: At_42deg_Heat_cDNA_P Parameter: Timepoint (hr) Value: 1
  misc_feature: MA Experiment 108576 PARAMETER Experiment Name: At_42deg_Heat_cDNA_P Parameter: Tissue Value: Aerial
  misc_feature: MA Experiment ID: 108577 Result: Down-regulated in Transcription
  misc_feature: MA Experiment 108577 PARAMETER Experiment Name: At_42deg_Heat_cDNA_P Parameter: Temperature (deg C) Value: 42 vs. 22
  misc_feature: MA Experiment 108577 PARAMETER Experiment Name: At_42deg_Heat_cDNA_P Parameter: Timepoint (hr) Value: 6
  misc_feature: MA Experiment 108577 PARAMETER Experiment Name: At_42deg_Heat_cDNA_P Parameter: Tissue Value: Aerial
  misc_feature: MA Experiment ID: 108579 Result: Up-regulated in Transcription
  misc_feature: MA Experiment 108579 PARAMETER Experiment Name: At_4deg_Cold_cDNA_P Parameter: Temperature (deg C) Value: 4 vs. 22
  misc_feature: MA Experiment 108579 PARAMETER Experiment Name: At_4deg_Cold_cDNA_P Parameter: Timepoint (hr) Value: 6
  misc_feature: MA Experiment 108579 PARAMETER Experiment Name: At_4deg_Cold_cDNA_P Parameter: Tissue Value: Aerial
  misc_feature: MA Experiment ID: 108585 Result: Down-regulated in Transcription
  misc_feature: MA Experiment 108585 PARAMETER Experiment Name: At_5mM_NaNP_cDNA_P Parameter: Timepoint (hr) Value: 6
  misc_feature: MA Experiment 108585 PARAMETER Experiment Name: At_5mM_NaNP_cDNA_P Parameter: Tissue Value: Aerial
  misc_feature: MA Experiment 108585 PARAMETER Experiment Name: At_5mM_NaNP_cDNA_P Parameter: Treatment Value: null
  misc_feature: MA Experiment ID: 108595 Result: Down-regulated in Transcription
  misc_feature: MA Experiment 108595 PARAMETER Experiment Name: At_Ler-pi_Ovule_cDNA_P Parameter: Plant Line Value: null
  misc_feature: MA Experiment ID: 108609 Result: Down-regulated in Transcription
  misc_feature: MA Experiment 108609 PARAMETER Experiment Name: At_100uM_ABA_cDNA_P Parameter: Timepoint (hr) Value: 24
  misc_feature: MA Experiment 108609 PARAMETER Experiment Name: At_100uM_ABA_cDNA_P Parameter: Tissue Value: Aerial
  misc_feature: MA Experiment 108609 PARAMETER Experiment Name: At_100uM_ABA_cDNA_P Parameter: Treatment Value: 100uM ABA vs. No Treatment
  misc_feature: MA Experiment ID: 20000069 Result: Down-regulated in Transcription
  misc_feature: MA Experiment 20000069 PARAMETER Experiment Name: At_100uM_ABA_Mutants_cDNA_P Parameter: Plant Line Value: CS23
  misc_feature: MA Experiment 20000069 PARAMETER Experiment Name: At_100uM_ABA_Mutants_cDNA_P Parameter: Timepoint (hr) Value: 6
  misc_feature: MA Experiment 20000069 PARAMETER Experiment Name: At_100uM_ABA_Mutants_cDNA_P Parameter: Tissue Value: Aerial
  misc_feature: MA Experiment 20000069 PARAMETER Experiment Name: At_100uM_ABA_Mutants_cDNA_P Parameter: Treatment Value: 100uM ABA vs. No Treatment
  misc_feature: MA Experiment ID: 20000070 Result: Down-regulated in Transcription
  misc_feature: MA Experiment 20000070 PARAMETER Experiment Name: At_100uM_ABA_Mutants_cDNA_P Parameter: Plant Line Value: CS24
  misc_feature: MA Experiment 20000070 PARAMETER Experiment Name: At_100uM_ABA_Mutants_cDNA_P Parameter: Timepoint (hr) Value: 6
  misc_feature: MA Experiment 20000070 PARAMETER Experiment Name: At_100uM_ABA_Mutants_cDNA_P Parameter: Tissue Value: Aerial
  misc_feature: MA Experiment 20000070 PARAMETER Experiment Name: At_100uM_ABA_Mutants_cDNA_P Parameter: Treatment Value: 100uM ABA vs. No Treatment
  misc_feature: MA Experiment ID: 20000071 Result: Down-regulated in Transcription
  misc_feature: MA Experiment 20000071 PARAMETER Experiment Name: At_100uM_ABA_Mutants_cDNA_P Parameter: Plant Line Value: CS8104
  misc_feature: MA Experiment 20000071 PARAMETER Experiment Name: At_100uM_ABA_Mutants_cDNA_P Parameter: Timepoint (hr) Value: 6
  misc_feature: MA Experiment 20000071 PARAMETER Experiment Name: At_100uM_ABA_Mutants_cDNA_P Parameter: Tissue Value: Aerial
  misc_feature: MA Experiment 20000071 PARAMETER Experiment Name: At_100uM_ABA_Mutants_cDNA_P Parameter: Treatment Value: 100uM ABA vs. No Treatment
  misc_feature: MA Experiment ID: 20000087 Result: Down-regulated in Transcription
  misc_feature: MA Experiment 20000087 PARAMETER Experiment Name: At_100uM_ABA_Mutants_cDNA_P Parameter: Plant Line Value: WS
  misc_feature: MA Experiment 20000087 PARAMETER Experiment Name: At_100uM_ABA_Mutants_cDNA_P Parameter: Timepoint (hr) Value: 6
  misc_feature: MA Experiment 20000087 PARAMETER Experiment Name: At_100uM_ABA_Mutants_cDNA_P Parameter: Tissue Value: Aerial
  misc_feature: MA Experiment 20000087 PARAMETER Experiment Name: At_100uM_ABA_Mutants_cDNA_P Parameter: Treatment Value: 100uM ABA vs. No Treatment
  misc_feature: MA Experiment ID: 20000090 Result: Up-regulated in Transcription
  misc_feature: MA Experiment ID: 20000112 Result: Down-regulated in Transcription
  misc_feature: MA Experiment 20000112 PARAMETER Experiment Name: At_42deg_Heat_cDNA_P Parameter: Temperature (deg C) Value: 42 vs. 22
  misc_feature: MA Experiment 20000112 PARAMETER Experiment Name: At_42deg_Heat_cDNA_P Parameter: Timepoint (hr) Value: 2
  misc_feature: MA Experiment 20000112 PARAMETER Experiment Name: At_42deg_Heat_cDNA_P Parameter: Tissue Value: Aerial
  misc_feature: MA Experiment ID: 20000113 Result: Down-regulated in Transcription
  misc_feature: MA Experiment 20000113 PARAMETER Experiment Name: At_42deg_Heat_cDNA_P Parameter: Temperature (deg C) Value: 42 vs. 22
  misc_feature: MA Experiment 20000113 PARAMETER Experiment Name: At_42deg_Heat_cDNA_P Parameter: Timepoint (hr) Value: 8
  misc_feature: MA Experiment 20000113 PARAMETER Experiment Name: At_42deg_Heat_cDNA_P Parameter: Tissue Value: Aerial
  misc_feature: MA Experiment ID: 20000117 Result: Down-regulated in Transcription
  misc_feature: MA Experiment 20000117 PARAMETER Experiment Name: At_100uM_ABA_Mutants_cDNA_P Parameter: Plant Line Value: Columbia
  misc_feature: MA Experiment 20000117 PARAMETER Experiment Name: At_100uM_ABA_Mutants_cDNA_P Parameter: Timepoint (hr) Value: 6
  misc_feature: MA Experiment 20000117 PARAMETER Experiment Name: At_100uM_ABA_Mutants_cDNA_P Parameter: Tissue Value: Aerial
  misc_feature: MA Experiment 20000117 PARAMETER Experiment Name: At_100uM_ABA_Mutants_cDNA_P Parameter: Treatment Value: 100uM ABA vs. No Treatment
  misc_feature: MA Experiment ID: 20000144 Result: Down-regulated in Transcription
  misc_feature: MA Experiment 20000144 PARAMETER Experiment Name: At_42deg_Heat_cDNA_P Parameter: Temperature (deg C) Value: 42 vs. 22
  misc_feature: MA Experiment 20000144 PARAMETER Experiment Name: At_42deg_Heat_cDNA_P Parameter: Timepoint (hr) Value: 1
  misc_feature: MA Experiment 20000144 PARAMETER Experiment Name: At_42deg_Heat_cDNA_P Parameter: Tissue Value: Aerial
  misc_feature: MA Experiment ID: 20001560 Result: Up-regulated in Transcription
  misc_feature: MA Experiment 20001560 PARAMETER Experiment Name: At_Drought_Soil_Dry_P Parameter: Age (day) Value: 28
  misc_feature: MA Experiment 20001560 PARAMETER Experiment Name: At_Drought_Soil_Dry_P Parameter: Organism Value: A. thaliana
  misc_feature: MA Experiment 20001560 PARAMETER Experiment Name: At_Drought_Soil_Dry_P Parameter: Plant Line Value: WS
  misc_feature: MA Experiment 20001560 PARAMETER Experiment Name: At_Drought_Soil_Dry_P Parameter: Post Timepoint (hr) Value: None
  misc_feature: MA Experiment 20001560 PARAMETER Experiment Name: At_Drought_Soil_Dry_P Parameter: Post-Treatment Value: None
  misc_feature: MA Experiment 20001560 PARAMETER Experiment Name: At_Drought_Soil_Dry_P Parameter: Timepoint (day) Value: 14
  misc_feature: MA Experiment 20001560 PARAMETER Experiment Name: At_Drought_Soil_Dry_P Parameter: Treatment Value: Drought vs. No Drought

SEQ ID NO: 34193 - protein, 198 aa, Arabidopsis thaliana; identical to SEQ ID NO: 30603
  peptide (1)..(198): Ceres Seq. ID no. 12562491
  misc_feature (68)..(197): Pfam Name: dUTPase Pfam Description: dUTPase
  misc_feature (62)..(197): Homolog of NCBI NO: 1169437 NR Description: Deoxyuridine 5'-triphosphate nucleotidohydrolase
  misc_feature (65)..(198): Homolog of NCBI NO: 38047903 NR Description: similar to Drosophila melanogaster BcDNA:LD08534
  misc_feature (65)..(198): Homolog of NCBI NO: 24583610 NR Description: CG4584-PB [Drosophila melanogaster]
  misc_feature (65)..(198): Homolog of NCBI NO: 19921126 NR Description: CG4584-PA [Drosophila melanogaster]
  misc_feature (55)..(197): Homolog of NCBI NO: 40746988 NR Description: hypothetical protein AN0271.2 [Aspergillus
  misc_feature (61)..(198): Homolog of NCBI NO: 19114785 NR Description: deoxyuridine 5'-triphosphate nucleotidohydrolase
  misc_feature (54)..(198): Homolog of NCBI NO: 38566986 NR Description: probable dUTP pyrophosphatase [Neurospora crassa]
  misc_feature (52)..(198): Homolog of NCBI NO: 31126720 NR Description: putative deoxyuridine triphosphatase
  misc_feature (36)..(198): Homolog of NCBI NO: 416922 NR Description: Deoxyuridine 5'-triphosphate nucleotidohydrolase
  misc_feature (33)..(198): Homolog of NCBI NO: 15232681 NR Description: dUTP pyrophosphatase-like protein

SEQ ID NO: 34194 - protein, 166 aa, Arabidopsis thaliana; identical to SEQ ID NO: 30604
  peptide (1)..(166): Ceres Seq. ID no. 12562492
  misc_feature (36)..(165): Pfam Name: dUTPase Pfam Description: dUTPase
  misc_feature (30)..(165): Homolog of NCBI NO: 1169437 NR Description: Deoxyuridine 5'-triphosphate nucleotidohydrolase
  misc_feature (33)..(166): Homolog of NCBI NO: 38047903 NR Description: similar to Drosophila melanogaster BcDNA:LD08534
  misc_feature (33)..(166): Homolog of NCBI NO: 24583610 NR Description: CG4584-PB [Drosophila melanogaster]
  misc_feature (33)..(166): Homolog of NCBI NO: 19921126 NR Description: CG4584-PA [Drosophila melanogaster]
  misc_feature (23)..(165): Homolog of NCBI NO: 40746988 NR Description: hypothetical protein AN0271.2 [Aspergillus
  misc_feature (29)..(166): Homolog of NCBI NO: 19114785 NR Description: deoxyuridine 5'-triphosphate nucleotidohydrolase
  misc_feature (22)..(166): Homolog of NCBI NO: 38566986 NR Description: probable dUTP pyrophosphatase [Neurospora crassa]
  misc_feature (20)..(166): Homolog of NCBI NO: 31126720 NR Description: putative deoxyuridine triphosphatase
  misc_feature (4)..(166): Homolog of NCBI NO: 416922 NR Description: Deoxyuridine 5'-triphosphate nucleotidohydrolase
  misc_feature (1)..(166): Homolog of NCBI NO: 15232681 NR Description: dUTP pyrophosphatase-like protein

SEQ ID NO: 34195 - DNA, 1086 bp, Arabidopsis thaliana; identical to SEQ ID NO: 30605
  misc_feature (1)..(1086): Ceres Seq. ID no. 12333091
  misc_feature: MA Experiment ID: 108434 Result: Up-regulated in Transcription
  misc_feature: MA Experiment 108434 PARAMETER Experiment Name: At_Root_Tips_cDNA_P Parameter: Tissue Value: Root Tips
  misc_feature: MA Experiment ID: 108461 Result: Up-regulated in Transcription
  misc_feature: MA Experiment 108461 PARAMETER Experiment Name: At_Germinating_Seeds_cDNA_P Parameter: Age (day) Value: 1 vs. 0
  misc_feature: MA Experiment 108461 PARAMETER Experiment Name: At_Germinating_Seeds_cDNA_P Parameter: Tissue Value: Germinating Seeds
  misc_feature: MA Experiment ID: 108489 Result: Down-regulated in Transcription
  misc_feature: MA Experiment ID: 20000179 Result: Up-regulated in Transcription
  misc_feature: MA Experiment 20000179 PARAMETER Experiment Name: At_Germinating_Seeds_P Parameter: Age (hr) Value: 6 vs. 0
  misc_feature: MA Experiment 20000179 PARAMETER Experiment Name: At_Germinating_Seeds_P Parameter: Tissue Value: Germinating Seeds
  misc_feature: MA Experiment ID: 20000180 Result: Up-regulated in Transcription
  misc_feature: MA Experiment 20000180 PARAMETER Experiment Name: At_Germinating_Seeds_P Parameter: Age (hr) Value: 24 vs. 0
  misc_feature: MA Experiment 20000180 PARAMETER Experiment Name: At_Germinating_Seeds_P Parameter: Tissue Value: Germinating Seeds
  misc_feature: MA Experiment ID: 20000184 Result: Down-regulated in Transcription
  misc_feature: MA Experiment 20000184 PARAMETER Experiment Name: At_Shoots__P Parameter: Age (day) Value: 7
  misc_feature: MA Experiment 20000184 PARAMETER Experiment Name: At_Shoots__P Parameter: Tissue Value: Shoots vs. Whole Plant
  misc_feature: MA Experiment ID: 20000227 Result: Up-regulated in Transcription
  misc_feature: MA Experiment 20000227 PARAMETER Experiment Name: At_Root-Tips-vs-Tops_P Parameter: Tissue Value: Root Tips vs. Root Tops
  misc_feature: MA Experiment ID: 20000495 Result: Up-regulated in Transcription
  misc_feature: MA Experiment 20000495 PARAMETER Experiment Name: At_Guard_Cells_P Parameter: Harvest Date Value: 8/2/2002
  misc_feature: MA Experiment 20000495 PARAMETER Experiment Name: At_Guard_Cells_P Parameter: Organism Value: A. thaliana
  misc_feature: MA Experiment 20000495 PARAMETER Experiment Name: At_Guard_Cells_P Parameter: Tissue Value: Guard Cells vs. Leaves
  misc_feature: MA Experiment ID: 20000709 Result: Down-regulated in Transcription
  misc_feature: MA Experiment 20000709 PARAMETER Experiment Name: At_15mM_NH4NO3_L-to-H_P Parameter: Age (hr) Value: 14
  misc_feature: MA Experiment 20000709 PARAMETER Experiment Name: At_15mM_NH4NO3_L-to-H_P Parameter: Organism Value: A. thaliana
  misc_feature: MA Experiment 20000709 PARAMETER Experiment Name: At_15mM_NH4NO3_L-to-H_P Parameter: Plant Line Value: WS
  misc_feature: MA Experiment 20000709 PARAMETER Experiment Name: At_15mM_NH4NO3_L-to-H_P Parameter: Timepoint (hr) Value: 4
  misc_feature: MA Experiment 20000709 PARAMETER Experiment Name: At_15mM_NH4NO3_L-to-H_P Parameter: Tissue Value: Aerial
  misc_feature: MA Experiment 20000709 PARAMETER Experiment Name: At_15mM_NH4NO3_L-to-H_P Parameter: Treatment Value: 15mM NH4NO3 vs. 30mM Mannitol
  misc_feature: MA Experiment ID: 20001557 Result: Down-regulated in Transcription
  misc_feature: MA Experiment 20001557 PARAMETER Experiment Name: At_Drought_Soil_Dry_P Parameter: Age (day) Value: 27
  misc_feature: MA Experiment 20001557 PARAMETER Experiment Name: At_Drought_Soil_Dry_P Parameter: Organism Value: A. thaliana
  misc_feature: MA Experiment 20001557 PARAMETER Experiment Name: At_Drought_Soil_Dry_P Parameter: Plant Line Value: WS
  misc_feature: MA Experiment 20001557 PARAMETER Experiment Name: At_Drought_Soil_Dry_P Parameter: Post Timepoint (hr) Value: 3
  misc_feature: MA Experiment 20001557 PARAMETER Experiment Name: At_Drought_Soil_Dry_P Parameter: Post-Treatment Value: Re-Water vs. No Drought
  misc_feature: MA Experiment 20001557 PARAMETER Experiment Name: At_Drought_Soil_Dry_P Parameter: Timepoint (day) Value: 13
  misc_feature: MA Experiment 20001557 PARAMETER Experiment Name: At_Drought_Soil_Dry_P Parameter: Treatment Value: Drought vs. No Drought
  misc_feature: MA Experiment ID: 20001558 Result: Down-regulated in Transcription
  misc_feature: MA Experiment 20001558 PARAMETER Experiment Name: At_Drought_Soil_Dry_P Parameter: Age (day) Value: 27
  misc_feature: MA Experiment 20001558 PARAMETER Experiment Name: At_Drought_Soil_Dry_P Parameter: Organism Value: A. thaliana
  misc_feature: MA Experiment 20001558 PARAMETER Experiment Name: At_Drought_Soil_Dry_P Parameter: Plant Line Value: WS
  misc_feature: MA Experiment 20001558 PARAMETER Experiment Name: At_Drought_Soil_Dry_P Parameter: Post Timepoint (hr) Value: 6
  misc_feature: MA Experiment 20001558 PARAMETER Experiment Name: At_Drought_Soil_Dry_P Parameter: Post-Treatment Value: Re-Water vs. No Drought
  misc_feature: MA Experiment 20001558 PARAMETER Experiment Name: At_Drought_Soil_Dry_P Parameter: Timepoint (day) Value: 13
  misc_feature: MA Experiment 20001558 PARAMETER Experiment Name: At_Drought_Soil_Dry_P Parameter: Treatment Value: Drought vs. No Drought
  misc_feature: MA Experiment ID: 20001905 Result: Down-regulated in Transcription
  misc_feature: MA Experiment 20001905 PARAMETER Experiment Name: At_Drought_Reproduction_P Parameter: Age (day) Value: 40
  misc_feature: MA Experiment 20001905 PARAMETER Experiment Name: At_Drought_Reproduction_P Parameter: Organism Value: A. thaliana
  misc_feature: MA Experiment 20001905 PARAMETER Experiment Name: At_Drought_Reproduction_P Parameter: Plant Line Value: WS
  misc_feature: MA Experiment 20001905 PARAMETER Experiment Name: At_Drought_Reproduction_P Parameter: Timepoint (day) Value: 10
  misc_feature: MA Experiment 20001905 PARAMETER Experiment Name: At_Drought_Reproduction_P Parameter: Tissue Value: Rosettes
  misc_feature: MA Experiment 20001905 PARAMETER Experiment Name: At_Drought_Reproduction_P Parameter: Treatment Value: Drought vs. No Drought

SEQ ID NO: 34196 - protein, 275 aa, Arabidopsis thaliana; identical to SEQ ID NO: 30606
  peptide (1)..(275): Ceres Seq. ID no. 12333092
  misc_feature (63)..(199): Pfam Name: HypB/UreG nucleotide-binding domain Pfam Description: HypB/UreG nucleotide-binding domain
  misc_feature (4)..(275): Homolog of NCBI NO: 13161904 NR Description: urease accessory protein G [Solanum tuberosum]
  misc_feature (1)..(275): Homolog of NCBI NO: 13161908 NR Description: urease accessory protein G [Solanum tuberosum]
  misc_feature (1)..(275): Homolog of NCBI NO: 13161910 NR Description: urease accessory protein G [Solanum tuberosum]
  misc_feature (1)..(275): Homolog of NCBI NO: 13161906 NR Description: urease accessory protein G [Solanum tuberosum]
  misc_feature (4)..(275): Homolog of NCBI NO: 13161912 NR Description: urease accessory protein G [Solanum tuberosum]
  misc_feature (1)..(275): Homolog of NCBI NO: 25313831 NR Description: urease accessory protein UREG [imported] -
  misc_feature (1)..(275): Homolog of NCBI NO: 15226754 NR Description: putative urease accessory protein

SEQ ID NO: 34197 - protein, 186 aa, Arabidopsis thaliana; identical to SEQ ID NO: 30607
  peptide (1)..(186): Ceres Seq. ID no. 12333093
  misc_feature (1)..(110): Pfam Name: HypB/UreG nucleotide-binding domain Pfam Description: HypB/UreG nucleotide-binding domain
  misc_feature (1)..(186): Homolog of NCBI NO: 13161904 NR Description: urease accessory protein G [Solanum tuberosum]
  misc_feature (1)..(186): Homolog of NCBI NO: 13161908 NR Description: urease accessory protein G [Solanum tuberosum]
  misc_feature (1)..(186): Homolog of NCBI NO: 13161910 NR Description: urease accessory protein G [Solanum tuberosum]
  misc_feature (1)..(186): Homolog of NCBI NO: 13161906 NR Description: urease accessory protein G [Solanum tuberosum]
  misc_feature (1)..(186): Homolog of NCBI NO: 13161912 NR Description: urease accessory protein G [Solanum tuberosum]
  misc_feature (1)..(186): Homolog of NCBI NO: 25313831 NR Description: urease accessory protein UREG [imported] -
  misc_feature (1)..(186): Homolog of NCBI NO: 15226754 NR Description: putative urease accessory protein

SEQ ID NO: 34198 - DNA, 657 bp, Arabidopsis thaliana; identical to SEQ ID NO: 30608
  misc_feature (1)..(657): Ceres Seq. ID no. 13504784
  misc_feature: MA Experiment ID: 20000173 Result: Down-regulated in Transcription
  misc_feature: MA Experiment 20000173 PARAMETER Experiment Name: At_42deg_Heat_P Parameter: Age (day) Value: 14
  misc_feature: MA Experiment 20000173 PARAMETER Experiment Name: At_42deg_Heat_P Parameter: Organism Value: A. thaliana
  misc_feature: MA Experiment 20000173 PARAMETER Experiment Name: At_42deg_Heat_P Parameter: Plant Line Value: WS
  misc_feature: MA Experiment 20000173 PARAMETER Experiment Name: At_42deg_Heat_P Parameter: Temperature (deg C) Value: 42 vs. 22
  misc_feature: MA Experiment 20000173 PARAMETER Experiment Name: At_42deg_Heat_P Parameter: Timepoint (hr) Value: 6
  misc_feature: MA Experiment 20000173 PARAMETER Experiment Name: At_42deg_Heat_P Parameter: Tissue Value: Aerial
  misc_feature: MA Experiment ID: 20000184 Result: Up-regulated in Transcription
  misc_feature: MA Experiment 20000184 PARAMETER Experiment Name: At_Shoots__P Parameter: Age (day) Value: 7
  misc_feature: MA Experiment 20000184 PARAMETER Experiment Name: At_Shoots__P Parameter: Tissue Value: Shoots vs. Whole Plant
  misc_feature: MA Experiment ID: 20000227 Result: Down-regulated in Transcription
  misc_feature: MA Experiment 20000227 PARAMETER Experiment Name: At_Root-Tips-vs-Tops_P Parameter: Tissue Value: Root Tips vs. Root Tops
  misc_feature: MA Experiment ID: 20000234 Result: Up-regulated in Transcription
  misc_feature: MA Experiment 20000234 PARAMETER Experiment Name: At_Siliques_P Parameter: Age (day) Value: 21
  misc_feature: MA Experiment 20000234 PARAMETER Experiment Name: At_Siliques_P Parameter: Organism Value: A. thaliana
  misc_feature: MA Experiment 20000234 PARAMETER Experiment Name: At_Siliques_P Parameter: Plant Line Value: WS
  misc_feature: MA Experiment 20000234 PARAMETER Experiment Name: At_Siliques_P Parameter: Tissue Value: Less Than 5mm Siliques vs. Whole Plant
  misc_feature: MA Experiment ID: 20000436 Result: Down-regulated in Transcription
  misc_feature: MA Experiment 20000436 PARAMETER Experiment Name: At_Drought_P Parameter: Age (day) Value: 7
  misc_feature: MA Experiment 20000436 PARAMETER Experiment Name: At_Drought_P Parameter: Organism Value: A. thaliana
  misc_feature: MA Experiment 20000436 PARAMETER Experiment Name: At_Drought_P Parameter: Plant Line Value: WS
  misc_feature: MA Experiment 20000436 PARAMETER Experiment Name: At_Drought_P Parameter: Timepoint (hr) Value: 12
  misc_feature: MA Experiment 20000436 PARAMETER Experiment Name: At_Drought_P Parameter: Tissue Value: Whole Plant
  misc_feature: MA Experiment 20000436 PARAMETER Experiment Name: At_Drought_P Parameter: Treatment Value: Drought vs. No Drought
  misc_feature: MA Experiment ID: 20000437 Result: Down-regulated in Transcription
  misc_feature: MA Experiment 20000437 PARAMETER Experiment Name: At_Drought_P Parameter: Age (day) Value: 8
  misc_feature: MA Experiment 20000437 PARAMETER Experiment Name: At_Drought_P Parameter: Organism Value: A. thaliana
  misc_feature: MA Experiment 20000437 PARAMETER Experiment Name: At_Drought_P Parameter: Plant Line Value: WS
  misc_feature: MA Experiment 20000437 PARAMETER Experiment Name: At_Drought_P Parameter: Timepoint (hr) Value: 24
  misc_feature: MA Experiment 20000437 PARAMETER Experiment Name: At_Drought_P Parameter: Tissue Value: Whole Plant
  misc_feature: MA Experiment 20000437 PARAMETER Experiment Name: At_Drought_P Parameter: Treatment Value: Drought vs. No Drought
  misc_feature: MA Experiment ID: 20000495 Result: Up-regulated in Transcription
  misc_feature: MA Experiment 20000495 PARAMETER Experiment Name: At_Guard_Cells_P Parameter: Harvest Date Value: 8/2/2002
  misc_feature: MA Experiment 20000495 PARAMETER Experiment Name: At_Guard_Cells_P Parameter: Organism Value: A. thaliana
  misc_feature: MA Experiment 20000495 PARAMETER Experiment Name: At_Guard_Cells_P Parameter: Tissue Value: Guard Cells vs. Leaves
  misc_feature: MA Experiment ID: 20000794 Result: Down-regulated in Transcription
  misc_feature: MA Experiment 20000794 PARAMETER Experiment Name: At_Petals_P Parameter: Age (day) Value: 23-25 days
  misc_feature: MA Experiment 20000794 PARAMETER Experiment Name: At_Petals_P Parameter: Plant Line Value: WS
  misc_feature: MA Experiment 20000794 PARAMETER Experiment Name: At_Petals_P Parameter: Tissue Value: Petals vs. Whole plant
  misc_feature: MA Experiment ID: 20001450 Result: Down-regulated in Transcription
  misc_feature: MA Experiment 20001450 PARAMETER Experiment Name: At_Far-red-induction_P Parameter: Age (day) Value: 7
  misc_feature: MA Experiment 20001450 PARAMETER Experiment Name: At_Far-red-induction_P Parameter: Light Value: Far-red vs. White
  misc_feature: MA Experiment 20001450 PARAMETER Experiment Name: At_Far-red-induction_P Parameter: Organism Value: A. thaliana
  misc_feature: MA Experiment 20001450 PARAMETER Experiment Name: At_Far-red-induction_P Parameter: Plant Line Value: Columbia
  misc_feature: MA Experiment 20001450 PARAMETER Experiment Name: At_Far-red-induction_P Parameter: Timepoint (hr) Value: 8
  misc_feature: MA Experiment 20001450 PARAMETER Experiment Name: At_Far-red-induction_P Parameter: Tissue Value: Whole Plant
  misc_feature: MA Experiment ID: 20001911 Result: Down-regulated in Transcription
  misc_feature: MA Experiment 20001911 PARAMETER Experiment Name: At_Drought_Reproduction_P Parameter: Age (day) Value: 40
  misc_feature: MA Experiment 20001911 PARAMETER Experiment Name: At_Drought_Reproduction_P Parameter: Organism Value: A. thaliana
  misc_feature: MA Experiment 20001911 PARAMETER Experiment Name: At_Drought_Reproduction_P Parameter: Plant Line Value: WS
  misc_feature: MA Experiment 20001911 PARAMETER Experiment Name: At_Drought_Reproduction_P Parameter: Timepoint (day) Value: 10
  misc_feature: MA Experiment 20001911 PARAMETER Experiment Name: At_Drought_Reproduction_P Parameter: Tissue Value: Flowers
  misc_feature: MA Experiment 20001911 PARAMETER Experiment Name: At_Drought_Reproduction_P Parameter: Treatment Value: Drought vs. No Drought

SEQ ID NO: 34199 - protein, 218 aa, Arabidopsis thaliana; identical to SEQ ID NO: 30609
  peptide (1)..(218): Ceres Seq. ID no. 13504785
  misc_feature (38)..(196): Homolog of NCBI NO: 34907616 NR Description: contains EST C27797(C52876)~unknown protein
  misc_feature (49)..(216): Homolog of NCBI NO: 38345379 NR Description: OSJNBa0067K08.8 [Oryza sativa (japonica
  misc_feature (45)..(216): Homolog of NCBI NO: 18396262 NR Description: expressed protein [Arabidopsis thaliana]
  misc_feature (38)..(216): Homolog of NCBI NO: 21703131 NR Description: AT5g16250/T21H19_170 [Arabidopsis thaliana]
  misc_feature (38)..(216): Homolog of NCBI NO: 21553926 NR Description: unknown [Arabidopsis thaliana]
  misc_feature (38)..(216): Homolog of NCBI NO: 15237310 NR Description: expressed protein [Arabidopsis thaliana]
  misc_feature (36)..(218): Homolog of NCBI NO: 15239407 NR Description: hypothetical protein [Arabidopsis thaliana]
  misc_feature (1)..(218): Homolog of NCBI NO: 15239379 NR Description: expressed protein [Arabidopsis thaliana]

SEQ ID NO: 34200 - protein, 183 aa, Arabidopsis thaliana; identical to SEQ ID NO: 30610
  peptide (1)..(183): Ceres Seq. ID no. 13504786
  misc_feature (3)..(161): Homolog of NCBI NO: 34907616 NR Description: contains EST C27797(C52876)~unknown protein
  misc_feature (14)..(181): Homolog of NCBI NO: 38345379 NR Description: OSJNBa0067K08.8 [Oryza sativa (japonica
  misc_feature (10)..(181): Homolog of NCBI NO: 18396262 NR Description: expressed protein [Arabidopsis thaliana]
  misc_feature (3)..(181): Homolog of NCBI NO: 21703131 NR Description: AT5g16250/T21H19_170 [Arabidopsis thaliana]
  misc_feature (3)..(181): Homolog of NCBI NO: 21553926 NR Description: unknown [Arabidopsis thaliana]
  misc_feature (3)..(181): Homolog of NCBI NO: 15237310 NR Description: expressed protein [Arabidopsis thaliana]
  misc_feature (1)..(183): Homolog of NCBI NO: 15239407 NR Description: hypothetical protein [Arabidopsis thaliana]
  misc_feature (1)..(183): Homolog of NCBI NO: 15239379 NR Description: expressed protein [Arabidopsis thaliana]

SEQ ID NO: 34201 - protein, 181 aa, Arabidopsis thaliana; identical to SEQ ID NO: 30611
  peptide (1)..(181): Ceres Seq. ID no. 13504787
  misc_feature (1)..(159): Homolog of NCBI NO: 34907616 NR Description: contains EST C27797(C52876)~unknown protein
  misc_feature (12)..(179): Homolog of NCBI NO: 38345379 NR Description: OSJNBa0067K08.8 [Oryza sativa (japonica
  misc_feature (8)..(179): Homolog of NCBI NO: 18396262 NR Description: expressed protein [Arabidopsis thaliana]
  misc_feature (1)..(179): Homolog of NCBI NO: 21703131 NR Description: AT5g16250/T21H19_170 [Arabidopsis thaliana]
  misc_feature (1)..(179): Homolog of NCBI NO: 21553926 NR Description: unknown [Arabidopsis thaliana]
  misc_feature (1)..(179): Homolog of NCBI NO: 15237310 NR Description: expressed protein [Arabidopsis thaliana]
  misc_feature (1)..(181): Homolog of NCBI NO: 15239407 NR Description: hypothetical protein [Arabidopsis thaliana]
  misc_feature (1)..(181): Homolog of NCBI NO: 15239379 NR Description: expressed protein [Arabidopsis thaliana]

SEQ ID NO: 34202 - DNA, 821 bp, Arabidopsis thaliana; identical to SEQ ID NO: 30612
  misc_feature (1)..(821): Ceres Seq. ID no. 12333094
  misc_feature: MA Experiment ID: 108462 Result: Up-regulated in Transcription
  misc_feature: MA Experiment 108462 PARAMETER Experiment Name: At_Germinating_Seeds_cDNA_P Parameter: Age (day) Value: 2 vs. 0
  misc_feature: MA Experiment 108462 PARAMETER Experiment Name: At_Germinating_Seeds_cDNA_P Parameter: Tissue Value: Germinating Seeds
  misc_feature: MA Experiment ID: 108463 Result: Up-regulated in Transcription
  misc_feature: MA Experiment 108463 PARAMETER Experiment Name: At_Germinating_Seeds_cDNA_P Parameter: Age (day) Value: 3 vs. 0
  misc_feature: MA Experiment 108463 PARAMETER Experiment Name: At_Germinating_Seeds_cDNA_P Parameter: Tissue Value: Germinating Seeds
  misc_feature: MA Experiment ID: 108469 Result: Up-regulated in Transcription
  misc_feature: MA Experiment ID: 108576 Result: Up-regulated in Transcription
  misc_feature: MA Experiment 108576 PARAMETER Experiment Name: At_42deg_Heat_cDNA_P Parameter: Temperature (deg C) Value: 42 vs. 22
  misc_feature: MA Experiment 108576 PARAMETER Experiment Name: At_42deg_Heat_cDNA_P Parameter: Timepoint (hr) Value: 1
  misc_feature: MA Experiment 108576 PARAMETER Experiment Name: At_42deg_Heat_cDNA_P Parameter: Tissue Value: Aerial
  misc_feature: MA Experiment ID: 108668 Result: Up-regulated in Transcription
  misc_feature: MA Experiment 108668 PARAMETER Experiment Name: At_2mM_SA_cDNA_P Parameter: Plant Line Value: WS
  misc_feature: MA Experiment 108668 PARAMETER Experiment Name: At_2mM_SA_cDNA_P Parameter: Timepoint (hr) Value: 6
  misc_feature: MA Experiment 108668 PARAMETER Experiment Name: At_2mM_SA_cDNA_P Parameter: Treatment Value: 2mM SA vs. No Treatment
  misc_feature: MA Experiment ID: 20000072 Result: Up-regulated in Transcription
  misc_feature: MA Experiment 20000072 PARAMETER Experiment Name: At_100uM_ABA_Mutants_cDNA_P Parameter: Plant Line Value: CS8105
  misc_feature: MA Experiment 20000072 PARAMETER Experiment Name: At_100uM_ABA_Mutants_cDNA_P Parameter: Timepoint (hr) Value: 6
  misc_feature: MA Experiment 20000072 PARAMETER Experiment Name: At_100uM_ABA_Mutants_cDNA_P Parameter: Tissue Value: Aerial
  misc_feature: MA Experiment 20000072 PARAMETER Experiment Name: At_100uM_ABA_Mutants_cDNA_P Parameter: Treatment Value: 100uM ABA vs. No Treatment
  misc_feature: MA Experiment ID: 20000093 Result: Up-regulated in Transcription
  misc_feature: MA Experiment 20000093 PARAMETER Experiment Name: At_42deg_Heat_cDNA_P Parameter: Temperature (deg C) Value: 42 vs. 22
  misc_feature: MA Experiment 20000093 PARAMETER Experiment Name: At_42deg_Heat_cDNA_P Parameter: Timepoint (hr) Value: 0.5
  misc_feature: MA Experiment 20000093 PARAMETER Experiment Name: At_42deg_Heat_cDNA_P Parameter: Tissue Value: Aerial
  misc_feature: MA Experiment ID: 20000111 Result: Up-regulated in Transcription
  misc_feature: MA Experiment 20000111 PARAMETER Experiment Name: At_42deg_Heat_cDNA_P Parameter: Temperature (deg C) Value: 42 vs. 22
  misc_feature: MA Experiment 20000111 PARAMETER Experiment Name: At_42deg_Heat_cDNA_P Parameter: Timepoint (hr) Value: 6
  misc_feature: MA Experiment 20000111 PARAMETER Experiment Name: At_42deg_Heat_cDNA_P Parameter: Tissue Value: Aerial
  misc_feature: MA Experiment ID: 20000113 Result: Up-regulated in Transcription
  misc_feature: MA Experiment 20000113 PARAMETER Experiment Name: At_42deg_Heat_cDNA_P Parameter: Temperature (deg C) Value: 42 vs. 22
  misc_feature: MA Experiment 20000113 PARAMETER Experiment Name: At_42deg_Heat_cDNA_P Parameter: Timepoint (hr) Value: 8
  misc_feature: MA Experiment 20000113 PARAMETER Experiment Name: At_42deg_Heat_cDNA_P Parameter: Tissue Value: Aerial
  misc_feature: MA Experiment ID: 20001248 Result: Down-regulated in Transcription
  misc_feature: MA Experiment 20001248 PARAMETER Experiment Name: At_Far-red-induction_P Parameter: Age (day) Value: 7
  misc_feature: MA Experiment 20001248 PARAMETER Experiment Name: At_Far-red-induction_P Parameter: Light Value: Far-red vs. White
  misc_feature: MA Experiment 20001248 PARAMETER Experiment Name: At_Far-red-induction_P Parameter: Organism Value: A. thaliana
  misc_feature: MA Experiment 20001248 PARAMETER Experiment Name: At_Far-red-induction_P Parameter: Plant Line Value: Columbia
  misc_feature: MA Experiment 20001248 PARAMETER Experiment Name: At_Far-red-induction_P Parameter: Timepoint (hr) Value: 4
  misc_feature: MA Experiment 20001248 PARAMETER Experiment Name: At_Far-red-induction_P Parameter: Tissue Value: Whole Plant

SEQ ID NO: 34203 - protein, 225 aa, Arabidopsis thaliana; identical to SEQ ID NO: 30613
  peptide (1)..(225): Ceres Seq. ID no. 12333095
  misc_feature (6)..(219): Homolog of NCBI NO: 21592644 NR Description: glutathione transferase, putative [Arabidopsis
  misc_feature (6)..(219): Homolog of NCBI NO: 18411929 NR Description: glutathione transferase, putative
  misc_feature (6)..(225): Homolog of NCBI NO: 15220040 NR Description: glutathione transferase, putative; protein id:
  misc_feature (6)..(225): Homolog of NCBI NO: 15220041 NR Description: glutathione transferase, putative; protein id:
  misc_feature (6)..(225): Homolog of NCBI NO: 15218301 NR Description: glutathione transferase, putative

SEQ ID NO: 34204 - protein, 220 aa, Arabidopsis thaliana; identical to SEQ ID NO: 30614
  peptide (1)..(220): Ceres Seq. ID no. 12333096
  misc_feature (1)..(214): Homolog of NCBI NO: 21592644 NR Description: glutathione transferase, putative [Arabidopsis
  misc_feature (1)..(214): Homolog of NCBI NO: 18411929 NR Description: glutathione transferase, putative
  misc_feature (1)..(220): Homolog of NCBI NO: 15220040 NR Description: glutathione transferase, putative; protein id:
  misc_feature (1)..(220): Homolog of NCBI NO: 15220041 NR Description: glutathione transferase, putative; protein id:
  misc_feature (1)..(220): Homolog of NCBI NO: 15218301 NR Description: glutathione transferase, putative

SEQ ID NO: 34205 - protein, 207 aa, Arabidopsis thaliana; identical to SEQ ID NO: 30615
  peptide (1)..(207): Ceres Seq. ID no. 12333097
  misc_feature (1)..(201): Homolog of NCBI NO: 21592644 NR Description: glutathione transferase, putative [Arabidopsis
  misc_feature (1)..(201): Homolog of NCBI NO: 18411929 NR Description: glutathione transferase, putative
  misc_feature (1)..(207): Homolog of NCBI NO: 15220040 NR Description: glutathione transferase, putative; protein id:
  misc_feature (1)..(207): Homolog of NCBI NO: 15220041 NR Description: glutathione transferase, putative; protein id:
  misc_feature (1)..(207): Homolog of NCBI NO: 15218301 NR Description: glutathione transferase, putative

SEQ ID NO: 34206 - DNA, 2185 bp, Arabidopsis thaliana; identical to SEQ ID NO: 30616
  misc_feature (1)..(2185): Ceres Seq. ID no. 13591907
  misc_feature: MA Experiment ID: 108434 Result: Up-regulated in Transcription
  misc_feature: MA Experiment 108434 PARAMETER Experiment Name: At_Root_Tips_cDNA_P Parameter: Tissue Value: Root Tips

SEQ ID NO: 34207 - protein, 446 aa, Arabidopsis thaliana; identical to SEQ ID NO: 30617
  peptide (1)..(446): Ceres Seq. ID no. 13591908
  misc_feature (68)..(311): Pfam Name: PET112 family, N terminal region Pfam Description: PET112 family, N terminal region
  misc_feature (68)..(311): Pfam Name: PET112 family, N terminal region Pfam Description: PET112 family, N terminal region
  misc_feature (69)..(446): Homolog of NCBI NO: 33239504 NR Description: Asp-tRNAAsn/Glu-tRNAGln amidotransferase B
  misc_feature (6)..(214): Homolog of NCBI NO: 8778692 NR Description: T1N15.14 [Arabidopsis thaliana]
  misc_feature (139)..(438): Homolog of NCBI NO: 8778692 NR Description: T1N15.14 [Arabidopsis thaliana]
  misc_feature (69)..(438): Homolog of NCBI NO: 24418853 NR Description: Aspartyl/glutamyl-tRNA(Asn/Gln) amidotransferase
  misc_feature (69)..(438): Homolog of NCBI NO: 16330901 NR Description: PET112 protein [Synechocystis sp. PCC 6803]
  misc_feature (69)..(446): Homolog of NCBI NO: 33239504 NR Description: Asp-tRNAAsn/Glu-tRNAGln amidotransferase B
  misc_feature (139)..(438): Homolog of NCBI NO: 8778692 NR Description: T1N15.14 [Arabidopsis thaliana]
  misc_feature (69)..(438): Homolog of NCBI NO: 16330901 NR Description: PET112 protein [Synechocystis sp. PCC 6803]
  misc_feature (1)..(438): Homolog of NCBI NO: 18402234 NR Description: Glu-tRNA(Gln) amidotransferase subunit B
  misc_feature (69)..(446): Homolog of NCBI NO: 23123952 NR Description: hypothetical protein [Nostoc punctiforme]
  misc_feature (70)..(438): Homolog of NCBI NO: 23042361 NR Description: hypothetical protein [Trichodesmium erythraeum
  misc_feature (70)..(446): Homolog of NCBI NO: 22299937 NR Description: Glu-tRNA(Gln) amidotransferase subunit B
  misc_feature (69)..(446): Homolog of NCBI NO: 17228891 NR Description: glutamyl-tRNA (Gln) amidotransferase subunit B
  misc_feature (69)..(438): Homolog of NCBI NO: 24418853 NR Description: Aspartyl/glutamyl-tRNA(Asn/Gln) amidotransferase
  misc_feature (6)..(214): Homolog of NCBI NO: 8778692 NR Description: T1N15.14 [Arabidopsis thaliana]
  misc_feature (69)..(446): Homolog of NCBI NO: 17228891 NR Description: glutamyl-tRNA (Gln) amidotransferase subunit B
  misc_feature (70)..(446): Homolog of NCBI NO: 22299937 NR Description: Glu-tRNA(Gln) amidotransferase subunit B
  misc_feature (70)..(438): Homolog of NCBI NO: 23042361 NR Description: hypothetical protein [Trichodesmium erythraeum
  misc_feature (69)..(446): Homolog of NCBI NO: 23123952 NR Description: hypothetical protein [Nostoc punctiforme]
  misc_feature (1)..(438): Homolog of NCBI NO: 18402234 NR Description: Glu-tRNA(Gln) amidotransferase subunit B

SEQ ID NO: 34208 - protein, 338 aa, Arabidopsis thaliana; identical to SEQ ID NO: 30618
  peptide (1)..(338): Ceres Seq. ID no. 13591909
  misc_feature (1)..(203): Pfam Name: PET112 family, N terminal region Pfam Description: PET112 family, N terminal region
  misc_feature (1)..(203): Pfam Name: PET112 family, N terminal region Pfam Description: PET112 family, N terminal region
  misc_feature (1)..(338): Homolog of NCBI NO: 33239504 NR Description: Asp-tRNAAsn/Glu-tRNAGln amidotransferase B
  misc_feature (1)..(106): Homolog of NCBI NO: 8778692 NR Description: T1N15.14 [Arabidopsis thaliana]
  misc_feature (31)..(330): Homolog of NCBI NO: 8778692 NR Description: T1N15.14 [Arabidopsis thaliana]
  misc_feature (1)..(330): Homolog of NCBI NO: 24418853 NR Description: Aspartyl/glutamyl-tRNA(Asn/Gln) amidotransferase
  misc_feature (1)..(330): Homolog of NCBI NO: 16330901 NR Description: PET112 protein [Synechocystis sp. PCC 6803]
  misc_feature (1)..(338): Homolog of NCBI NO: 33239504 NR Description: Asp-tRNAAsn/Glu-tRNAGln amidotransferase B
  misc_feature (31)..(330): Homolog of NCBI NO: 8778692 NR Description: T1N15.14 [Arabidopsis thaliana]
  misc_feature (1)..(330): Homolog of NCBI NO: 16330901 NR Description: PET112 protein [Synechocystis sp. PCC 6803]
  misc_feature (1)..(330): Homolog of NCBI NO: 18402234 NR Description: Glu-tRNA(Gln) amidotransferase subunit B
  misc_feature (1)..(338): Homolog of NCBI NO: 23123952 NR Description: hypothetical protein [Nostoc punctiforme]
  misc_feature (1)..(330): Homolog of NCBI NO: 23042361 NR Description: hypothetical protein [Trichodesmium erythraeum
  misc_feature (1)..(338): Homolog of NCBI NO: 22299937 NR Description: Glu-tRNA(Gln) amidotransferase subunit B
  misc_feature (1)..(338): Homolog of NCBI NO: 17228891 NR Description: glutamyl-tRNA (Gln) amidotransferase subunit B
  misc_feature (1)..(330): Homolog of NCBI NO: 24418853 NR Description: Aspartyl/glutamyl-tRNA(Asn/Gln) amidotransferase
  misc_feature (1)..(106): Homolog of NCBI NO: 8778692 NR Description: T1N15.14 [Arabidopsis thaliana]
  misc_feature (1)..(338): Homolog of NCBI NO: 17228891 NR Description: glutamyl-tRNA (Gln) amidotransferase subunit B
  misc_feature (1)..(338): Homolog of NCBI NO: 22299937 NR Description: Glu-tRNA(Gln) amidotransferase subunit B
  misc_feature (1)..(330): Homolog of NCBI NO: 23042361 NR Description: hypothetical protein [Trichodesmium erythraeum
  misc_feature (1)..(338): Homolog of NCBI NO: 23123952 NR Description: hypothetical protein [Nostoc punctiforme]
  misc_feature (1)..(330): Homolog of NCBI NO: 18402234 NR Description: Glu-tRNA(Gln) amidotransferase subunit B

SEQ ID NO: 34209 - protein, 253 aa, Arabidopsis thaliana; identical to SEQ ID NO: 30619
  peptide (1)..(253): Ceres Seq. ID no. 13591910
  misc_feature (1)..(118): Pfam Name: PET112 family, N terminal region Pfam Description: PET112 family, N terminal region
  misc_feature (1)..(118): Pfam Name: PET112 family, N terminal region Pfam Description: PET112 family, N terminal region
  misc_feature (1)..(253): Homolog of NCBI NO: 33239504 NR Description: Asp-tRNAAsn/Glu-tRNAGln amidotransferase B
  misc_feature (1)..(21): Homolog of NCBI NO: 8778692 NR Description: T1N15.14 [Arabidopsis thaliana]
  misc_feature (1)..(245): Homolog of NCBI NO: 8778692 NR Description: T1N15.14 [Arabidopsis thaliana]
  misc_feature (1)..(245): Homolog of NCBI NO: 24418853 NR Description: Aspartyl/glutamyl-tRNA(Asn/Gln) amidotransferase
  misc_feature (1)..(245): Homolog of NCBI NO: 16330901 NR Description: PET112 protein [Synechocystis sp. PCC 6803]
  misc_feature (1)..(253): Homolog of NCBI NO: 33239504 NR Description: Asp-tRNAAsn/Glu-tRNAGln amidotransferase B
  misc_feature (1)..(245): Homolog of NCBI NO: 8778692 NR Description: T1N15.14 [Arabidopsis thaliana]
  misc_feature (1)..(245): Homolog of NCBI NO: 16330901 NR Description: PET112 protein [Synechocystis sp. PCC 6803]
  misc_feature (1)..(245): Homolog of NCBI NO: 18402234 NR Description: Glu-tRNA(Gln) amidotransferase subunit B
  misc_feature (1)..(253): Homolog of NCBI NO: 23123952 NR Description: hypothetical protein [Nostoc punctiforme]
  misc_feature (1)..(245): Homolog of NCBI NO: 23042361 NR Description: hypothetical protein [Trichodesmium erythraeum
  misc_feature (1)..(253): Homolog of NCBI NO: 22299937 NR Description: Glu-tRNA(Gln) amidotransferase subunit B
  misc_feature (1)..(253): Homolog of NCBI NO: 17228891 NR Description: glutamyl-tRNA (Gln) amidotransferase subunit B
  misc_feature (1)..(245): Homolog of NCBI NO: 24418853 NR Description: Aspartyl/glutamyl-tRNA(Asn/Gln) amidotransferase
  misc_feature (1)..(21): Homolog of NCBI NO: 8778692 NR Description: T1N15.14 [Arabidopsis thaliana]
  misc_feature (1)..(253): Homolog of NCBI NO: 17228891 NR Description: glutamyl-tRNA (Gln) amidotransferase subunit B
  misc_feature (1)..(253): Homolog of NCBI NO: 22299937 NR Description: Glu-tRNA(Gln) amidotransferase subunit B
  misc_feature (1)..(245): Homolog of NCBI NO: 23042361 NR Description: hypothetical protein [Trichodesmium erythraeum
  misc_feature (1)..(253): Homolog of NCBI NO: 23123952 NR Description: hypothetical protein [Nostoc punctiforme]
  misc_feature (1)..(245): Homolog of NCBI NO: 18402234 NR Description: Glu-tRNA(Gln) amidotransferase subunit B

SEQ ID NO: 34210 - DNA, 1056 bp, Arabidopsis thaliana; identical to SEQ ID NO: 30620
  misc_feature (1)..(1056): Ceres Seq. ID no. 12396833
  misc_feature: MA Experiment ID: 108434 Result: Up-regulated in Transcription
  misc_feature: MA Experiment 108434 PARAMETER Experiment Name: At_Root_Tips_cDNA_P Parameter: Tissue Value: Root Tips
  misc_feature: MA Experiment ID: 108462 Result: Up-regulated in Transcription
  misc_feature: MA Experiment 108462 PARAMETER Experiment Name: At_Germinating_Seeds_cDNA_P Parameter: Age (day) Value: 2 vs. 0
  misc_feature: MA Experiment 108462 PARAMETER Experiment Name: At_Germinating_Seeds_cDNA_P Parameter: Tissue Value: Germinating Seeds
  misc_feature: MA Experiment ID: 108463 Result: Up-regulated in Transcription
  misc_feature: MA Experiment 108463 PARAMETER Experiment Name: At_Germinating_Seeds_cDNA_P Parameter: Age (day) Value: 3 vs. 0
  misc_feature: MA Experiment 108463 PARAMETER Experiment Name: At_Germinating_Seeds_cDNA_P Parameter: Tissue Value: Germinating Seeds
  misc_feature: MA Experiment ID: 108464 Result: Up-regulated in Transcription
  misc_feature: MA Experiment 108464 PARAMETER Experiment Name: At_Germinating_Seeds_cDNA_P Parameter: Age (day) Value: 4 vs. 0
  misc_feature: MA Experiment 108464 PARAMETER Experiment Name: At_Germinating_Seeds_cDNA_P Parameter: Tissue Value: Germinating Seeds
  misc_feature: MA Experiment ID: 108561 Result: Up-regulated in Transcription
  misc_feature: MA Experiment 108561 PARAMETER Experiment Name: At_100uM_ABA_cDNA_P Parameter: Timepoint (hr) Value: 6
  misc_feature: MA Experiment 108561 PARAMETER Experiment Name: At_100uM_ABA_cDNA_P Parameter: Tissue Value: Aerial
  misc_feature: MA Experiment 108561 PARAMETER Experiment Name: At_100uM_ABA_cDNA_P Parameter: Treatment Value: 100uM ABA vs. No Treatment
  misc_feature: MA Experiment ID: 108572 Result: Up-regulated in Transcription
  misc_feature: MA Experiment 108572 PARAMETER Experiment Name: At_Drought_cDNA_P Parameter: Timepoint (hr) Value: 1
  misc_feature: MA Experiment 108572 PARAMETER Experiment Name: At_Drought_cDNA_P Parameter: Tissue Value: Aerial
  misc_feature: MA Experiment 108572 PARAMETER Experiment Name: At_Drought_cDNA_P Parameter: Treatment Value: Drought vs. No Drought
  misc_feature: MA Experiment ID: 108573 Result: Up-regulated in Transcription
  misc_feature: MA Experiment 108573 PARAMETER Experiment Name: At_Drought_cDNA_P Parameter: Timepoint (hr) Value: 6
  misc_feature: MA Experiment 108573 PARAMETER Experiment Name: At_Drought_cDNA_P Parameter: Tissue Value: Aerial
  misc_feature: MA Experiment 108573 PARAMETER Experiment Name: At_Drought_cDNA_P Parameter: Treatment Value: Drought vs. No Drought
  misc_feature: MA Experiment ID: 108605 Result: Up-regulated in Transcription
  misc_feature: MA Experiment 108605 PARAMETER Experiment Name: At_100uM_ABA_cDNA_P Parameter: Timepoint (hr) Value: 6
  misc_feature: MA Experiment 108605 PARAMETER Experiment Name: At_100uM_ABA_cDNA_P Parameter: Tissue Value: Aerial
  misc_feature: MA Experiment 108605 PARAMETER Experiment Name: At_100uM_ABA_cDNA_P Parameter: Treatment Value: 100uM ABA vs. No Treatment
  misc_feature: MA Experiment ID: 108607 Result: Up-regulated in Transcription
  misc_feature: MA Experiment 108607 PARAMETER Experiment Name: At_100uM_ABA_cDNA_P Parameter: Timepoint (hr) Value: 4
  misc_feature: MA Experiment 108607 PARAMETER Experiment Name: At_100uM_ABA_cDNA_P Parameter: Tissue Value: Aerial
  misc_feature: MA Experiment 108607 PARAMETER Experiment Name: At_100uM_ABA_cDNA_P Parameter: Treatment Value: 100uM ABA vs. No Treatment
  misc_feature: MA Experiment ID: 108608 Result: Up-regulated in Transcription
  misc_feature: MA Experiment 108608 PARAMETER Experiment Name: At_100uM_ABA_cDNA_P Parameter: Timepoint (hr) Value: 1
  misc_feature: MA Experiment 108608 PARAMETER Experiment Name: At_100uM_ABA_cDNA_P Parameter: Tissue Value: Aerial
  misc_feature: MA Experiment 108608 PARAMETER Experiment Name: At_100uM_ABA_cDNA_P Parameter: Treatment Value: 100uM ABA vs. No Treatment
  misc_feature: MA Experiment ID: 108609 Result: Up-regulated in Transcription
  misc_feature: MA Experiment 108609 PARAMETER Experiment Name: At_100uM_ABA_cDNA_P Parameter: Timepoint (hr) Value: 24
  misc_feature: MA Experiment 108609 PARAMETER Experiment Name: At_100uM_ABA_cDNA_P Parameter: Tissue Value: Aerial
  misc_feature: MA Experiment 108609 PARAMETER Experiment Name: At_100uM_ABA_cDNA_P Parameter: Treatment Value: 100uM ABA vs. No Treatment
  misc_feature: MA Experiment ID: 20000069 Result: Up-regulated in Transcription
  misc_feature: MA Experiment 20000069 PARAMETER Experiment Name: At_100uM_ABA_Mutants_cDNA_P Parameter: Plant Line Value: CS23
  misc_feature: MA Experiment 20000069 PARAMETER Experiment Name: At_100uM_ABA_Mutants_cDNA_P Parameter: Timepoint (hr) Value: 6
  misc_feature: MA Experiment 20000069 PARAMETER Experiment Name: At_100uM_ABA_Mutants_cDNA_P Parameter: Tissue Value: Aerial
  misc_feature: MA Experiment 20000069 PARAMETER Experiment Name: At_100uM_ABA_Mutants_cDNA_P Parameter: Treatment Value: 100uM ABA vs. No Treatment
  misc_feature: MA Experiment ID: 20000070 Result: Up-regulated in Transcription
  misc_feature: MA Experiment 20000070 PARAMETER Experiment Name: At_100uM_ABA_Mutants_cDNA_P Parameter: Plant Line Value: CS24
  misc_feature: MA Experiment 20000070 PARAMETER Experiment Name: At_100uM_ABA_Mutants_cDNA_P Parameter: Timepoint (hr) Value: 6
  misc_feature: MA Experiment 20000070 PARAMETER Experiment Name: At_100uM_ABA_Mutants_cDNA_P Parameter: Tissue Value: Aerial
  misc_feature: MA Experiment 20000070 PARAMETER Experiment Name: At_100uM_ABA_Mutants_cDNA_P Parameter: Treatment Value: 100uM ABA vs. No Treatment
  misc_feature: MA Experiment ID: 20000071 Result: Up-regulated in Transcription
  misc_feature: MA Experiment 20000071 PARAMETER Experiment Name: At_100uM_ABA_Mutants_cDNA_P Parameter: Plant Line Value: CS8104
  misc_feature: MA Experiment 20000071 PARAMETER Experiment Name: At_100uM_ABA_Mutants_cDNA_P Parameter: Timepoint (hr) Value: 6
  misc_feature: MA Experiment 20000071 PARAMETER Experiment Name: At_100uM_ABA_Mutants_cDNA_P Parameter: Tissue Value: Aerial
  misc_feature: MA Experiment 20000071 PARAMETER Experiment Name: At_100uM_ABA_Mutants_cDNA_P Parameter: Treatment Value: 100uM ABA vs. No Treatment
  misc_feature: MA Experiment ID: 20000072 Result: Up-regulated in Transcription
  misc_feature: MA Experiment 20000072 PARAMETER Experiment Name: At_100uM_ABA_Mutants_cDNA_P Parameter: Plant Line Value: CS8105
  misc_feature: MA Experiment 20000072 PARAMETER Experiment Name: At_100uM_ABA_Mutants_cDNA_P Parameter: Timepoint (hr) Value: 6
  misc_feature: MA Experiment 20000072 PARAMETER Experiment Name: At_100uM_ABA_Mutants_cDNA_P Parameter: Tissue Value: Aerial
  misc_feature: MA Experiment 20000072 PARAMETER Experiment Name: At_100uM_ABA_Mutants_cDNA_P Parameter: Treatment Value: 100uM ABA vs. No Treatment
  misc_feature: MA Experiment ID: 20000087 Result: Up-regulated in Transcription
  misc_feature: MA Experiment 20000087 PARAMETER Experiment Name: At_100uM_ABA_Mutants_cDNA_P Parameter: Plant Line Value: WS
  misc_feature: MA Experiment 20000087 PARAMETER Experiment Name: At_100uM_ABA_Mutants_cDNA_P Parameter: Timepoint (hr) Value: 6
  misc_feature: MA Experiment 20000087 PARAMETER Experiment Name: At_100uM_ABA_Mutants_cDNA_P Parameter: Tissue Value: Aerial
  misc_feature: MA Experiment 20000087 PARAMETER Experiment Name: At_100uM_ABA_Mutants_cDNA_P Parameter: Treatment Value: 100uM ABA vs. No Treatment
  misc_feature: MA Experiment ID: 20000117 Result: Up-regulated in Transcription
  misc_feature: MA Experiment 20000117 PARAMETER Experiment Name: At_100uM_ABA_Mutants_cDNA_P Parameter: Plant Line Value: Columbia
  misc_feature: MA Experiment 20000117 PARAMETER Experiment Name: At_100uM_ABA_Mutants_cDNA_P Parameter: Timepoint (hr) Value: 6
  misc_feature: MA Experiment 20000117 PARAMETER Experiment Name: At_100uM_ABA_Mutants_cDNA_P Parameter: Tissue Value: Aerial
  misc_feature: MA Experiment 20000117 PARAMETER Experiment Name: At_100uM_ABA_Mutants_cDNA_P Parameter: Treatment Value: 100uM ABA vs. No Treatment
  misc_feature: MA Experiment ID: 20000166 Result: Up-regulated in Transcription
  misc_feature: MA Experiment 20000166 PARAMETER Experiment Name: At_100uM_ABA_P Parameter: Age (day) Value: 14
  misc_feature: MA Experiment 20000166 PARAMETER Experiment Name: At_100uM_ABA_P Parameter: Organism Value: A. thaliana
  misc_feature: MA Experiment 20000166 PARAMETER Experiment Name: At_100uM_ABA_P Parameter: Plant Line Value: WS
  misc_feature: MA Experiment 20000166 PARAMETER Experiment Name: At_100uM_ABA_P Parameter: Timepoint (hr) Value: 1
  misc_feature: MA Experiment 20000166 PARAMETER Experiment Name: At_100uM_ABA_P Parameter: Tissue Value: Aerial
  misc_feature: MA Experiment 20000166 PARAMETER Experiment Name: At_100uM_ABA_P Parameter: Treatment Value: 100uM ABA vs. No Treatment
  misc_feature: MA Experiment ID: 20000169 Result: Up-regulated in Transcription
  misc_feature: MA Experiment 20000169 PARAMETER Experiment Name: At_100uM_ABA_P Parameter: Age (day) Value: 14
  misc_feature: MA Experiment 20000169 PARAMETER Experiment Name: At_100uM_ABA_P Parameter: Organism Value: A. thaliana
  misc_feature: MA Experiment 20000169 PARAMETER Experiment Name: At_100uM_ABA_P Parameter: Plant Line Value: WS
  misc_feature: MA Experiment 20000169 PARAMETER Experiment Name: At_100uM_ABA_P Parameter: Timepoint (hr) Value: 6
  misc_feature: MA Experiment 20000169 PARAMETER Experiment Name: At_100uM_ABA_P Parameter: Tissue Value: Aerial
  misc_feature: MA Experiment 20000169 PARAMETER Experiment Name: At_100uM_ABA_P Parameter: Treatment Value: 100uM ABA vs. No Treatment
  misc_feature: MA Experiment ID: 20000234 Result: Up-regulated in Transcription
  misc_feature: MA Experiment 20000234 PARAMETER Experiment Name: At_Siliques_P Parameter: Age (day) Value: 21
  misc_feature: MA Experiment 20000234 PARAMETER Experiment Name: At_Siliques_P Parameter: Organism Value: A. thaliana
  misc_feature: MA Experiment 20000234 PARAMETER Experiment Name: At_Siliques_P Parameter: Plant Line Value: WS
  misc_feature: MA Experiment 20000234 PARAMETER Experiment Name: At_Siliques_P Parameter: Tissue Value: Less Than 5mm Siliques vs. Whole Plant
  misc_feature: MA Experiment ID: 20000265 Result: Up-regulated in Transcription
  misc_feature: MA Experiment 20000265 PARAMETER Experiment Name: At_Open_Flower_P Parameter: Age (day) Value: 21
  misc_feature: MA Experiment 20000265 PARAMETER Experiment Name: At_Open_Flower_P Parameter: Plant Line Value: WS
  misc_feature: MA Experiment 20000265 PARAMETER Experiment Name: At_Open_Flower_P Parameter: Tissue Value: Closed Flower vs. Whole Plant
  misc_feature: MA Experiment ID: 20000267 Result: Up-regulated in Transcription
  misc_feature: MA Experiment 20000267 PARAMETER Experiment Name: At_Drought_P Parameter: Age (day) Value: 7
  misc_feature: MA Experiment 20000267 PARAMETER Experiment Name: At_Drought_P Parameter: Organism Value: A. thaliana
  misc_feature: MA Experiment 20000267 PARAMETER Experiment Name: At_Drought_P Parameter: Plant Line Value: WS
  misc_feature: MA Experiment 20000267 PARAMETER Experiment Name: At_Drought_P Parameter: Timepoint (hr) Value: 6
  misc_feature: MA Experiment 20000267 PARAMETER Experiment Name: At_Drought_P Parameter: Tissue Value: Whole Plant
  misc_feature: MA Experiment 20000267 PARAMETER Experiment Name: At_Drought_P Parameter: Treatment Value: Drought vs. No Drought
  misc_feature: MA Experiment ID: 20000268 Result: Up-regulated in Transcription
  misc_feature: MA Experiment 20000268 PARAMETER Experiment Name: At_100mM_NaCl__P Parameter: Age (day) Value: 14
  misc_feature: MA Experiment 20000268 PARAMETER Experiment Name: At_100mM_NaCl__P Parameter: Organism Value: A. thaliana
  misc_feature: MA Experiment 20000268 PARAMETER Experiment Name: At_100mM_NaCl__P Parameter: Plant Line Value: WS
  misc_feature: MA Experiment 20000268 PARAMETER Experiment Name: At_100mM_NaCl__P Parameter: Timepoint (hr) Value: 6
  misc_feature: MA Experiment 20000268 PARAMETER Experiment Name: At_100mM_NaCl__P Parameter: Tissue Value: Whole Plant
  misc_feature: MA Experiment 20000268 PARAMETER Experiment Name: At_100mM_NaCl__P Parameter: Treatment Value: 100mM NaCl vs. No Treatment
  misc_feature: MA Experiment ID: 20000436 Result: Up-regulated in Transcription
  misc_feature: MA Experiment 20000436 PARAMETER Experiment Name: At_Drought_P Parameter: Age (day) Value: 7
  misc_feature: MA Experiment 20000436 PARAMETER Experiment Name: At_Drought_P Parameter: Organism Value: A. thaliana
  misc_feature: MA Experiment 20000436 PARAMETER Experiment Name: At_Drought_P Parameter: Plant Line Value: WS
  misc_feature: MA Experiment 20000436 PARAMETER Experiment Name: At_Drought_P Parameter: Timepoint (hr) Value: 12
  misc_feature: MA Experiment 20000436 PARAMETER Experiment Name: At_Drought_P Parameter: Tissue Value: Whole Plant
  misc_feature: MA Experiment 20000436 PARAMETER Experiment Name: At_Drought_P Parameter: Treatment Value: Drought vs. No Drought
  misc_feature: MA Experiment ID: 20000437 Result: Up-regulated in Transcription
  misc_feature: MA Experiment 20000437 PARAMETER Experiment Name: At_Drought_P Parameter: Age (day) Value: 8
  misc_feature: MA Experiment 20000437 PARAMETER Experiment Name: At_Drought_P Parameter: Organism Value: A. thaliana
  misc_feature: MA Experiment 20000437 PARAMETER Experiment Name: At_Drought_P Parameter: Plant Line Value: WS
  misc_feature: MA Experiment 20000437 PARAMETER Experiment Name: At_Drought_P Parameter: Timepoint (hr) Value: 24
  misc_feature: MA Experiment 20000437 PARAMETER Experiment Name: At_Drought_P Parameter: Tissue Value: Whole Plant
  misc_feature: MA Experiment 20000437 PARAMETER Experiment Name: At_Drought_P Parameter: Treatment Value: Drought vs. No Drought
  misc_feature: MA Experiment ID: 20000453 Result: Up-regulated in Transcription
  misc_feature: MA Experiment 20000453 PARAMETER Experiment Name: At_100uM_ABA_P Parameter: Age (day) Value: 15
  misc_feature: MA Experiment 20000453 PARAMETER Experiment Name: At_100uM_ABA_P Parameter: Organism Value: A. thaliana
  misc_feature: MA Experiment 20000453 PARAMETER Experiment Name: At_100uM_ABA_P Parameter: Plant Line Value: WS
  misc_feature: MA Experiment 20000453 PARAMETER Experiment Name: At_100uM_ABA_P Parameter: Timepoint (hr) Value: 24
  misc_feature: MA Experiment 20000453 PARAMETER Experiment Name: At_100uM_ABA_P Parameter: Tissue Value: Aerial
  misc_feature: MA Experiment 20000453 PARAMETER Experiment Name: At_100uM_ABA_P Parameter: Treatment Value: 100uM ABA vs. No Treatment
  misc_feature: MA Experiment ID: 20000573 Result: Down-regulated in Transcription
  misc_feature: MA Experiment 20000573 PARAMETER Experiment Name: At_100uM_ABA_Mutants__P Parameter: Organism Value: A. thaliana
  misc_feature: MA Experiment 20000573 PARAMETER Experiment Name: At_100uM_ABA_Mutants__P Parameter: Plant Line Value: CS22 vs. Ler wt
  misc_feature: MA Experiment 20000573 PARAMETER Experiment Name: At_100uM_ABA_Mutants__P Parameter: Timepoint (hr) Value: N/A
  misc_feature: MA Experiment 20000573 PARAMETER Experiment Name: At_100uM_ABA_Mutants__P Parameter: Tissue Value: Whole Plant
  misc_feature: MA Experiment 20000573 PARAMETER Experiment Name: At_100uM_ABA_Mutants__P Parameter: Treatment Value: None
  misc_feature: MA Experiment ID: 20000574 Result: Down-regulated in Transcription
  misc_feature: MA Experiment 20000574 PARAMETER Experiment Name: At_100uM_ABA_Mutants__P Parameter: Organism Value: A. thaliana
  misc_feature: MA Experiment 20000574 PARAMETER Experiment Name: At_100uM_ABA_Mutants__P Parameter: Plant Line Value: CS23 vs. Ler wt
  misc_feature: MA Experiment 20000574 PARAMETER Experiment Name: At_100uM_ABA_Mutants__P Parameter: Timepoint (hr) Value: N/A
  misc_feature: MA Experiment 20000574 PARAMETER Experiment Name: At_100uM_ABA_Mutants__P Parameter: Tissue Value: Whole Plant
  misc_feature: MA Experiment 20000574 PARAMETER Experiment Name: At_100uM_ABA_Mutants__P Parameter: Treatment Value: None
  misc_feature: MA Experiment ID: 20000794 Result: Up-regulated in Transcription
  misc_feature: MA Experiment 20000794 PARAMETER Experiment Name: At_Petals_P Parameter: Age (day) Value: 23-25 days
  misc_feature: MA Experiment 20000794 PARAMETER Experiment Name: At_Petals_P Parameter: Plant Line Value: WS
  misc_feature: MA Experiment 20000794 PARAMETER Experiment Name: At_Petals_P Parameter: Tissue Value: Petals vs. Whole plant
  misc_feature: MA Experiment ID: 20001555 Result: Up-regulated in Transcription
  misc_feature: MA Experiment 20001555 PARAMETER Experiment Name: At_Drought_Soil_Dry_P Parameter: Age (day) Value: 24
  misc_feature: MA Experiment 20001555 PARAMETER Experiment Name: At_Drought_Soil_Dry_P Parameter: Organism Value: A. thaliana
  misc_feature: MA Experiment 20001555 PARAMETER Experiment Name: At_Drought_Soil_Dry_P Parameter: Plant Line Value: WS
  misc_feature: MA Experiment 20001555 PARAMETER Experiment Name: At_Drought_Soil_Dry_P Parameter: Post Timepoint (hr) Value: None
  misc_feature: MA Experiment 20001555 PARAMETER Experiment Name: At_Drought_Soil_Dry_P Parameter: Post-Treatment Value: None
  misc_feature: MA Experiment 20001555 PARAMETER Experiment Name: At_Drought_Soil_Dry_P Parameter: Timepoint (day) Value: 10
  misc_feature: MA Experiment 20001555 PARAMETER Experiment Name: At_Drought_Soil_Dry_P Parameter: Treatment Value: Drought vs. No Drought
  misc_feature: MA Experiment ID: 20001556 Result: Up-regulated in Transcription
  misc_feature: MA Experiment 20001556 PARAMETER Experiment Name: At_Drought_Soil_Dry_P Parameter: Age (day) Value: 26
  misc_feature: MA Experiment 20001556 PARAMETER Experiment Name: At_Drought_Soil_Dry_P Parameter: Organism Value: A. thaliana
  misc_feature: MA Experiment 20001556 PARAMETER Experiment Name: At_Drought_Soil_Dry_P Parameter: Plant Line Value: WS
  misc_feature: MA Experiment 20001556 PARAMETER Experiment Name: At_Drought_Soil_Dry_P Parameter: Post Timepoint (hr) Value: None
  misc_feature: MA Experiment 20001556 PARAMETER Experiment Name: At_Drought_Soil_Dry_P Parameter: Post-Treatment Value: None
  misc_feature: MA Experiment 20001556 PARAMETER Experiment Name: At_Drought_Soil_Dry_P Parameter: Timepoint (day) Value: 12
  misc_feature: MA Experiment 20001556 PARAMETER Experiment Name: At_Drought_Soil_Dry_P Parameter: Treatment Value: Drought vs. No Drought
  misc_feature: MA Experiment ID: 20001559 Result: Up-regulated in Transcription
  misc_feature: MA Experiment 20001559 PARAMETER Experiment Name: At_Drought_Soil_Dry_P Parameter: Age (day) Value: 28
  misc_feature: MA Experiment 20001559 PARAMETER Experiment Name: At_Drought_Soil_Dry_P Parameter: Organism Value: A. thaliana
  misc_feature: MA Experiment 20001559 PARAMETER Experiment Name: At_Drought_Soil_Dry_P Parameter: Plant Line Value: WS
  misc_feature: MA Experiment 20001559 PARAMETER Experiment Name: At_Drought_Soil_Dry_P Parameter: Post Timepoint (hr) Value: 29
  misc_feature: MA Experiment 20001559 PARAMETER Experiment Name: At_Drought_Soil_Dry_P Parameter: Post-Treatment Value: Re-Water vs. No Drought
  misc_feature: MA Experiment 20001559 PARAMETER Experiment Name: At_Drought_Soil_Dry_P Parameter: Timepoint (day) Value: 14
  misc_feature: MA Experiment 20001559 PARAMETER Experiment Name: At_Drought_Soil_Dry_P Parameter: Treatment Value: Drought vs. No Drought
  misc_feature: MA Experiment ID: 20001757 Result: Down-regulated in Transcription
  misc_feature: MA Experiment 20001757 PARAMETER Experiment Name: At_50mM_NH4NO3_L-to-H_P Parameter: Timepoint (hr) Value: 6
  misc_feature: MA Experiment 20001757 PARAMETER Experiment Name: At_50mM_NH4NO3_L-to-H_P Parameter: Tissue Value: Leaf
  misc_feature: MA Experiment 20001757 PARAMETER Experiment Name: At_50mM_NH4NO3_L-to-H_P Parameter: Treatment Value: 50mM NH4NO3 vs 100mM Mannitol
  misc_feature: MA Experiment ID: 20001904 Result: Up-regulated in Transcription
  misc_feature: MA Experiment 20001904 PARAMETER Experiment Name: At_Drought_Reproduction_P Parameter: Age (day) Value: 37
  misc_feature: MA Experiment 20001904 PARAMETER Experiment Name: At_Drought_Reproduction_P Parameter: Organism Value: A. thaliana
  misc_feature: MA Experiment 20001904 PARAMETER Experiment Name: At_Drought_Reproduction_P Parameter: Plant Line Value: WS
  misc_feature: MA Experiment 20001904 PARAMETER Experiment Name: At_Drought_Reproduction_P Parameter: Timepoint (day) Value: 7
  misc_feature: MA Experiment 20001904 PARAMETER Experiment Name: At_Drought_Reproduction_P Parameter: Tissue Value: Rosettes
  misc_feature: MA Experiment 20001904 PARAMETER Experiment Name: At_Drought_Reproduction_P Parameter: Treatment Value: Drought vs. No Drought
  misc_feature: MA Experiment ID: 20001905 Result: Up-regulated in Transcription
  misc_feature: MA Experiment 20001905 PARAMETER Experiment Name: At_Drought_Reproduction_P Parameter: Age (day) Value: 40
  misc_feature: MA Experiment 20001905 PARAMETER Experiment Name: At_Drought_Reproduction_P Parameter: Organism Value: A. thaliana
  misc_feature: MA Experiment 20001905 PARAMETER Experiment Name: At_Drought_Reproduction_P Parameter: Plant Line Value: WS
  misc_feature: MA Experiment 20001905 PARAMETER Experiment Name: At_Drought_Reproduction_P Parameter: Timepoint (day) Value: 10
  misc_feature: MA Experiment 20001905 PARAMETER Experiment Name: At_Drought_Reproduction_P Parameter: Tissue Value: Rosettes
  misc_feature: MA Experiment 20001905 PARAMETER Experiment Name: At_Drought_Reproduction_P Parameter: Treatment Value: Drought vs. No Drought

SEQ ID NO: 34211 - protein, 153 aa, Arabidopsis thaliana; identical to SEQ ID NO: 30621
  peptide (1)..(153): Ceres Seq. ID no. 12396834
  misc_feature (1)..(138): Pfam Name: ER lumen protein retaining receptor Pfam Description: ER lumen protein retaining receptor
  misc_feature (1)..(149): Homolog of NCBI NO: 15230808 NR Description: ER lumen protein retaining receptor, putative
  misc_feature (1)..(137): Homolog of NCBI NO: 25412019 NR Description: probable ER lumen protein retaining receptor
  misc_feature (1)..(153): Homolog of NCBI NO: 21537286 NR Description: putative ER lumen protein retaining receptor
  misc_feature (1)..(153): Homolog of NCBI NO: 13430654 NR Description: putative ER lumen protein retaining receptor
  misc_feature (1)..(153): Homolog of NCBI NO: 18399619 NR Description: putative ER lumen protein retaining receptor
  misc_feature (1)..(153): Homolog of NCBI NO: 18420309 NR Description: expressed protein
  misc_feature (1)..(153): Homolog of NCBI NO: 9369358 NR Description: F10A5.5 [Arabidopsis thaliana]
  misc_feature (1)..(153): Homolog of NCBI NO: 15222871 NR Description: ER lumen protein retaining receptor, putative
  misc_feature (1)..(153): Homolog of NCBI NO: 15223724 NR Description: ER lumen protein-retaining receptor; protein id:
  misc_feature (1)..(138): Homolog of NCBI NO: 25518365 NR Description: hypothetical protein T20H2.24 - Arabidopsis

SEQ ID NO: 34212 - protein, 143 aa, Arabidopsis thaliana; identical to SEQ ID NO: 30622
  peptide (1)..(143): Ceres Seq. ID no. 12396835
  misc_feature (1)..(128): Pfam Name: ER lumen protein retaining receptor Pfam Description: ER lumen protein retaining receptor
  misc_feature (1)..(139): Homolog of NCBI NO: 15230808 NR Description: ER lumen protein retaining receptor, putative
  misc_feature (1)..(127): Homolog of NCBI NO: 25412019 NR Description: probable ER lumen protein retaining receptor
  misc_feature (1)..(143): Homolog of NCBI NO: 21537286 NR Description: putative ER lumen protein retaining receptor
  misc_feature (1)..(143): Homolog of NCBI NO: 13430654 NR Description: putative ER lumen protein retaining receptor
  misc_feature (1)..(143): Homolog of NCBI NO: 18399619 NR Description: putative ER lumen protein retaining receptor
  misc_feature (1)..(143): Homolog of NCBI NO: 18420309 NR Description: expressed protein
  misc_feature (1)..(143): Homolog of NCBI NO: 9369358 NR Description: F10A5.5 [Arabidopsis thaliana]
  misc_feature (1)..(143): Homolog of NCBI NO: 15222871 NR Description: ER lumen protein retaining receptor, putative
  misc_feature (1)..(143): Homolog of NCBI NO: 15223724 NR Description: ER lumen protein-retaining receptor; protein id:
  misc_feature (1)..(128): Homolog of NCBI NO: 25518365 NR Description: hypothetical protein T20H2.24 - Arabidopsis

SEQ ID NO: 34213 - protein, 117 aa, Arabidopsis thaliana; identical to SEQ ID NO: 30623
  peptide (1)..(117): Ceres Seq. ID no. 12396836
  misc_feature (66)..(117): Pfam Name: ER lumen protein retaining receptor Pfam Description: ER lumen protein retaining receptor
  misc_feature (27)..(117): Homolog of NCBI NO: 15230808 NR Description: ER lumen protein retaining receptor, putative
  misc_feature (24)..(117): Homolog of NCBI NO: 25412019 NR Description: probable ER lumen protein retaining receptor
  misc_feature (24)..(117): Homolog of NCBI NO: 21537286 NR Description: putative ER lumen protein retaining receptor
  misc_feature (24)..(117): Homolog of NCBI NO: 13430654 NR Description: putative ER lumen protein retaining receptor
  misc_feature (24)..(117): Homolog of NCBI NO: 18399619 NR Description: putative ER lumen protein retaining receptor
  misc_feature (20)..(117): Homolog of NCBI NO: 18420309 NR Description: expressed protein
  misc_feature (20)..(117): Homolog of NCBI NO: 9369358 NR Description: F10A5.5 [Arabidopsis thaliana]
  misc_feature (20)..(117): Homolog of NCBI NO: 15222871 NR Description: ER lumen protein retaining receptor, putative
  misc_feature (20)..(117): Homolog of NCBI NO: 15223724 NR Description: ER lumen protein-retaining receptor; protein id:
  misc_feature (20)..(117): Homolog of NCBI NO: 25518365 NR Description: hypothetical protein T20H2.24 - Arabidopsis

SEQ ID NO: 34214 - DNA, 1657 bp, Arabidopsis thaliana; identical to SEQ ID NO: 30624
  misc_feature (1)..(1657): Ceres Seq. ID no. 13487118
  misc_feature: MA Experiment ID: 20000180 Result: Up-regulated in Transcription
  misc_feature: MA Experiment 20000180 PARAMETER Experiment Name: At_Germinating_Seeds_P Parameter: Age (hr) Value: 24 vs. 0
  misc_feature: MA Experiment 20000180 PARAMETER Experiment Name: At_Germinating_Seeds_P Parameter: Tissue Value: Germinating Seeds
  misc_feature: MA Experiment ID: 20000439 Result: Up-regulated in Transcription
  misc_feature: MA Experiment 20000439 PARAMETER Experiment Name: At_Roots__P Parameter: Age (day) Value: 14 vs. 21
  misc_feature: MA Experiment 20000439 PARAMETER Experiment Name: At_Roots__P Parameter: Organism Value: A. thaliana
  misc_feature: MA Experiment 20000439 PARAMETER Experiment Name: At_Roots__P Parameter: Tissue Value: Roots vs. Whole Plant
  misc_feature: MA Experiment ID: 20001247 Result: Up-regulated in Transcription
  misc_feature: MA Experiment 20001247 PARAMETER Experiment Name: At_Far-red-induction_P Parameter: Age (day) Value: 7
  misc_feature: MA Experiment 20001247 PARAMETER Experiment Name: At_Far-red-induction_P Parameter: Light Value: Far-red vs. White
  misc_feature: MA Experiment 20001247 PARAMETER Experiment Name: At_Far-red-induction_P Parameter: Organism Value: A. thaliana
  misc_feature: MA Experiment 20001247 PARAMETER Experiment Name: At_Far-red-induction_P Parameter: Plant Line Value: Columbia
  misc_feature: MA Experiment 20001247 PARAMETER Experiment Name: At_Far-red-induction_P Parameter: Timepoint (hr) Value: 1
  misc_feature: MA Experiment 20001247 PARAMETER Experiment Name: At_Far-red-induction_P Parameter: Tissue Value: Whole Plant

SEQ ID NO: 34215 - protein, 438 aa, Arabidopsis thaliana; identical to SEQ ID NO: 30625
  peptide (1)..(438): Ceres Seq. ID no. 13487119
  misc_feature (341)..(412): Pfam Name: RNA recognition motif. (a.k.a. RRM, RBD, or RNP domain) Pfam Description: RNA recognition motif. (a.k.a. RRM, RBD, or RNP
  misc_feature (201)..(417): Homolog of NCBI NO: 33354193 NR Description: flowering time control protein FCA-like protein
  misc_feature (10)..(237): Homolog of NCBI NO: 33354193 NR Description: flowering time control protein FCA-like protein
  misc_feature (18)..(423): Homolog of NCBI NO: 34907248 NR Description: putative ribonucleoprotein
  misc_feature (13)..(388): Homolog of NCBI NO: 30679366 NR Description: RNA-binding protein, putative [Arabidopsis
  misc_feature (13)..(420): Homolog of NCBI NO: 7488303 NR Description: ribonucleoprotein homolog T4I9.1 - Arabidopsis
  misc_feature (13)..(430): Homolog of NCBI NO: 18412143 NR Description: RNA-binding protein, putative [Arabidopsis
  misc_feature (326)..(438): Homolog of NCBI NO: 7488302 NR Description: ribonucleoprotein homolog F21B7.26 - Arabidopsis
  misc_feature (10)..(295): Homolog of NCBI NO: 7488302 NR Description: ribonucleoprotein homolog F21B7.26 - Arabidopsis
  misc_feature (15)..(438): Homolog of NCBI NO: 25386552 NR Description: protein F21B7.8 [imported] - Arabidopsis thaliana
  misc_feature (10)..(438): Homolog of NCBI NO: 22329313 NR Description: RNA-binding protein, putative [Arabidopsis

SEQ ID NO: 34216 - protein, 429 aa, Arabidopsis thaliana; identical to SEQ ID NO: 30626
  peptide (1)..(429): Ceres Seq. ID no. 13487120
  misc_feature (332)..(403): Pfam Name: RNA recognition motif. (a.k.a. RRM, RBD, or RNP domain) Pfam Description: RNA recognition motif. (a.k.a. RRM, RBD, or RNP
  misc_feature (192)..(408): Homolog of NCBI NO: 33354193 NR Description: flowering time control protein FCA-like protein
  misc_feature (1)..(228): Homolog of NCBI NO: 33354193 NR Description: flowering time control protein FCA-like protein
  misc_feature (9)..(414): Homolog of NCBI NO: 34907248 NR Description: putative ribonucleoprotein
  misc_feature (4)..(379): Homolog of NCBI NO: 30679366 NR Description: RNA-binding protein, putative [Arabidopsis
  misc_feature (4)..(411): Homolog of NCBI NO: 7488303 NR Description: ribonucleoprotein homolog T4I9.1 - Arabidopsis
  misc_feature (4)..(421): Homolog of NCBI NO: 18412143 NR Description: RNA-binding protein, putative [Arabidopsis
  misc_feature (317)..(429): Homolog of NCBI NO: 7488302 NR Description: ribonucleoprotein homolog F21B7.26 - Arabidopsis
  misc_feature (1)..(286): Homolog of NCBI NO: 7488302 NR Description: ribonucleoprotein homolog F21B7.26 - Arabidopsis
  misc_feature (6)..(429): Homolog of NCBI NO: 25386552 NR Description: protein F21B7.8 [imported] - Arabidopsis thaliana
  misc_feature (1)..(429): Homolog of NCBI NO: 22329313 NR Description: RNA-binding protein, putative [Arabidopsis

SEQ ID NO: 34217 - protein, 424 aa, Arabidopsis thaliana; identical to SEQ ID NO: 30627
  peptide (1)..(424): Ceres Seq. ID no. 13487121
  misc_feature (327)..(398): Pfam Name: RNA recognition motif. (a.k.a. RRM, RBD, or RNP domain) Pfam Description: RNA recognition motif. (a.k.a. RRM, RBD, or RNP
  misc_feature (187)..(403): Homolog of NCBI NO: 33354193 NR Description: flowering time control protein FCA-like protein
  misc_feature (1)..(223): Homolog of NCBI NO: 33354193 NR Description: flowering time control protein FCA-like protein
  misc_feature (4)..(409): Homolog of NCBI NO: 34907248 NR Description: putative ribonucleoprotein
  misc_feature (1)..(374): Homolog of NCBI NO: 30679366 NR Description: RNA-binding protein, putative [Arabidopsis
  misc_feature (1)..(406): Homolog of NCBI NO: 7488303 NR Description: ribonucleoprotein homolog T4I9.1 - Arabidopsis
  misc_feature (1)..(416): Homolog of NCBI NO: 18412143 NR Description: RNA-binding protein, putative [Arabidopsis
  misc_feature (312)..(424): Homolog of NCBI NO: 7488302 NR Description: ribonucleoprotein homolog F21B7.26 - Arabidopsis
  misc_feature (1)..(281): Homolog of NCBI NO: 7488302 NR Description: ribonucleoprotein homolog F21B7.26 - Arabidopsis
  misc_feature (1)..(424): Homolog of NCBI NO: 25386552 NR Description: protein F21B7.8 [imported] - Arabidopsis thaliana
  misc_feature (1)..(424): Homolog of NCBI NO: 22329313 NR Description: RNA-binding protein, putative [Arabidopsis

SEQ ID NO: 34218 - DNA, 757 bp, Arabidopsis thaliana; identical to SEQ ID NO: 30628
  misc_feature (1)..(757): Ceres Seq. ID no. 12396975
  misc_feature: MA Experiment ID: 20000179 Result: Up-regulated in Transcription
  misc_feature: MA Experiment 20000179 PARAMETER Experiment Name: At_Germinating_Seeds_P Parameter: Age (hr) Value: 6 vs. 0
  misc_feature: MA Experiment 20000179 PARAMETER Experiment Name: At_Germinating_Seeds_P Parameter: Tissue Value: Germinating Seeds
  misc_feature: MA Experiment ID: 20000180 Result: Up-regulated in Transcription
  misc_feature: MA Experiment 20000180 PARAMETER Experiment Name: At_Germinating_Seeds_P Parameter: Age (hr) Value: 24 vs. 0
  misc_feature: MA Experiment 20000180 PARAMETER Experiment Name: At_Germinating_Seeds_P Parameter: Tissue Value: Germinating Seeds

SEQ ID NO: 34219 - protein, 163 aa, Arabidopsis thaliana; identical to SEQ ID NO: 30629
  peptide (1)..(163): Ceres Seq. ID no. 12396976
  misc_feature (75)..(144): Pfam Name: Complex 1 protein (LYR family) Pfam Description: Complex 1 protein (LYR family)
  misc_feature (7)..(163): Homolog of NCBI NO: 27754395 NR Description: unknown protein [Arabidopsis thaliana]
  misc_feature (7)..(163): Homolog of NCBI NO: 30699138 NR Description: expressed protein [Arabidopsis thaliana]
  misc_feature (1)..(163): Homolog of NCBI NO: 25373205 NR Description: protein T4O12.26 [imported] - Arabidopsis

SEQ ID NO: 34220 - protein, 157 aa, Arabidopsis thaliana; identical to SEQ ID NO: 30630
  peptide (1)..(157): Ceres Seq. ID no. 12396977
  misc_feature (69)..(138): Pfam Name: Complex 1 protein (LYR family) Pfam Description: Complex 1 protein (LYR family)
  misc_feature (1)..(157): Homolog of NCBI NO: 27754395 NR Description: unknown protein [Arabidopsis thaliana]
  misc_feature (1)..(157): Homolog of NCBI NO: 30699138 NR Description: expressed protein [Arabidopsis thaliana]
  misc_feature (1)..(157): Homolog of NCBI NO: 25373205 NR Description: protein T4O12.26 [imported] - Arabidopsis

SEQ ID NO: 34221 - protein, 156 aa, Arabidopsis thaliana; identical to SEQ ID NO: 30631
  peptide (1)..(156): Ceres Seq. ID no. 12396978
  misc_feature (68)..(137): Pfam Name: Complex 1 protein (LYR family) Pfam Description: Complex 1 protein (LYR family)
  misc_feature (1)..(156): Homolog of NCBI NO: 27754395 NR Description: unknown protein [Arabidopsis thaliana]
  misc_feature (1)..(156): Homolog of NCBI NO: 30699138 NR Description: expressed protein [Arabidopsis thaliana]
  misc_feature (1)..(156): Homolog of NCBI NO: 25373205 NR Description: protein T4O12.26 [imported] - Arabidopsis

SEQ ID NO: 34222 - DNA, 1828 bp, Arabidopsis thaliana; identical to SEQ ID NO: 30632
  misc_feature (1)..(1828): Ceres Seq. ID no. 13612923
  misc_feature: MA Experiment ID: 108433 Result: Up-regulated in Transcription
  misc_feature: MA Experiment 108433 PARAMETER Experiment Name: At_rhl_Mutant2_cDNA_P Parameter: Age (day) Value: 7
  misc_feature: MA Experiment 108433 PARAMETER Experiment Name: At_rhl_Mutant2_cDNA_P Parameter: Organism Value: A. thaliana
  misc_feature: MA Experiment 108433 PARAMETER Experiment Name: At_rhl_Mutant2_cDNA_P Parameter: Plant Line Value: rhl Mutant vs. wt landsburg
  misc_feature: MA Experiment 108433 PARAMETER Experiment Name: At_rhl_Mutant2_cDNA_P Parameter: Tissue Value: Roots
  misc_feature: MA Experiment ID: 108572 Result: Up-regulated in Transcription
  misc_feature: MA Experiment 108572 PARAMETER Experiment Name: At_Drought_cDNA_P Parameter: Timepoint (hr) Value: 1
  misc_feature: MA Experiment 108572 PARAMETER Experiment Name: At_Drought_cDNA_P Parameter: Tissue Value: Aerial
  misc_feature: MA Experiment 108572 PARAMETER Experiment Name: At_Drought_cDNA_P Parameter: Treatment Value: Drought vs. No Drought
  misc_feature: MA Experiment ID: 108573 Result: Up-regulated in Transcription
  misc_feature: MA Experiment 108573 PARAMETER Experiment Name: At_Drought_cDNA_P Parameter: Timepoint (hr) Value: 6
  misc_feature: MA Experiment 108573 PARAMETER Experiment Name: At_Drought_cDNA_P Parameter: Tissue Value: Aerial
  misc_feature: MA Experiment 108573 PARAMETER Experiment Name: At_Drought_cDNA_P Parameter: Treatment Value: Drought vs. No Drought
  misc_feature: MA Experiment ID: 108579 Result: Up-regulated in Transcription
  misc_feature: MA Experiment 108579 PARAMETER Experiment Name: At_4deg_Cold_cDNA_P Parameter: Temperature (deg C) Value: 4 vs. 22
  misc_feature: MA Experiment 108579 PARAMETER Experiment Name: At_4deg_Cold_cDNA_P Parameter: Timepoint (hr) Value: 6
  misc_feature: MA Experiment 108579 PARAMETER Experiment Name: At_4deg_Cold_cDNA_P Parameter: Tissue Value: Aerial
  misc_feature: MA Experiment ID: 108607 Result: Up-regulated in Transcription
  misc_feature: MA Experiment 108607 PARAMETER Experiment Name: At_100uM_ABA_cDNA_P Parameter: Timepoint (hr) Value: 4
  misc_feature: MA Experiment 108607 PARAMETER Experiment Name: At_100uM_ABA_cDNA_P Parameter: Tissue Value: Aerial
  misc_feature: MA Experiment 108607 PARAMETER Experiment Name: At_100uM_ABA_cDNA_P Parameter: Treatment Value: 100uM ABA vs. No Treatment
  misc_feature: MA Experiment ID: 20000030 Result: Down-regulated in Transcription
  misc_feature: MA Experiment 20000030 PARAMETER Experiment Name: At_CS6630_Roots_cDNA_P Parameter: Plant Line Value: CS6630 vs. WS
  misc_feature: MA Experiment 20000030 PARAMETER Experiment Name: At_CS6630_Roots_cDNA_P Parameter: Tissue Value: Roots
  misc_feature: MA Experiment ID: 20000072 Result: Up-regulated in Transcription
  misc_feature: MA Experiment 20000072 PARAMETER Experiment Name: At_100uM_ABA_Mutants_cDNA_P Parameter: Plant Line Value: CS8105
  misc_feature: MA Experiment 20000072 PARAMETER Experiment Name: At_100uM_ABA_Mutants_cDNA_P Parameter: Timepoint (hr) Value: 6
  misc_feature: MA Experiment 20000072 PARAMETER Experiment Name: At_100uM_ABA_Mutants_cDNA_P Parameter: Tissue Value: Aerial
  misc_feature: MA Experiment 20000072 PARAMETER Experiment Name: At_100uM_ABA_Mutants_cDNA_P Parameter: Treatment Value: 100uM ABA vs. No Treatment
  misc_feature: MA Experiment ID: 20000111 Result: Down-regulated in Transcription
  misc_feature: MA Experiment 20000111 PARAMETER Experiment Name: At_42deg_Heat_cDNA_P Parameter: Temperature (deg C) Value: 42 vs. 22
  misc_feature: MA Experiment 20000111 PARAMETER Experiment Name: At_42deg_Heat_cDNA_P Parameter: Timepoint (hr) Value: 6
  misc_feature: MA Experiment 20000111 PARAMETER Experiment Name: At_42deg_Heat_cDNA_P Parameter: Tissue Value: Aerial
  misc_feature: MA Experiment ID: 20000112 Result: Down-regulated in Transcription
  misc_feature: MA Experiment 20000112 PARAMETER Experiment Name: At_42deg_Heat_cDNA_P Parameter: Temperature (deg C) Value: 42 vs. 22
  misc_feature: MA Experiment 20000112 PARAMETER Experiment Name: At_42deg_Heat_cDNA_P Parameter: Timepoint (hr) Value: 2
  misc_feature: MA Experiment 20000112 PARAMETER Experiment Name: At_42deg_Heat_cDNA_P Parameter: Tissue Value: Aerial
  misc_feature: MA Experiment ID: 20000144 Result: Down-regulated in Transcription
  misc_feature: MA Experiment 20000144 PARAMETER Experiment Name: At_42deg_Heat_cDNA_P Parameter: Temperature (deg C) Value: 42 vs. 22
  misc_feature: MA Experiment 20000144 PARAMETER Experiment Name: At_42deg_Heat_cDNA_P Parameter: Timepoint (hr) Value: 1
  misc_feature: MA Experiment 20000144 PARAMETER Experiment Name: At_42deg_Heat_cDNA_P Parameter: Tissue Value: Aerial
  misc_feature: MA Experiment ID: 20000171 Result: Down-regulated in Transcription
  misc_feature: MA Experiment 20000171 PARAMETER Experiment Name: At_42deg_Heat_P Parameter: Age (day) Value: 14
  misc_feature: MA Experiment 20000171 PARAMETER Experiment Name: At_42deg_Heat_P Parameter: Organism Value: A. thaliana
  misc_feature: MA Experiment 20000171 PARAMETER Experiment Name: At_42deg_Heat_P Parameter: Plant Line Value: WS
  misc_feature: MA Experiment 20000171 PARAMETER Experiment Name: At_42deg_Heat_P Parameter: Temperature (deg C) Value: 42 vs. 22
  misc_feature: MA Experiment 20000171 PARAMETER Experiment Name: At_42deg_Heat_P Parameter: Timepoint (hr) Value: 1
  misc_feature: MA Experiment 20000171 PARAMETER Experiment Name: At_42deg_Heat_P Parameter: Tissue Value: Aerial
  misc_feature: MA Experiment ID: 20000173 Result: Down-regulated in Transcription
  misc_feature: MA Experiment 20000173 PARAMETER Experiment Name: At_42deg_Heat_P Parameter: Age (day) Value: 14
  misc_feature: MA Experiment 20000173 PARAMETER Experiment Name: At_42deg_Heat_P Parameter: Organism Value: A. thaliana
  misc_feature: MA Experiment 20000173 PARAMETER Experiment Name: At_42deg_Heat_P Parameter: Plant Line Value: WS
  misc_feature: MA Experiment 20000173 PARAMETER Experiment Name: At_42deg_Heat_P Parameter: Temperature (deg C) Value: 42 vs. 22
  misc_feature: MA Experiment 20000173 PARAMETER Experiment Name: At_42deg_Heat_P Parameter: Timepoint (hr) Value: 6
  misc_feature: MA Experiment 20000173 PARAMETER Experiment Name: At_42deg_Heat_P Parameter: Tissue Value: Aerial
  misc_feature: MA Experiment ID: 20000184 Result: Up-regulated in Transcription
  misc_feature: MA Experiment 20000184 PARAMETER Experiment Name: At_Shoots__P Parameter: Age (day) Value: 7
  misc_feature: MA Experiment 20000184 PARAMETER Experiment Name: At_Shoots__P Parameter: Tissue Value: Shoots vs. Whole Plant
  misc_feature: MA Experiment ID: 20000235 Result: Up-regulated in Transcription
  misc_feature: MA Experiment 20000235 PARAMETER Experiment Name: At_Siliques_P Parameter: Age (day) Value: 21
  misc_feature: MA Experiment 20000235 PARAMETER Experiment Name: At_Siliques_P Parameter: Organism Value: A. thaliana
  misc_feature: MA Experiment 20000235 PARAMETER Experiment Name: At_Siliques_P Parameter: Plant Line Value: WS
  misc_feature: MA Experiment 20000235 PARAMETER Experiment Name: At_Siliques_P Parameter: Tissue Value: 5-10mm Siliques vs. Whole Plant
  misc_feature: MA Experiment ID: 20000286 Result: Up-regulated in Transcription
  misc_feature: MA Experiment 20000286 PARAMETER Experiment Name: At_Open_Flower_P Parameter: Age (day) Value: 21
  misc_feature: MA Experiment 20000286 PARAMETER Experiment Name: At_Open_Flower_P Parameter: Plant Line Value: WS
  misc_feature: MA Experiment 20000286 PARAMETER Experiment Name: At_Open_Flower_P Parameter: Tissue Value: Half Open vs. Whole Plant
  misc_feature: MA Experiment ID: 20000437 Result: Up-regulated in Transcription
  misc_feature: MA Experiment 20000437 PARAMETER Experiment Name: At_Drought_P Parameter: Age (day) Value: 8
  misc_feature: MA Experiment 20000437 PARAMETER Experiment Name: At_Drought_P Parameter: Organism Value: A. thaliana
  misc_feature: MA Experiment 20000437 PARAMETER Experiment Name: At_Drought_P Parameter: Plant Line Value: WS
  misc_feature: MA Experiment 20000437 PARAMETER Experiment Name: At_Drought_P Parameter: Timepoint (hr) Value: 24
  misc_feature: MA Experiment 20000437 PARAMETER Experiment Name: At_Drought_P Parameter: Tissue Value: Whole Plant
  misc_feature: MA Experiment 20000437 PARAMETER Experiment Name: At_Drought_P Parameter: Treatment Value: Drought vs. No Drought
  misc_feature: MA Experiment ID: 20000573 Result: Down-regulated in Transcription
  misc_feature: MA Experiment 20000573 PARAMETER Experiment Name: At_100uM_ABA_Mutants__P Parameter: Organism Value: A. thaliana
  misc_feature: MA Experiment 20000573 PARAMETER Experiment Name: At_100uM_ABA_Mutants__P Parameter: Plant Line Value: CS22 vs. Ler wt
  misc_feature: MA Experiment 20000573 PARAMETER Experiment Name: At_100uM_ABA_Mutants__P Parameter: Timepoint (hr) Value: N/A
  misc_feature: MA Experiment 20000573 PARAMETER Experiment Name: At_100uM_ABA_Mutants__P Parameter: Tissue Value: Whole Plant
  misc_feature: MA Experiment 20000573 PARAMETER Experiment Name: At_100uM_ABA_Mutants__P Parameter: Treatment Value: None
  misc_feature: MA Experiment ID: 20000574 Result: Down-regulated in Transcription
  misc_feature: MA Experiment 20000574 PARAMETER Experiment Name: At_100uM_ABA_Mutants__P Parameter: Organism Value: A. thaliana
  misc_feature: MA Experiment 20000574 PARAMETER Experiment Name: At_100uM_ABA_Mutants__P Parameter: Plant Line Value: CS23 vs. Ler wt
  misc_feature: MA Experiment 20000574 PARAMETER Experiment Name: At_100uM_ABA_Mutants__P Parameter: Timepoint (hr) Value: N/A
  misc_feature: MA Experiment 20000574 PARAMETER Experiment Name: At_100uM_ABA_Mutants__P Parameter: Tissue Value: Whole Plant
  misc_feature: MA Experiment 20000574 PARAMETER Experiment Name: At_100uM_ABA_Mutants__P Parameter: Treatment Value: None
  misc_feature: MA Experiment ID: 20000794 Result: Up-regulated in Transcription
  misc_feature: MA Experiment 20000794 PARAMETER Experiment Name: At_Petals_P Parameter: Age (day) Value: 23-25 days
  misc_feature: MA Experiment 20000794 PARAMETER Experiment Name: At_Petals_P Parameter: Plant Line Value: WS
  misc_feature: MA Experiment 20000794 PARAMETER Experiment Name: At_Petals_P Parameter: Tissue Value: Petals vs. Whole plant
  misc_feature: MA Experiment ID: 20001247 Result: Up-regulated in Transcription
  misc_feature: MA Experiment 20001247 PARAMETER Experiment Name: At_Far-red-induction_P Parameter: Age (day) Value: 7
  misc_feature: MA Experiment 20001247 PARAMETER Experiment Name: At_Far-red-induction_P Parameter: Light Value: Far-red vs. White
  misc_feature: MA Experiment 20001247 PARAMETER Experiment Name: At_Far-red-induction_P Parameter: Organism Value: A. thaliana
  misc_feature: MA Experiment 20001247 PARAMETER Experiment Name: At_Far-red-induction_P Parameter: Plant Line Value: Columbia
  misc_feature: MA Experiment 20001247 PARAMETER Experiment Name: At_Far-red-induction_P Parameter: Timepoint (hr) Value: 1
  misc_feature: MA Experiment 20001247 PARAMETER Experiment Name: At_Far-red-induction_P Parameter: Tissue Value: Whole Plant
  misc_feature: MA Experiment ID: 20001557 Result: Up-regulated in Transcription
  misc_feature: MA Experiment 20001557 PARAMETER Experiment Name: At_Drought_Soil_Dry_P Parameter: Age (day) Value: 27
  misc_feature: MA Experiment 20001557 PARAMETER Experiment Name: At_Drought_Soil_Dry_P Parameter: Organism Value: A. thaliana
  misc_feature: MA Experiment 20001557 PARAMETER Experiment Name: At_Drought_Soil_Dry_P Parameter: Plant Line Value: WS
  misc_feature: MA Experiment 20001557 PARAMETER Experiment Name: At_Drought_Soil_Dry_P Parameter: Post Timepoint (hr) Value: 3
  misc_feature: MA Experiment 20001557 PARAMETER Experiment Name: At_Drought_Soil_Dry_P Parameter: Post-Treatment Value: Re-Water vs. No Drought
  misc_feature: MA Experiment 20001557 PARAMETER Experiment Name: At_Drought_Soil_Dry_P Parameter: Timepoint (day) Value: 13
  misc_feature: MA Experiment 20001557 PARAMETER Experiment Name: At_Drought_Soil_Dry_P Parameter: Treatment Value: Drought vs. No Drought
  misc_feature: MA Experiment ID: 20001558 Result: Up-regulated in Transcription
  misc_feature: MA Experiment 20001558 PARAMETER Experiment Name: At_Drought_Soil_Dry_P Parameter: Age (day) Value: 27
  misc_feature: MA Experiment 20001558 PARAMETER Experiment Name: At_Drought_Soil_Dry_P Parameter: Organism Value: A. thaliana
  misc_feature: MA Experiment 20001558 PARAMETER Experiment Name: At_Drought_Soil_Dry_P Parameter: Plant Line Value: WS
  misc_feature: MA Experiment 20001558 PARAMETER Experiment Name: At_Drought_Soil_Dry_P Parameter: Post Timepoint (hr) Value: 6
  misc_feature: MA Experiment 20001558 PARAMETER Experiment Name: At_Drought_Soil_Dry_P Parameter: Post-Treatment Value: Re-Water vs. No Drought
  misc_feature: MA Experiment 20001558 PARAMETER Experiment Name: At_Drought_Soil_Dry_P Parameter: Timepoint (day) Value: 13
  misc_feature: MA Experiment 20001558 PARAMETER Experiment Name: At_Drought_Soil_Dry_P Parameter: Treatment Value: Drought vs. No Drought
  misc_feature: MA Experiment ID: 20001906 Result: Down-regulated in Transcription
  misc_feature: MA Experiment 20001906 PARAMETER Experiment Name: At_Drought_Reproduction_P Parameter: Age (day) Value: 35
  misc_feature: MA Experiment 20001906 PARAMETER Experiment Name: At_Drought_Reproduction_P Parameter: Organism Value: A. thaliana
  misc_feature: MA Experiment 20001906 PARAMETER Experiment Name: At_Drought_Reproduction_P Parameter: Plant Line Value: WS
  misc_feature: MA Experiment 20001906 PARAMETER Experiment Name: At_Drought_Reproduction_P Parameter: Timepoint (day) Value: 5
  misc_feature: MA Experiment 20001906 PARAMETER Experiment Name: At_Drought_Reproduction_P Parameter: Tissue Value: Siliques
  misc_feature: MA Experiment 20001906 PARAMETER Experiment Name: At_Drought_Reproduction_P Parameter: Treatment Value: Drought vs. No Drought
  misc_feature: MA Experiment ID: 20001908 Result: Down-regulated in Transcription
  misc_feature: MA Experiment 20001908 PARAMETER Experiment Name: At_Drought_Reproduction_P Parameter: Age (day) Value: 40
  misc_feature: MA Experiment 20001908 PARAMETER Experiment Name: At_Drought_Reproduction_P Parameter: Organism Value: A. thaliana
  misc_feature: MA Experiment 20001908 PARAMETER Experiment Name: At_Drought_Reproduction_P Parameter: Plant Line Value: WS
  misc_feature: MA Experiment 20001908 PARAMETER Experiment Name: At_Drought_Reproduction_P Parameter: Timepoint (day) Value: 10
  misc_feature: MA Experiment 20001908 PARAMETER Experiment Name: At_Drought_Reproduction_P Parameter: Tissue Value: Siliques
  misc_feature: MA Experiment 20001908 PARAMETER Experiment Name: At_Drought_Reproduction_P Parameter: Treatment Value: Drought vs. No Drought
  misc_feature: MA Experiment ID: 20001911 Result: Down-regulated in Transcription
  misc_feature: MA Experiment 20001911 PARAMETER Experiment Name: At_Drought_Reproduction_P Parameter: Age (day) Value: 40
  misc_feature: MA Experiment 20001911 PARAMETER Experiment Name: At_Drought_Reproduction_P Parameter: Organism Value: A. thaliana
  misc_feature: MA Experiment 20001911 PARAMETER Experiment Name: At_Drought_Reproduction_P Parameter: Plant Line Value: WS
  misc_feature: MA Experiment 20001911 PARAMETER Experiment Name: At_Drought_Reproduction_P Parameter: Timepoint (day) Value: 10
  misc_feature: MA Experiment 20001911 PARAMETER Experiment Name: At_Drought_Reproduction_P Parameter: Tissue Value: Flowers
  misc_feature: MA Experiment 20001911 PARAMETER Experiment Name: At_Drought_Reproduction_P Parameter: Treatment Value: Drought vs. No Drought

SEQ ID NO: 34223 - protein, 529 aa, Arabidopsis thaliana [sequence omitted]

SEQ ID NO: 34224 - protein, 397 aa, Arabidopsis thaliana; identical to SEQ ID NO: 30634
  peptide (1)..(397): Ceres Seq. ID no. 13612925
  misc_feature (218)..(365): Pfam Name: Chalcone and stilbene synthases, C-terminal domain Pfam Description: Chalcone and stilbene synthases, C-terminal
  misc_feature (1)..(389): Homolog of NCBI NO: 19908404 NR Description: putative fatty acid elongase [Tropaeolum majus]
  misc_feature (1)..(392): Homolog of NCBI NO: 29417540 NR Description: beta-ketoacyl-CoA-synthase [Marchantia polymorpha]
  misc_feature (1)..(388): Homolog of NCBI NO: 11066477 NR Description: fatty acid elongase 1-like protein [Limnanthes
  misc_feature (1)..(396): Homolog of NCBI NO: 1045614 NR Description: beta-ketoacyl-CoA synthase
  misc_feature (1)..(394): Homolog of NCBI NO: 15225767 NR Description: beta-ketoacyl-CoA synthase, putative [Arabidopsis
  misc_feature (1)..(394): Homolog of NCBI NO: 9714501 NR Description: putative fatty acid elongase [Zea mays]
  misc_feature (1)..(397): Homolog of NCBI NO: 18377979 NR Description: putative beta-ketoacyl-CoA synthase [Arabidopsis
  misc_feature (1)..(397): Homolog of NCBI NO: 15219676 NR Description: beta-ketoacyl-CoA synthase, putative [Arabidopsis
  misc_feature (1)..(397): Homolog of NCBI NO: 14334714 NR Description: putative beta-ketoacyl-CoA synthase [Arabidopsis
  misc_feature (1)..(397): Homolog of NCBI NO: 15239981 NR Description: beta-ketoacyl-CoA synthase, putative [Arabidopsis

SEQ ID NO: 34225 - protein, 352 aa, Arabidopsis thaliana; identical to SEQ ID NO: 30635
  peptide (1)..(352): Ceres Seq. ID no. 13612926
  misc_feature (173)..(320): Pfam Name: Chalcone and stilbene synthases, C-terminal domain Pfam Description: Chalcone and stilbene synthases, C-terminal
  misc_feature (1)..(344): Homolog of NCBI NO: 19908404 NR Description: putative fatty acid elongase [Tropaeolum majus]
  misc_feature (1)..(347): Homolog of NCBI NO: 29417540 NR Description: beta-ketoacyl-CoA-synthase [Marchantia polymorpha]
  misc_feature (1)..(343): Homolog of NCBI NO: 11066477 NR Description: fatty acid elongase 1-like protein [Limnanthes
  misc_feature (1)..(351): Homolog of NCBI NO: 1045614 NR Description: beta-ketoacyl-CoA synthase
  misc_feature (1)..(349): Homolog of NCBI NO: 15225767 NR Description: beta-ketoacyl-CoA synthase, putative [Arabidopsis
  misc_feature (1)..(349): Homolog of NCBI NO: 9714501 NR Description: putative fatty acid elongase [Zea mays]
  misc_feature (1)..(352): Homolog of NCBI NO: 18377979 NR Description: putative beta-ketoacyl-CoA synthase [Arabidopsis
  misc_feature (1)..(352): Homolog of NCBI NO: 15219676 NR Description: beta-ketoacyl-CoA synthase, putative [Arabidopsis
  misc_feature (1)..(352): Homolog of NCBI NO: 14334714 NR Description: putative beta-ketoacyl-CoA synthase [Arabidopsis
  misc_feature (1)..(352): Homolog of NCBI NO: 15239981 NR Description: beta-ketoacyl-CoA synthase, putative [Arabidopsis

SEQ ID NO: 34226 - DNA, 1214 bp, Arabidopsis thaliana; identical to SEQ ID NO: 30636
  misc_feature (1)..(1214): Ceres Seq. ID no. 12333327
  misc_feature: MA Experiment ID: 108434 Result: Down-regulated in Transcription
  misc_feature: MA Experiment 108434 PARAMETER Experiment Name: At_Root_Tips_cDNA_P Parameter: Tissue Value: Root Tips
  misc_feature: MA Experiment ID: 108461 Result: Up-regulated in Transcription
  misc_feature: MA Experiment 108461 PARAMETER Experiment Name: At_Germinating_Seeds_cDNA_P Parameter: Age (day) Value: 1 vs. 0
  misc_feature: MA Experiment 108461 PARAMETER Experiment Name: At_Germinating_Seeds_cDNA_P Parameter: Tissue Value: Germinating Seeds
  misc_feature: MA Experiment ID: 108462 Result: Up-regulated in Transcription
  misc_feature: MA Experiment 108462 PARAMETER Experiment Name: At_Germinating_Seeds_cDNA_P Parameter: Age (day) Value: 2 vs. 0
  misc_feature: MA Experiment 108462 PARAMETER Experiment Name: At_Germinating_Seeds_cDNA_P Parameter: Tissue Value: Germinating Seeds
  misc_feature: MA Experiment ID: 108463 Result: Up-regulated in Transcription
  misc_feature: MA Experiment 108463 PARAMETER Experiment Name: At_Germinating_Seeds_cDNA_P Parameter: Age (day) Value: 3 vs. 0
  misc_feature: MA Experiment 108463 PARAMETER Experiment Name: At_Germinating_Seeds_cDNA_P Parameter: Tissue Value: Germinating Seeds
  misc_feature: MA Experiment ID: 108577 Result: Down-regulated in Transcription
  misc_feature: MA Experiment 108577 PARAMETER Experiment Name: At_42deg_Heat_cDNA_P Parameter: Temperature (deg C) Value: 42 vs. 22
  misc_feature: MA Experiment 108577 PARAMETER Experiment Name: At_42deg_Heat_cDNA_P Parameter: Timepoint (hr) Value: 6
  misc_feature: MA Experiment 108577 PARAMETER Experiment Name: At_42deg_Heat_cDNA_P Parameter: Tissue Value: Aerial
  misc_feature: MA Experiment ID: 108668 Result: Down-regulated in Transcription
  misc_feature: MA Experiment 108668 PARAMETER Experiment Name: At_2mM_SA_cDNA_P Parameter: Plant Line Value: WS
  misc_feature: MA Experiment 108668 PARAMETER Experiment Name: At_2mM_SA_cDNA_P Parameter: Timepoint (hr) Value: 6
  misc_feature: MA Experiment 108668 PARAMETER Experiment Name: At_2mM_SA_cDNA_P Parameter: Treatment Value: 2mM SA vs. No Treatment
  misc_feature: MA Experiment ID: 20000069 Result: Down-regulated in Transcription
  misc_feature: MA Experiment 20000069 PARAMETER Experiment Name: At_100uM_ABA_Mutants_cDNA_P Parameter: Plant Line Value: CS23
  misc_feature: MA Experiment 20000069 PARAMETER Experiment Name: At_100uM_ABA_Mutants_cDNA_P Parameter: Timepoint (hr) Value: 6
  misc_feature: MA Experiment 20000069 PARAMETER Experiment Name: At_100uM_ABA_Mutants_cDNA_P Parameter: Tissue Value: Aerial
  misc_feature: MA Experiment 20000069 PARAMETER Experiment Name: At_100uM_ABA_Mutants_cDNA_P Parameter: Treatment Value: 100uM ABA vs. No Treatment
  misc_feature: MA Experiment ID: 20000089 Result: Down-regulated in Transcription
  misc_feature: MA Experiment ID: 20000090 Result: Down-regulated in Transcription
  misc_feature: MA Experiment ID: 20000179 Result: Up-regulated in Transcription
  misc_feature: MA Experiment 20000179 PARAMETER Experiment Name: At_Germinating_Seeds_P Parameter: Age (hr) Value: 6 vs. 0
  misc_feature: MA Experiment 20000179 PARAMETER Experiment Name: At_Germinating_Seeds_P Parameter: Tissue Value: Germinating Seeds
  misc_feature: MA Experiment ID: 20000180 Result: Up-regulated in Transcription
  misc_feature: MA Experiment 20000180 PARAMETER Experiment Name: At_Germinating_Seeds_P Parameter: Age (hr) Value: 24 vs. 0
  misc_feature: MA Experiment 20000180 PARAMETER Experiment Name: At_Germinating_Seeds_P Parameter: Tissue Value: Germinating Seeds
  misc_feature: MA Experiment ID: 20000182 Result: Down-regulated in Transcription
  misc_feature: MA Experiment 20000182 PARAMETER Experiment Name: At_2mM_SA_P Parameter: Age (day) Value: 14
  misc_feature: MA Experiment 20000182 PARAMETER Experiment Name: At_2mM_SA_P Parameter: Organism Value: A. thaliana
  misc_feature: MA Experiment 20000182 PARAMETER Experiment Name: At_2mM_SA_P Parameter: Plant Line Value: WS
  misc_feature: MA Experiment 20000182 PARAMETER Experiment Name: At_2mM_SA_P Parameter: Timepoint (hr) Value: 6
  misc_feature: MA Experiment 20000182 PARAMETER Experiment Name: At_2mM_SA_P Parameter: Tissue Value: Aerial
  misc_feature: MA Experiment 20000182 PARAMETER Experiment Name: At_2mM_SA_P Parameter: Treatment Value: 2mM SA vs. No Treatment
  misc_feature: MA Experiment ID: 20000439 Result: Up-regulated in Transcription
  misc_feature: MA Experiment 20000439 PARAMETER Experiment Name: At_Roots__P Parameter: Age (day) Value: 14 vs. 21
  misc_feature: MA Experiment 20000439 PARAMETER Experiment Name: At_Roots__P Parameter: Organism Value: A. thaliana
  misc_feature: MA Experiment 20000439 PARAMETER Experiment Name: At_Roots__P Parameter: Tissue Value: Roots vs. Whole Plant
  misc_feature: MA Experiment ID: 20001248 Result: Down-regulated in Transcription
  misc_feature: MA Experiment 20001248 PARAMETER Experiment Name: At_Far-red-induction_P Parameter: Age (day) Value: 7
  misc_feature: MA Experiment 20001248 PARAMETER Experiment Name: At_Far-red-induction_P Parameter: Light Value: Far-red vs. White
  misc_feature: MA Experiment 20001248 PARAMETER Experiment Name: At_Far-red-induction_P Parameter: Organism Value: A. thaliana
  misc_feature: MA Experiment 20001248 PARAMETER Experiment Name: At_Far-red-induction_P Parameter: Plant Line Value: Columbia
  misc_feature: MA Experiment 20001248 PARAMETER Experiment Name: At_Far-red-induction_P Parameter: Timepoint (hr) Value: 4
  misc_feature: MA Experiment 20001248 PARAMETER Experiment Name: At_Far-red-induction_P Parameter: Tissue Value: Whole Plant

SEQ ID NO: 34227 - protein, 171 aa, Arabidopsis thaliana; identical to SEQ ID NO: 30637
  peptide (1)..(171): Ceres Seq. ID no. 12333328
  misc_feature (27)..(87): Pfam Name: bZIP transcription factor Pfam Description: bZIP transcription factor
  misc_feature (1)..(171): Homolog of NCBI NO: 24460973 NR Description: bZIP transcription factor [Capsicum chinense]
  misc_feature (1)..(171): Homolog of NCBI NO: 16580130 NR Description: bZIP transcription factor BZI-2 [Nicotiana
  misc_feature (1)..(171): Homolog of NCBI NO: 4457221 NR Description: putative bZIP DNA-binding protein [Capsicum
  misc_feature (1)..(166): Homolog of NCBI NO: 15222223 NR Description: bZIP transcription factor ATB2, putative; protein
  misc_feature (1)..(171): Homolog of NCBI NO: 10443481 NR Description: transcription factor GBF5 [Arabidopsis thaliana]
  misc_feature (1)..(171): Homolog of NCBI NO: 15224118 NR Description: bZIP family transcription factor

SEQ ID NO: 34228 - protein, 136 aa, Arabidopsis thaliana; identical to SEQ ID NO: 30638
  peptide (1)..(136): Ceres Seq. ID no. 12333329
  misc_feature (1)..(52): Pfam Name: bZIP transcription factor Pfam Description: bZIP transcription factor
  misc_feature (1)..(136): Homolog of NCBI NO: 24460973 NR Description: bZIP transcription factor [Capsicum chinense]
  misc_feature (1)..(136): Homolog of NCBI NO: 16580130 NR Description: bZIP transcription factor BZI-2 [Nicotiana
  misc_feature (1)..(136): Homolog of NCBI NO: 4457221 NR Description: putative bZIP DNA-binding protein [Capsicum
  misc_feature (1)..(131): Homolog of NCBI NO: 15222223 NR Description: bZIP transcription factor ATB2, putative; protein
  misc_feature (1)..(136): Homolog of NCBI NO: 10443481 NR Description: transcription factor GBF5 [Arabidopsis thaliana]
  misc_feature (1)..(136): Homolog of NCBI NO: 15224118 NR Description: bZIP family transcription factor

SEQ ID NO: 34229 - protein, 124 aa, Arabidopsis thaliana; identical to SEQ ID NO: 30639
  peptide (1)..(124): Ceres Seq. ID no. 12333330
  misc_feature (1)..(124): Homolog of NCBI NO: 24460973 NR Description: bZIP transcription factor [Capsicum chinense]
  misc_feature (1)..(124): Homolog of NCBI NO: 16580130 NR Description: bZIP transcription factor BZI-2 [Nicotiana
  misc_feature (1)..(124): Homolog of NCBI NO: 4457221 NR Description: putative bZIP DNA-binding protein [Capsicum
  misc_feature (1)..(119): Homolog of NCBI NO: 15222223 NR Description: bZIP transcription factor ATB2, putative; protein
  misc_feature (1)..(124): Homolog of NCBI NO: 10443481 NR Description: transcription factor GBF5 [Arabidopsis thaliana]
  misc_feature (1)..(124): Homolog of NCBI NO: 15224118 NR Description: bZIP family transcription factor

SEQ ID NO: 34230 - DNA, 1093 bp, Arabidopsis thaliana; identical to SEQ ID NO: 30640
  misc_feature (1)..(1093): Ceres Seq. ID no. 12357818
  misc_feature: MA Experiment ID: 20000180 Result: Down-regulated in Transcription
  misc_feature: MA Experiment 20000180 PARAMETER Experiment Name: At_Germinating_Seeds_P Parameter: Age (hr) Value: 24 vs. 0
  misc_feature: MA Experiment 20000180 PARAMETER Experiment Name: At_Germinating_Seeds_P Parameter: Tissue Value: Germinating Seeds
  misc_feature: MA Experiment ID: 20000794 Result: Up-regulated in Transcription
  misc_feature: MA Experiment 20000794 PARAMETER Experiment Name: At_Petals_P Parameter: Age (day) Value: 23-25 days
  misc_feature: MA Experiment 20000794 PARAMETER Experiment Name: At_Petals_P Parameter: Plant Line Value: WS
  misc_feature: MA Experiment 20000794 PARAMETER Experiment Name: At_Petals_P Parameter: Tissue Value: Petals vs. Whole plant

SEQ ID NO: 34231 - protein, 246 aa, Arabidopsis thaliana; identical to SEQ ID NO: 26243
  peptide (1)..(246): Ceres Seq. ID no. 12357819
  misc_feature (32)..(220): Pfam Name: Proteasome A-type and B-type Pfam Description: Proteasome A-type and B-type
  misc_feature (1)..(246): Homolog of NCBI NO: 12229948 NR Description: Proteasome subunit alpha type 6 (20S proteasome
  misc_feature (1)..(246): Homolog of NCBI NO: 3421070 NR Description: 20S proteasome subunit PAA1 [Arabidopsis thaliana]
  misc_feature (2)..(246): Homolog of NCBI NO: 2511588 NR Description: multicatalytic endopeptidase complex, proteasome
  misc_feature (1)..(246): Homolog of NCBI NO: 20260140 NR Description: multicatalytic endopeptidase complex alpha
  misc_feature (1)..(246): Homolog of NCBI NO: 15238554 NR Description: 20S proteasome alpha subunit A1 (PAA1)
  misc_feature (1)..(246): Homolog of NCBI NO: 15224993 NR Description: 20S proteasome alpha subunit A2 (PAA2)

SEQ ID NO: 34232 - protein, 164 aa, Arabidopsis thaliana; identical to SEQ ID NO: 26244
  peptide (1)..(164): Ceres Seq. ID no. 12357820
  misc_feature (1)..(138): Pfam Name: Proteasome A-type and B-type Pfam Description: Proteasome A-type and B-type
  misc_feature (1)..(164): Homolog of NCBI NO: 12229948 NR Description: Proteasome subunit alpha type 6 (20S proteasome
  misc_feature (1)..(164): Homolog of NCBI NO: 3421070 NR Description: 20S proteasome subunit PAA1 [Arabidopsis thaliana]
  misc_feature (1)..(164): Homolog of NCBI NO: 2511588 NR Description: multicatalytic endopeptidase complex, proteasome
  misc_feature (1)..(164): Homolog of NCBI NO: 20260140 NR Description: multicatalytic endopeptidase complex alpha
  misc_feature (1)..(164): Homolog of NCBI NO: 15238554 NR Description: 20S proteasome alpha subunit A1 (PAA1)
  misc_feature (1)..(164): Homolog of NCBI NO: 15224993 NR Description: 20S proteasome alpha subunit A2 (PAA2)

SEQ ID NO: 34233 - protein, 138 aa, Arabidopsis thaliana; identical to SEQ ID NO: 30643
  peptide (1)..(138): Ceres Seq. ID no. 12357821
  misc_feature (1)..(112): Pfam Name: Proteasome A-type and B-type Pfam Description: Proteasome A-type and B-type
  misc_feature (1)..(138): Homolog of NCBI NO: 12229948 NR Description: Proteasome subunit alpha type 6 (20S proteasome
  misc_feature (1)..(138): Homolog of NCBI NO: 3421070 NR Description: 20S proteasome subunit PAA1 [Arabidopsis thaliana]
  misc_feature (1)..(138): Homolog of NCBI NO: 2511588 NR Description: multicatalytic endopeptidase complex, proteasome
  misc_feature (1)..(138): Homolog of NCBI NO: 20260140 NR Description: multicatalytic endopeptidase complex alpha
  misc_feature (1)..(138): Homolog of NCBI NO: 15238554 NR Description: 20S proteasome alpha subunit A1 (PAA1)
  misc_feature (1)..(138): Homolog of NCBI NO: 15224993 NR Description: 20S proteasome alpha subunit A2 (PAA2)

SEQ ID NO: 34234 - DNA, 1590 bp, Arabidopsis thaliana; identical to SEQ ID NO: 30644
  misc_feature (1)..(1590): Ceres Seq. ID no. 13580307
  misc_feature: MA Experiment ID: 20000794 Result: Up-regulated in Transcription
  misc_feature: MA Experiment 20000794 PARAMETER Experiment Name: At_Petals_P Parameter: Age (day) Value: 23-25 days
  misc_feature: MA Experiment 20000794 PARAMETER Experiment Name: At_Petals_P Parameter: Plant Line Value: WS
  misc_feature: MA Experiment 20000794 PARAMETER Experiment Name: At_Petals_P Parameter: Tissue Value: Petals vs. Whole plant

SEQ ID NO: 34235 - protein, 470 aa, Arabidopsis thaliana; identical to SEQ ID NO: 30645
  peptide (1)..(470): Ceres Seq. ID no. 13580308
  misc_feature (4)..(470): Pfam Name: 56kDa selenium binding protein (SBP56) Pfam Description: 56kDa selenium binding protein (SBP56)
  misc_feature (7)..(470): Homolog of NCBI NO: 15229520 NR Description: selenium binding protein -related [Arabidopsis
  misc_feature (7)..(470): Homolog of NCBI NO: 15485716 NR Description: selenium binding protein [Lotus japonicus]
  misc_feature (63)..(470): Homolog of NCBI NO: 20340239 NR Description: putative selenium-binding protein [Thellungiella
  misc_feature (7)..(470): Homolog of NCBI NO: 15485720 NR Description: selenium binding protein [Medicago sativa]
  misc_feature (7)..(470): Homolog of NCBI NO: 25348077 NR Description: selenium-binding protein like [imported] -
  misc_feature (7)..(470): Homolog of NCBI NO: 22530900 NR Description: selenium-binding protein-like protein
  misc_feature (7)..(470): Homolog of NCBI NO: 15236386 NR Description: selenium-binding protein like [Arabidopsis
  misc_feature (7)..(470): Homolog of NCBI NO: 13605825 NR Description: AT4g14040/dl3061c [Arabidopsis thaliana]
  misc_feature (6)..(470): Homolog of NCBI NO: 15236385 NR Description: selenium-binding protein like [Arabidopsis
  misc_feature (1)..(470): Homolog of NCBI NO: 15485232 NR Description: selenium binding protein [Arabidopsis thaliana]

SEQ ID NO: 34236 - protein, 469 aa, Arabidopsis thaliana; identical to SEQ ID NO: 30646
  peptide (1)..(469): Ceres Seq. ID no. 13580309
  misc_feature (3)..(469): Pfam Name: 56kDa selenium binding protein (SBP56) Pfam Description: 56kDa selenium binding protein (SBP56)
  misc_feature (6)..(469): Homolog of NCBI NO: 15229520 NR Description: selenium binding protein -related [Arabidopsis
  misc_feature (6)..(469): Homolog of NCBI NO: 15485716 NR Description: selenium binding protein [Lotus japonicus]
  misc_feature (62)..(469): Homolog of NCBI NO: 20340239 NR Description: putative selenium-binding protein [Thellungiella
  misc_feature (6)..(469): Homolog of NCBI NO: 15485720 NR Description: selenium binding protein [Medicago sativa]
  misc_feature (6)..(469): Homolog of NCBI NO: 25348077 NR Description: selenium-binding protein like [imported] -
  misc_feature (6)..(469): Homolog of NCBI NO: 22530900 NR Description: selenium-binding protein-like protein
  misc_feature (6)..(469): Homolog of NCBI NO: 15236386 NR Description: selenium-binding protein like [Arabidopsis
  misc_feature (6)..(469): Homolog of NCBI NO: 13605825 NR Description: AT4g14040/dl3061c [Arabidopsis thaliana]
  misc_feature (5)..(469): Homolog of NCBI NO: 15236385 NR Description: selenium-binding protein like [Arabidopsis
  misc_feature (1)..(469): Homolog of NCBI NO: 15485232 NR Description: selenium binding protein [Arabidopsis thaliana]

SEQ ID NO: 34237 - protein, 454 aa, Arabidopsis thaliana; identical to SEQ ID NO: 30647
  peptide (1)..(454): Ceres Seq. ID no. 13580310
  misc_feature (1)..(454): Pfam Name: 56kDa selenium binding protein (SBP56) Pfam Description: 56kDa selenium binding protein (SBP56)
  misc_feature (1)..(454): Homolog of NCBI NO: 15229520 NR Description: selenium binding protein -related [Arabidopsis
  misc_feature (1)..(454): Homolog of NCBI NO: 15485716 NR Description: selenium binding protein [Lotus japonicus]
  misc_feature (47)..(454): Homolog of NCBI NO: 20340239 NR Description: putative selenium-binding protein [Thellungiella
  misc_feature (1)..(454): Homolog of NCBI NO: 15485720 NR Description: selenium binding protein [Medicago sativa]
  misc_feature (1)..(454): Homolog of NCBI NO: 25348077 NR Description: selenium-binding protein like [imported] -
  misc_feature (1)..(454): Homolog of NCBI NO: 22530900 NR Description: selenium-binding protein-like protein
  misc_feature (1)..(454): Homolog of NCBI NO: 15236386 NR Description: selenium-binding protein like [Arabidopsis
  misc_feature (1)..(454): Homolog of NCBI NO: 13605825 NR Description: AT4g14040/dl3061c [Arabidopsis thaliana]
  misc_feature (1)..(454): Homolog of NCBI NO: 15236385 NR Description: selenium-binding protein like [Arabidopsis
  misc_feature (1)..(454): Homolog of NCBI NO: 15485232 NR Description: selenium binding protein [Arabidopsis thaliana]

SEQ ID NO: 34238 - DNA, 1508 bp, Arabidopsis thaliana; identical to SEQ ID NO: 30648
  misc_feature (1)..(1508): Ceres Seq. ID no. 12388503
  misc_feature: MA Experiment ID: 108462 Result: Down-regulated in Transcription
  misc_feature: MA Experiment 108462 PARAMETER Experiment Name: At_Germinating_Seeds_cDNA_P Parameter: Age (day) Value: 2 vs. 0
  misc_feature: MA Experiment 108462 PARAMETER Experiment Name: At_Germinating_Seeds_cDNA_P Parameter: Tissue Value: Germinating Seeds
  misc_feature: MA Experiment ID: 108463 Result: Down-regulated in Transcription
  misc_feature: MA Experiment 108463 PARAMETER Experiment Name: At_Germinating_Seeds_cDNA_P Parameter: Age (day) Value: 3 vs. 0
  misc_feature: MA Experiment 108463 PARAMETER Experiment Name: At_Germinating_Seeds_cDNA_P Parameter: Tissue Value: Germinating Seeds
  misc_feature: MA Experiment ID: 108464 Result: Down-regulated in Transcription
  misc_feature: MA Experiment 108464 PARAMETER Experiment Name: At_Germinating_Seeds_cDNA_P Parameter: Age (day) Value: 4 vs. 0
  misc_feature: MA Experiment 108464 PARAMETER Experiment Name: At_Germinating_Seeds_cDNA_P Parameter: Tissue Value: Germinating Seeds
  misc_feature: MA Experiment ID: 108488 Result: Down-regulated in Transcription
  misc_feature: MA Experiment ID: 108573 Result: Up-regulated in Transcription
  misc_feature: MA Experiment 108573 PARAMETER Experiment Name: At_Drought_cDNA_P Parameter: Timepoint (hr) Value: 6
  misc_feature: MA Experiment 108573 PARAMETER Experiment Name: At_Drought_cDNA_P Parameter: Tissue Value: Aerial
  misc_feature: MA Experiment 108573 PARAMETER Experiment Name: At_Drought_cDNA_P Parameter: Treatment Value: Drought vs. No Drought
  misc_feature: MA Experiment ID: 20000071 Result: Up-regulated in Transcription
  misc_feature: MA Experiment 20000071 PARAMETER Experiment Name: At_100uM_ABA_Mutants_cDNA_P Parameter: Plant Line Value: CS8104
  misc_feature: MA Experiment 20000071 PARAMETER Experiment Name: At_100uM_ABA_Mutants_cDNA_P Parameter: Timepoint (hr) Value: 6
  misc_feature: MA Experiment 20000071 PARAMETER Experiment Name: At_100uM_ABA_Mutants_cDNA_P Parameter: Tissue Value: Aerial
  misc_feature: MA Experiment 20000071 PARAMETER Experiment Name: At_100uM_ABA_Mutants_cDNA_P Parameter: Treatment Value: 100uM ABA vs. No Treatment
  misc_feature: MA Experiment ID: 20000072 Result: Up-regulated in Transcription
  misc_feature: MA Experiment 20000072 PARAMETER Experiment Name: At_100uM_ABA_Mutants_cDNA_P Parameter: Plant Line Value: CS8105
  misc_feature: MA Experiment 20000072 PARAMETER Experiment Name: At_100uM_ABA_Mutants_cDNA_P Parameter: Timepoint (hr) Value: 6
  misc_feature: MA Experiment 20000072 PARAMETER Experiment Name: At_100uM_ABA_Mutants_cDNA_P Parameter: Tissue Value: Aerial
  misc_feature: MA Experiment 20000072 PARAMETER Experiment Name: At_100uM_ABA_Mutants_cDNA_P Parameter: Treatment Value: 100uM ABA vs. No Treatment
  misc_feature: MA Experiment ID: 20000117 Result: Up-regulated in Transcription
  misc_feature: MA Experiment 20000117 PARAMETER Experiment Name: At_100uM_ABA_Mutants_cDNA_P Parameter: Plant Line Value: Columbia
  misc_feature: MA Experiment 20000117 PARAMETER Experiment Name: At_100uM_ABA_Mutants_cDNA_P Parameter: Timepoint (hr) Value: 6
  misc_feature: MA Experiment 20000117 PARAMETER Experiment Name: At_100uM_ABA_Mutants_cDNA_P Parameter: Tissue Value: Aerial
  misc_feature: MA Experiment 20000117 PARAMETER Experiment Name: At_100uM_ABA_Mutants_cDNA_P Parameter: Treatment Value: 100uM ABA vs. No Treatment
  misc_feature: MA Experiment ID: 20000184 Result: Down-regulated in Transcription
  misc_feature: MA Experiment 20000184 PARAMETER Experiment Name: At_Shoots__P Parameter: Age (day) Value: 7
  misc_feature: MA Experiment 20000184 PARAMETER Experiment Name: At_Shoots__P Parameter: Tissue Value: Shoots vs. Whole Plant
  misc_feature: MA Experiment ID: 20000438 Result: Down-regulated in Transcription
  misc_feature: MA Experiment 20000438 PARAMETER Experiment Name: At_Shoots__P Parameter: Age (day) Value: 14
  misc_feature: MA Experiment 20000438 PARAMETER Experiment Name: At_Shoots__P Parameter: Tissue Value: Shoots vs. Whole Plant
  misc_feature: MA Experiment ID: 20001557 Result: Up-regulated in Transcription
  misc_feature: MA Experiment 20001557 PARAMETER Experiment Name: At_Drought_Soil_Dry_P Parameter: Age (day) Value: 27
  misc_feature: MA Experiment 20001557 PARAMETER Experiment Name: At_Drought_Soil_Dry_P Parameter: Organism Value: A. thaliana
  misc_feature: MA Experiment 20001557 PARAMETER Experiment Name: At_Drought_Soil_Dry_P Parameter: Plant Line Value: WS
  misc_feature: MA Experiment 20001557 PARAMETER Experiment Name: At_Drought_Soil_Dry_P Parameter: Post Timepoint (hr) Value: 3
  misc_feature: MA Experiment 20001557 PARAMETER Experiment Name: At_Drought_Soil_Dry_P Parameter: Post-Treatment Value: Re-Water vs. No Drought
  misc_feature: MA Experiment 20001557 PARAMETER Experiment Name: At_Drought_Soil_Dry_P Parameter: Timepoint (day) Value: 13
  misc_feature: MA Experiment 20001557 PARAMETER Experiment Name: At_Drought_Soil_Dry_P Parameter: Treatment Value: Drought vs. No Drought
  misc_feature: MA Experiment ID: 20001905 Result: Up-regulated in Transcription
  misc_feature: MA Experiment 20001905 PARAMETER Experiment Name: At_Drought_Reproduction_P Parameter: Age (day) Value: 40
  misc_feature: MA Experiment 20001905 PARAMETER Experiment Name: At_Drought_Reproduction_P Parameter: Organism Value: A. thaliana
  misc_feature: MA Experiment 20001905 PARAMETER Experiment Name: At_Drought_Reproduction_P Parameter: Plant Line Value: WS
  misc_feature: MA Experiment 20001905 PARAMETER Experiment Name: At_Drought_Reproduction_P Parameter: Timepoint (day) Value: 10
  misc_feature: MA Experiment 20001905 PARAMETER Experiment Name: At_Drought_Reproduction_P Parameter: Tissue Value: Rosettes
  misc_feature: MA Experiment 20001905 PARAMETER Experiment Name: At_Drought_Reproduction_P Parameter: Treatment Value: Drought vs. No Drought

SEQ ID NO: 34239 - protein, 323 aa, Arabidopsis thaliana; identical to SEQ ID NO: 30649
  peptide (1)..(323): Ceres Seq. ID no. 12388504
  misc_feature (1)..(318): Homolog of NCBI NO: 21594326 NR Description: mitochondrial carrier-like protein [Arabidopsis
  misc_feature (16)..(318): Homolog of NCBI NO: 37534064 NR Description: putative Tricarboxylate transport protein,
  misc_feature (71)..(318): Homolog of NCBI NO: 34894824 NR Description: P0554D10.15 [Oryza sativa (japonica
  misc_feature (1)..(214): Homolog of NCBI NO: 11358653 NR Description: probable mitochondrial carrier protein -
  misc_feature (1)..(323): Homolog of NCBI NO: 12278522 NR Description: putative mitochondrial carrier protein
  misc_feature (1)..(323): Homolog of NCBI NO: 18496651 NR Description: putative mitochondrial carrier protein [Triticum
  misc_feature (1)..(323): Homolog of NCBI NO: 12061241 NR Description: 36I5.1 [Oryza sativa (japonica cultivar-group)]
  misc_feature (1)..(323): Homolog of NCBI NO: 21326111 NR Description: putative mitochondrial carrier protein [Sorghum
  misc_feature (1)..(323): Homolog of NCBI NO: 21553961 NR Description: putative mitochondrial carrier protein
  misc_feature (1)..(323): Homolog of NCBI NO: 18417739 NR Description: mitochondrial carrier protein family
  misc_feature (1)..(318): Homolog of NCBI NO: 21594326 NR Description: mitochondrial carrier-like protein [Arabidopsis
  misc_feature (16)..(318): Homolog of NCBI NO: 37534064 NR Description: putative Tricarboxylate transport protein,
  misc_feature (71)..(318): Homolog of NCBI NO: 34894824 NR Description: P0554D10.15 [Oryza sativa (japonica
  misc_feature (1)..(214): Homolog of NCBI NO: 11358653 NR Description: probable mitochondrial carrier protein -
  misc_feature (1)..(323): Homolog of NCBI NO: 12278522 NR Description: putative mitochondrial carrier protein
  misc_feature (1)..(323): Homolog of NCBI NO: 18496651 NR Description: putative mitochondrial carrier protein [Triticum
  misc_feature (1)..(323): Homolog of NCBI NO: 12061241 NR Description: 36I5.1 [Oryza sativa (japonica cultivar-group)]
  misc_feature (1)..(323): Homolog of NCBI NO: 21326111 NR Description: putative mitochondrial carrier protein [Sorghum
  misc_feature (1)..(323): Homolog of NCBI NO: 21553961 NR Description: putative mitochondrial carrier protein
  misc_feature (1)..(323): Homolog of NCBI NO: 18417739 NR Description: mitochondrial carrier protein family

SEQ ID NO: 34240 - protein, 191 aa, Arabidopsis thaliana; identical to SEQ ID NO: 30650
  peptide (1)..(191): Ceres Seq. ID no. 12388505
  misc_feature (1)..(186): Homolog of NCBI NO: 21594326 NR Description: mitochondrial carrier-like protein [Arabidopsis
  misc_feature (1)..(186): Homolog of NCBI NO: 37534064 NR Description: putative Tricarboxylate transport protein,
  misc_feature (1)..(186): Homolog of NCBI NO: 34894824 NR Description: P0554D10.15 [Oryza sativa (japonica
  misc_feature (1)..(82): Homolog of NCBI NO: 11358653 NR Description: probable mitochondrial carrier protein -
  misc_feature (1)..(191): Homolog of NCBI NO: 12278522 NR Description: putative mitochondrial carrier protein
  misc_feature (1)..(191): Homolog of NCBI NO: 18496651 NR Description: putative mitochondrial carrier protein [Triticum
  misc_feature (1)..(191): Homolog of NCBI NO: 12061241 NR Description: 36I5.1 [Oryza sativa (japonica cultivar-group)]
  misc_feature (1)..(191): Homolog of NCBI NO: 21326111 NR Description: putative mitochondrial carrier protein [Sorghum
  misc_feature (1)..(191): Homolog of NCBI NO: 21553961 NR Description: putative mitochondrial carrier protein
  misc_feature (1)..(191): Homolog of NCBI NO: 18417739 NR Description: mitochondrial carrier protein family
  misc_feature (1)..(186): Homolog of NCBI NO: 21594326 NR Description: mitochondrial carrier-like protein [Arabidopsis
  misc_feature (1)..(186): Homolog of NCBI NO: 37534064 NR Description: putative Tricarboxylate transport protein,
  misc_feature (1)..(186): Homolog of NCBI NO: 34894824 NR Description: P0554D10.15 [Oryza sativa (japonica
  misc_feature (1)..(82): Homolog of NCBI NO: 11358653 NR Description: probable mitochondrial carrier protein -
  misc_feature (1)..(191): Homolog of NCBI NO: 12278522 NR Description: putative mitochondrial carrier protein
  misc_feature (1)..(191): Homolog of NCBI NO: 18496651 NR Description: putative mitochondrial carrier protein [Triticum
  misc_feature (1)..(191): Homolog of NCBI NO: 12061241 NR Description: 36I5.1 [Oryza sativa (japonica cultivar-group)]
  misc_feature (1)..(191): Homolog of NCBI NO: 21326111 NR Description: putative mitochondrial carrier protein [Sorghum
  misc_feature (1)..(191): Homolog of NCBI NO: 21553961 NR Description: putative mitochondrial carrier protein
  misc_feature (1)..(191): Homolog of NCBI NO: 18417739 NR Description: mitochondrial carrier protein family

SEQ ID NO: 34241 - protein, 170 aa, Arabidopsis thaliana; identical to SEQ ID NO: 30651
  peptide (1)..(170): Ceres Seq. ID no. 12388506
  misc_feature (1)..(165): Homolog of NCBI NO: 21594326 NR Description: mitochondrial carrier-like protein [Arabidopsis
  misc_feature (1)..(165): Homolog of NCBI NO: 37534064 NR Description: putative Tricarboxylate transport protein,
  misc_feature (1)..(165): Homolog of NCBI NO: 34894824 NR Description: P0554D10.15 [Oryza sativa (japonica
  misc_feature (1)..(61): Homolog of NCBI NO: 11358653 NR Description: probable mitochondrial carrier protein -
  misc_feature (1)..(170): Homolog of NCBI NO: 12278522 NR Description: putative mitochondrial carrier protein
  misc_feature (1)..(170): Homolog of NCBI NO: 18496651 NR Description: putative mitochondrial carrier protein [Triticum
  misc_feature (1)..(170): Homolog of NCBI NO: 12061241 NR Description: 36I5.1 [Oryza sativa (japonica cultivar-group)]
  misc_feature (1)..(170): Homolog of NCBI NO: 21326111 NR Description: putative mitochondrial carrier protein [Sorghum
  misc_feature (1)..(170): Homolog of NCBI NO: 21553961 NR Description: putative mitochondrial carrier protein
  misc_feature (1)..(170): Homolog of NCBI NO: 18417739 NR Description: mitochondrial carrier protein family
  misc_feature (1)..(165): Homolog of NCBI NO: 21594326 NR Description: mitochondrial carrier-like protein [Arabidopsis
  misc_feature (1)..(165): Homolog of NCBI NO: 37534064 NR Description: putative Tricarboxylate transport protein,
  misc_feature (1)..(165): Homolog of NCBI NO: 34894824 NR Description: P0554D10.15 [Oryza sativa (japonica
  misc_feature (1)..(61): Homolog of NCBI NO: 11358653 NR Description: probable mitochondrial carrier protein -
  misc_feature (1)..(170): Homolog of NCBI NO: 12278522 NR Description: putative mitochondrial carrier protein
  misc_feature (1)..(170): Homolog of NCBI NO: 18496651 NR Description: putative mitochondrial carrier protein [Triticum
  misc_feature (1)..(170): Homolog of NCBI NO: 12061241 NR Description: 36I5.1 [Oryza sativa (japonica cultivar-group)]
  misc_feature (1)..(170): Homolog of NCBI NO: 21326111 NR Description: putative mitochondrial carrier protein [Sorghum
  misc_feature (1)..(170): Homolog of NCBI NO: 21553961 NR Description: putative mitochondrial carrier protein
  misc_feature (1)..(170): Homolog of NCBI NO: 18417739 NR Description: mitochondrial carrier protein family

SEQ ID NO: 34242 - DNA, 1196 bp, Arabidopsis thaliana; identical to SEQ ID NO: 30652
  misc_feature (1)..(1196): Ceres Seq. ID no. 13509751
  misc_feature: MA Experiment ID: 108573 Result: Up-regulated in Transcription
  misc_feature: MA Experiment 108573 PARAMETER Experiment Name: At_Drought_cDNA_P Parameter: Timepoint (hr) Value: 6
  misc_feature: MA Experiment 108573 PARAMETER Experiment Name: At_Drought_cDNA_P Parameter: Tissue Value: Aerial
  misc_feature: MA Experiment 108573 PARAMETER Experiment Name: At_Drought_cDNA_P Parameter: Treatment Value: Drought vs. No Drought
  misc_feature: MA Experiment ID: 20000180 Result: Up-regulated in Transcription
  misc_feature: MA Experiment 20000180 PARAMETER Experiment Name: At_Germinating_Seeds_P Parameter: Age (hr) Value: 24 vs. 0
  misc_feature: MA Experiment 20000180 PARAMETER Experiment Name: At_Germinating_Seeds_P Parameter: Tissue Value: Germinating Seeds

SEQ ID NO: 34243 - protein, 272 aa, Arabidopsis thaliana; identical to SEQ ID NO: 30653
  peptide (1)..(272): Ceres Seq. ID no. 13509752
  misc_feature (12)..(272): Homolog of NCBI NO: 24642653 NR Description: CG32566-PB [Drosophila melanogaster]
  misc_feature (9)..(272): Homolog of NCBI NO: 34858413 NR Description: similar to RIKEN cDNA 1200016B17 [Rattus
  misc_feature (9)..(272): Homolog of NCBI NO: 27229051 NR Description: RIKEN cDNA 1200016B17 [Mus musculus]
  misc_feature (8)..(272): Homolog of NCBI NO: 8922416 NR Description: hypothetical protein FLJ10420 [Homo sapiens]
  misc_feature (8)..(260): Homolog of NCBI NO: 10435511 NR Description: unnamed protein product [Homo sapiens]
  misc_feature (149)..(248): Homolog of NCBI NO: 25406749 NR Description: hypothetical protein [imported] - Arabidopsis
  misc_feature (7)..(272): Homolog of NCBI NO: 37535352 NR Description: unknown protein [Oryza sativa (japonica
  misc_feature (1)..(219): Homolog of NCBI NO: 25406749 NR Description: hypothetical protein [imported] - Arabidopsis
  misc_feature (1)..(272): Homolog of NCBI NO: 18379172 NR Description: expressed protein [Arabidopsis thaliana]
  misc_feature (1)..(250): Homolog of NCBI NO: 14596175 NR Description: Unknown protein [Arabidopsis thaliana]
  misc_feature (12)..(272): Homolog of NCBI NO: 24642653 NR Description: CG32566-PB [Drosophila melanogaster]
  misc_feature (9)..(272): Homolog of NCBI NO: 34858413 NR Description: similar to RIKEN cDNA 1200016B17 [Rattus
  misc_feature (9)..(272): Homolog of NCBI NO: 27229051 NR Description: RIKEN cDNA 1200016B17 [Mus musculus]
  misc_feature (8)..(272): Homolog of NCBI NO: 8922416 NR Description: hypothetical protein FLJ10420 [Homo sapiens]
  misc_feature (8)..(260): Homolog of NCBI NO: 10435511 NR Description: unnamed protein product [Homo sapiens]
  misc_feature (149)..(248): Homolog of NCBI NO: 25406749 NR Description: hypothetical protein [imported] - Arabidopsis
  misc_feature (7)..(272): Homolog of NCBI NO: 37535352 NR Description: unknown protein [Oryza sativa (japonica
  misc_feature (1)..(219): Homolog of NCBI NO: 25406749 NR Description: hypothetical protein [imported] - Arabidopsis
  misc_feature (1)..(272): Homolog of NCBI NO: 18379172 NR Description: expressed protein [Arabidopsis thaliana]
  misc_feature (1)..(250): Homolog of NCBI NO: 14596175 NR Description: Unknown protein [Arabidopsis thaliana]

SEQ ID NO: 34244 - DNA, 2435 bp, Arabidopsis thaliana; identical to SEQ ID NO: 30654
  misc_feature (1)..(2435): Ceres Seq. ID no. 12327293
  misc_feature: MA Experiment ID: 108577 Result: Down-regulated in Transcription
  misc_feature: MA Experiment 108577 PARAMETER Experiment Name: At_42deg_Heat_cDNA_P Parameter: Temperature (deg C) Value: 42 vs. 22
  misc_feature: MA Experiment 108577 PARAMETER Experiment Name: At_42deg_Heat_cDNA_P Parameter: Timepoint (hr) Value: 6
  misc_feature: MA Experiment 108577 PARAMETER Experiment Name: At_42deg_Heat_cDNA_P Parameter: Tissue Value: Aerial
  misc_feature: MA Experiment ID: 20000087 Result: Down-regulated in Transcription
  misc_feature: MA Experiment 20000087 PARAMETER Experiment Name: At_100uM_ABA_Mutants_cDNA_P Parameter: Plant Line Value: WS
  misc_feature: MA Experiment 20000087 PARAMETER Experiment Name: At_100uM_ABA_Mutants_cDNA_P Parameter: Timepoint (hr) Value: 6
  misc_feature: MA Experiment 20000087 PARAMETER Experiment Name: At_100uM_ABA_Mutants_cDNA_P Parameter: Tissue Value: Aerial
  misc_feature: MA Experiment 20000087 PARAMETER Experiment Name: At_100uM_ABA_Mutants_cDNA_P Parameter: Treatment Value: 100uM ABA vs. No Treatment
  misc_feature: MA Experiment ID: 20000111 Result: Down-regulated in Transcription
  misc_feature: MA Experiment 20000111 PARAMETER Experiment Name: At_42deg_Heat_cDNA_P Parameter: Temperature (deg C) Value: 42 vs. 22
  misc_feature: MA Experiment 20000111 PARAMETER Experiment Name: At_42deg_Heat_cDNA_P Parameter: Timepoint (hr) Value: 6
  misc_feature: MA Experiment 20000111 PARAMETER Experiment Name: At_42deg_Heat_cDNA_P Parameter: Tissue Value: Aerial
  misc_feature: MA Experiment ID: 20000173 Result: Down-regulated in Transcription
  misc_feature: MA Experiment 20000173 PARAMETER Experiment Name: At_42deg_Heat_P Parameter: Age (day) Value: 14
  misc_feature: MA Experiment 20000173 PARAMETER Experiment Name: At_42deg_Heat_P Parameter: Organism Value: A. thaliana
  misc_feature: MA Experiment 20000173 PARAMETER Experiment Name: At_42deg_Heat_P Parameter: Plant Line Value: WS
  misc_feature: MA Experiment 20000173 PARAMETER Experiment Name: At_42deg_Heat_P Parameter: Temperature (deg C) Value: 42 vs. 22
  misc_feature: MA Experiment 20000173 PARAMETER Experiment Name: At_42deg_Heat_P Parameter: Timepoint (hr) Value: 6
  misc_feature: MA Experiment 20000173 PARAMETER Experiment Name: At_42deg_Heat_P Parameter: Tissue Value: Aerial
  misc_feature: MA Experiment ID: 20000794 Result: Up-regulated in Transcription
  misc_feature: MA Experiment 20000794 PARAMETER Experiment Name: At_Petals_P Parameter: Age (day) Value: 23-25 days
  misc_feature: MA Experiment 20000794 PARAMETER Experiment Name: At_Petals_P Parameter: Plant Line Value: WS
  misc_feature: MA Experiment 20000794 PARAMETER Experiment Name: At_Petals_P Parameter: Tissue Value: Petals vs. Whole plant

SEQ ID NO: 34245 - protein, 727 aa, Arabidopsis thaliana; identical to SEQ ID NO: 30655
  peptide (1)..(727): Ceres Seq. ID no. 12327294
  misc_feature (85)..(525): Homolog of NCBI NO: 13591947 NR Description: cyclin G-associated kinase [Rattus norvegicus]
  misc_feature (87)..(525): Homolog of NCBI NO: 17375734 NR Description: Cyclin G-associated kinase
  misc_feature (87)..(525): Homolog of NCBI NO: 4885251 NR Description: cyclin G associated kinase [Homo sapiens]
  misc_feature (90)..(417): Homolog of NCBI NO: 40789031 NR Description: KIAA1048 protein [Homo sapiens]
  misc_feature (90)..(417): Homolog of NCBI NO: 29570780 NR Description: adaptor-associated kinase 1 [Homo sapiens]
  misc_feature (90)..(417): Homolog of NCBI NO: 12803719 NR Description: Similar to KIAA1048 protein [Homo sapiens]
  misc_feature (91)..(373): Homolog of NCBI NO: 28829923 NR Description: similar to Homo sapiens (Human). Hypothetical
  misc_feature (620)..(710): Homolog of NCBI NO: 7487297 NR Description: probable serine/threonine protein kinase
  misc_feature (638)..(727): Homolog of NCBI NO: 7487297 NR Description: probable serine/threonine protein kinase
  misc_feature (78)..(619): Homolog of NCBI NO: 7487297 NR Description: probable serine/threonine protein kinase

SEQ ID NO: 34246 - protein, 650 aa, Arabidopsis thaliana; identical to SEQ ID NO: 30656
  peptide (1)..(650): Ceres Seq. ID no. 12327295
  misc_feature (8)..(448): Homolog of NCBI NO: 13591947 NR Description: cyclin G-associated kinase [Rattus norvegicus]
  misc_feature (10)..(448): Homolog of NCBI NO: 17375734 NR Description: Cyclin G-associated kinase
  misc_feature (10)..(448): Homolog of NCBI NO: 4885251 NR Description: cyclin G associated kinase [Homo sapiens]
  misc_feature (13)..(340): Homolog of NCBI NO: 40789031 NR Description: KIAA1048 protein [Homo sapiens]
  misc_feature (13)..(340): Homolog of NCBI NO: 29570780 NR Description: adaptor-associated kinase 1 [Homo sapiens]
  misc_feature (13)..(340): Homolog of NCBI NO: 12803719 NR Description: Similar to KIAA1048 protein [Homo sapiens]
  misc_feature (14)..(296): Homolog of NCBI NO: 28829923 NR Description: similar to Homo sapiens (Human). Hypothetical
  misc_feature (543)..(633): Homolog of NCBI NO: 7487297 NR Description: probable serine/threonine protein kinase
  misc_feature (561)..(650): Homolog of NCBI NO: 7487297 NR Description: probable serine/threonine protein kinase
  misc_feature (1)..(542): Homolog of NCBI NO: 7487297 NR Description: probable serine/threonine protein kinase

SEQ ID NO: 34247 - protein, 592 aa, Arabidopsis thaliana; identical to SEQ ID NO: 30657
  peptide (1)..(592): Ceres Seq. ID no. 12327296
  misc_feature (1)..(390): Homolog of NCBI NO: 13591947 NR Description: cyclin G-associated kinase [Rattus norvegicus]
  misc_feature (1)..(390): Homolog of NCBI NO: 17375734 NR Description: Cyclin G-associated kinase
  misc_feature (1)..(390): Homolog of NCBI NO: 4885251 NR Description: cyclin G associated kinase [Homo sapiens]
  misc_feature (1)..(282): Homolog of NCBI NO: 40789031 NR Description: KIAA1048 protein [Homo sapiens]
  misc_feature (1)..(282): Homolog of NCBI NO: 29570780 NR Description: adaptor-associated kinase 1 [Homo sapiens]
  misc_feature (1)..(282): Homolog of NCBI NO: 12803719 NR Description: Similar to KIAA1048 protein [Homo sapiens]
  misc_feature (1)..(238): Homolog of NCBI NO: 28829923 NR Description: similar to Homo sapiens (Human). Hypothetical
  misc_feature (485)..(575): Homolog of NCBI NO: 7487297 NR Description: probable serine/threonine protein kinase
  misc_feature (503)..(592): Homolog of NCBI NO: 7487297 NR Description: probable serine/threonine protein kinase
  misc_feature (1)..(484): Homolog of NCBI NO: 7487297 NR Description: probable serine/threonine protein kinase

SEQ ID NO: 34248 - DNA, 1582 bp, Arabidopsis thaliana; identical to SEQ ID NO: 30658
  misc_feature (1)..(1582): Ceres Seq. ID no. 12339796
  misc_feature: MA Experiment ID: 108461 Result: Down-regulated in Transcription
  misc_feature: MA Experiment 108461 PARAMETER Experiment Name: At_Germinating_Seeds_cDNA_P Parameter: Age (day) Value: 1 vs. 0
  misc_feature: MA Experiment 108461 PARAMETER Experiment Name: At_Germinating_Seeds_cDNA_P Parameter: Tissue Value: Germinating Seeds
  misc_feature: MA Experiment ID: 108463 Result: Down-regulated in Transcription
  misc_feature: MA Experiment 108463 PARAMETER Experiment Name: At_Germinating_Seeds_cDNA_P Parameter: Age (day) Value: 3 vs. 0
  misc_feature: MA Experiment 108463 PARAMETER Experiment Name: At_Germinating_Seeds_cDNA_P Parameter: Tissue Value: Germinating Seeds
  misc_feature: MA Experiment ID: 20000180 Result: Down-regulated in Transcription
  misc_feature: MA Experiment 20000180 PARAMETER Experiment Name: At_Germinating_Seeds_P Parameter: Age (hr) Value: 24 vs. 0
  misc_feature: MA Experiment 20000180 PARAMETER Experiment Name: At_Germinating_Seeds_P Parameter: Tissue Value: Germinating Seeds

SEQ ID NO: 34249 - protein, 431 aa, Arabidopsis thaliana; identical to SEQ ID NO: 30659
  peptide (1)..(431): Ceres Seq. ID no. 12339797
  misc_feature (154)..(188): Pfam Name: PPR repeat Pfam Description: PPR repeat
  misc_feature (120)..(431): Homolog of NCBI NO: 9958072 NR Description: Hypothetical protein [Arabidopsis thaliana]
  misc_feature (120)..(431): Homolog of NCBI NO: 15228653 NR Description: hypothetical protein; protein id: At3g29230.1
  misc_feature (114)..(431): Homolog of NCBI NO: 15222280 NR Description: hypothetical protein; protein id: At1g13410.1
  misc_feature (78)..(431): Homolog of NCBI NO: 27817913 NR Description: OJ1066_B03.8 [Oryza sativa (japonica
  misc_feature (77)..(431): Homolog of NCBI NO: 22328738 NR Description: similar to putative selenium-binding protein
  misc_feature (1)..(430): Homolog of NCBI NO: 15223594 NR Description: hypothetical protein; protein id: At1g56690.1
  misc_feature (2)..(429): Homolog of NCBI NO: 38344941 NR Description: OSJNBa0084A10.17 [Oryza sativa (japonica
  misc_feature (1)..(430): Homolog of NCBI NO: 15217508 NR Description: hypothetical protein; protein id: At1g09410.1
  misc_feature (1)..(431): Homolog of NCBI NO: 15235498 NR Description: hypothetical protein; protein id: At4g02750.1
  misc_feature (1)..(431): Homolog of NCBI NO: 15220741 NR Description: hypothetical protein; protein id: At1g62260.1

SEQ ID NO: 34250 - protein, 429 aa, Arabidopsis thaliana; identical to SEQ ID NO: 30660
  peptide (1)..(429): Ceres Seq. ID no. 12339798
  misc_feature (152)..(186): Pfam Name: PPR repeat Pfam Description: PPR repeat
  misc_feature (118)..(429): Homolog of NCBI NO: 9958072 NR Description: Hypothetical protein [Arabidopsis thaliana]
  misc_feature (118)..(429): Homolog of NCBI NO: 15228653 NR Description: hypothetical protein; protein id: At3g29230.1
  misc_feature (112)..(429): Homolog of NCBI NO: 15222280 NR Description: hypothetical protein; protein id: At1g13410.1
  misc_feature (76)..(429): Homolog of NCBI NO: 27817913 NR Description: OJ1066_B03.8 [Oryza sativa (japonica
  misc_feature (75)..(429): Homolog of NCBI NO: 22328738 NR Description: similar to putative selenium-binding protein
  misc_feature (1)..(428): Homolog of NCBI NO: 15223594 NR Description: hypothetical protein; protein id: At1g56690.1
  misc_feature (1)..(427): Homolog of NCBI NO: 38344941 NR Description: OSJNBa0084A10.17 [Oryza sativa (japonica
  misc_feature (1)..(428): Homolog of NCBI NO: 15217508 NR Description: hypothetical protein; protein id: At1g09410.1
  misc_feature (1)..(429): Homolog of NCBI NO: 15235498 NR Description: hypothetical protein; protein id: At4g02750.1
  misc_feature (1)..(429): Homolog of NCBI NO: 15220741 NR Description: hypothetical protein; protein id: At1g62260.1

SEQ ID NO: 34251 - protein, 418 aa, Arabidopsis thaliana; identical to SEQ ID NO: 30661
  peptide (1)..(418): Ceres Seq. ID no. 12339799
  misc_feature (141)..(175): Pfam Name: PPR repeat Pfam Description: PPR repeat
  misc_feature (107)..(418): Homolog of NCBI NO: 9958072 NR Description: Hypothetical protein [Arabidopsis thaliana]
  misc_feature (107)..(418): Homolog of NCBI NO: 15228653 NR Description: hypothetical protein; protein id: At3g29230.1
  misc_feature (101)..(418): Homolog of NCBI NO: 15222280 NR Description: hypothetical protein; protein id: At1g13410.1
  misc_feature (65)..(418): Homolog of NCBI NO: 27817913 NR Description: OJ1066_B03.8 [Oryza sativa (japonica
  misc_feature (64)..(418): Homolog of NCBI NO: 22328738 NR Description: similar to putative selenium-binding protein
  misc_feature (1)..(417): Homolog of NCBI NO: 15223594 NR Description: hypothetical protein; protein id: At1g56690.1
  misc_feature (1)..(416): Homolog of NCBI NO: 38344941 NR Description: OSJNBa0084A10.17 [Oryza sativa (japonica
  misc_feature (1)..(417): Homolog of NCBI NO: 15217508 NR Description: hypothetical protein; protein id: At1g09410.1
  misc_feature (1)..(418): Homolog of NCBI NO: 15235498 NR Description: hypothetical protein; protein id: At4g02750.1
  misc_feature (1)..(418): Homolog of NCBI NO: 15220741 NR Description: hypothetical protein; protein id: At1g62260.1

SEQ ID NO: 34252 - DNA, 1274 bp, Arabidopsis thaliana; identical to SEQ ID NO: 30662
  misc_feature (1)..(1274): Ceres Seq. ID no. 12394774
  misc_feature: MA Experiment ID: 108433 Result: Down-regulated in Transcription
  misc_feature: MA Experiment 108433 PARAMETER Experiment Name: At_rhl_Mutant2_cDNA_P Parameter: Age (day) Value: 7
  misc_feature: MA Experiment 108433 PARAMETER Experiment Name: At_rhl_Mutant2_cDNA_P Parameter: Organism Value: A. thaliana
  misc_feature: MA Experiment 108433 PARAMETER Experiment Name: At_rhl_Mutant2_cDNA_P Parameter: Plant Line Value: rhl Mutant vs. wt landsburg
  misc_feature: MA Experiment 108433 PARAMETER Experiment Name: At_rhl_Mutant2_cDNA_P Parameter: Tissue Value: Roots
  misc_feature: MA Experiment ID: 108434 Result: Up-regulated in Transcription
  misc_feature: MA Experiment 108434 PARAMETER Experiment Name: At_Root_Tips_cDNA_P Parameter: Tissue Value: Root Tips
  misc_feature: MA Experiment ID: 108462 Result: Down-regulated in Transcription
  misc_feature: MA Experiment 108462 PARAMETER Experiment Name: At_Germinating_Seeds_cDNA_P Parameter: Age (day) Value: 2 vs. 0
  misc_feature: MA Experiment 108462 PARAMETER Experiment Name: At_Germinating_Seeds_cDNA_P Parameter: Tissue Value: Germinating Seeds
  misc_feature: MA Experiment ID: 108463 Result: Down-regulated in Transcription
  misc_feature: MA Experiment 108463 PARAMETER Experiment Name: At_Germinating_Seeds_cDNA_P Parameter: Age (day) Value: 3 vs. 0
  misc_feature: MA Experiment 108463 PARAMETER Experiment Name: At_Germinating_Seeds_cDNA_P Parameter: Tissue Value: Germinating Seeds
  misc_feature: MA Experiment ID: 108464 Result: Down-regulated in Transcription
  misc_feature: MA Experiment 108464 PARAMETER Experiment Name: At_Germinating_Seeds_cDNA_P Parameter: Age (day) Value: 4 vs. 0
  misc_feature: MA Experiment 108464 PARAMETER Experiment Name: At_Germinating_Seeds_cDNA_P Parameter: Tissue Value: Germinating Seeds
  misc_feature: MA Experiment ID: 20000113 Result: Up-regulated in Transcription
  misc_feature: MA Experiment 20000113 PARAMETER Experiment Name: At_42deg_Heat_cDNA_P Parameter: Temperature (deg C) Value: 42 vs. 22
  misc_feature: MA Experiment 20000113 PARAMETER Experiment Name: At_42deg_Heat_cDNA_P Parameter: Timepoint (hr) Value: 8
  misc_feature: MA Experiment 20000113 PARAMETER Experiment Name: At_42deg_Heat_cDNA_P Parameter: Tissue Value: Aerial
  misc_feature: MA Experiment ID: 20000180 Result: Down-regulated in Transcription
  misc_feature: MA Experiment 20000180 PARAMETER Experiment Name: At_Germinating_Seeds_P Parameter: Age (hr) Value: 24 vs. 0
  misc_feature: MA Experiment 20000180 PARAMETER Experiment Name: At_Germinating_Seeds_P Parameter: Tissue Value: Germinating Seeds

SEQ ID NO: 34253 - protein, 362 aa, Arabidopsis thaliana; identical to SEQ ID NO: 30663
  peptide (1)..(362): Ceres Seq. ID no. 12394775
  misc_feature (74)..(319): Pfam Name: Spermine/spermidine synthase Pfam Description: Spermine/spermidine synthase
  misc_feature (58)..(362): Homolog of NCBI NO: 6094335 NR Description: Spermidine synthase (Putrescine
  misc_feature (57)..(360): Homolog of NCBI NO: 6094327 NR Description: Spermidine synthase 1 (Putrescine
  misc_feature (54)..(361): Homolog of NCBI NO: 6094330 NR Description: Spermidine synthase 2 (Putrescine
  misc_feature (75)..(362): Homolog of NCBI NO: 2821961 NR Description: spermidine synthase [Arabidopsis thaliana]
  misc_feature (39)..(360): Homolog of NCBI NO: 12230013 NR Description: Spermidine synthase (Putrescine
  misc_feature (39)..(361): Homolog of NCBI NO: 23495352 NR Description: spermidine synthase [Malus x domestica]
  misc_feature (29)..(362): Homolog of NCBI NO: 12229958 NR Description: Spermidine synthase 1 (Putrescine
  misc_feature (39)..(361): Homolog of NCBI NO: 23495354 NR Description: spermidine synthase [Malus x domestica]
  misc_feature (32)..(362): Homolog of NCBI NO: 15223115 NR Description: spermidine synthase, putative
  misc_feature (29)..(362): Homolog of NCBI NO: 15220885 NR Description: putative spermidine synthase

SEQ ID NO: 34254 - protein, 334 aa, Arabidopsis thaliana; identical to SEQ ID NO: 30664
  peptide (1)..(334): Ceres Seq. ID no. 12394776
  misc_feature (46)..(291): Pfam Name: Spermine/spermidine synthase Pfam Description: Spermine/spermidine synthase
  misc_feature (30)..(334): Homolog of NCBI NO: 6094335 NR Description: Spermidine synthase (Putrescine
  misc_feature (29)..(332): Homolog of NCBI NO: 6094327 NR Description: Spermidine synthase 1 (Putrescine
  misc_feature (26)..(333): Homolog of NCBI NO: 6094330 NR Description: Spermidine synthase 2 (Putrescine
  misc_feature (47)..(334): Homolog of NCBI NO: 2821961 NR Description: spermidine synthase [Arabidopsis thaliana]
  misc_feature (11)..(332): Homolog of NCBI NO: 12230013 NR Description: Spermidine synthase (Putrescine
  misc_feature (11)..(333): Homolog of NCBI NO: 23495352 NR Description: spermidine synthase [Malus x domestica]
  misc_feature (1)..(334): Homolog of NCBI NO: 12229958 NR Description: Spermidine synthase 1 (Putrescine
  misc_feature (11)..(333): Homolog of NCBI NO: 23495354 NR Description: spermidine synthase [Malus x domestica]
  misc_feature (4)..(334): Homolog of NCBI NO: 15223115 NR Description: spermidine synthase, putative
  misc_feature (1)..(334): Homolog of NCBI NO: 15220885 NR Description: putative spermidine synthase

SEQ ID NO: 34255 - protein, 309 aa, Arabidopsis thaliana; identical to SEQ ID NO: 30665
  peptide (1)..(309): Ceres Seq. ID no. 12394777
  misc_feature (21)..(266): Pfam Name: Spermine/spermidine synthase Pfam Description: Spermine/spermidine synthase
  misc_feature (5)..(309): Homolog of NCBI NO: 6094335 NR Description: Spermidine synthase (Putrescine
  misc_feature (4)..(307): Homolog of NCBI NO: 6094327 NR Description: Spermidine synthase 1 (Putrescine
  misc_feature (1)..(308): Homolog of NCBI NO: 6094330 NR Description: Spermidine synthase 2 (Putrescine
  misc_feature (22)..(309): Homolog of NCBI NO: 2821961 NR Description: spermidine synthase [Arabidopsis thaliana]
  misc_feature (1)..(307): Homolog of NCBI NO: 12230013 NR Description: Spermidine synthase (Putrescine
  misc_feature (1)..(308): Homolog of NCBI NO: 23495352 NR Description: spermidine synthase [Malus x domestica]
  misc_feature (1)..(309): Homolog of NCBI NO: 12229958 NR Description: Spermidine synthase 1 (Putrescine
  misc_feature (1)..(308): Homolog of NCBI NO: 23495354 NR Description: spermidine synthase [Malus x domestica]
  misc_feature (1)..(309): Homolog of NCBI NO: 15223115 NR Description: spermidine synthase, putative
  misc_feature (1)..(309): Homolog of NCBI NO: 15220885 NR Description: putative spermidine synthase

SEQ ID NO: 34256 - DNA, 865 bp, Arabidopsis thaliana; identical to SEQ ID NO: 30666
  misc_feature (1)..(865): Ceres Seq. ID no. 12603611
  misc_feature: MA Experiment ID: 108434 Result: Down-regulated in Transcription
  misc_feature: MA Experiment 108434 PARAMETER Experiment Name: At_Root_Tips_cDNA_P Parameter: Tissue Value: Root Tips
  misc_feature: MA Experiment ID: 108435 Result: Down-regulated in Transcription
  misc_feature: MA Experiment 108435 PARAMETER Experiment Name: At_stm_Mutants_cDNA_P Parameter: Plant Line Value: wt Landsburg vs stm
  misc_feature: MA Experiment 108435 PARAMETER Experiment Name: At_stm_Mutants_cDNA_P Parameter: Tissue Value: Shoot Apical Meristem Region
  misc_feature: MA Experiment ID: 108462 Result: Up-regulated in Transcription
  misc_feature: MA Experiment 108462 PARAMETER Experiment Name: At_Germinating_Seeds_cDNA_P Parameter: Age (day) Value: 2 vs. 0
  misc_feature: MA Experiment 108462 PARAMETER Experiment Name: At_Germinating_Seeds_cDNA_P Parameter: Tissue Value: Germinating Seeds
  misc_feature: MA Experiment ID: 108464 Result: Up-regulated in Transcription
  misc_feature: MA Experiment 108464 PARAMETER Experiment Name: At_Germinating_Seeds_cDNA_P Parameter: Age (day) Value: 4 vs. 0
  misc_feature: MA Experiment 108464 PARAMETER Experiment Name: At_Germinating_Seeds_cDNA_P Parameter: Tissue Value: Germinating Seeds
  misc_feature: MA Experiment ID: 108488 Result: Down-regulated in Transcription
  misc_feature: MA Experiment ID: 108574 Result: Up-regulated in Transcription
  misc_feature: MA Experiment 108574 PARAMETER Experiment Name: At_Wounding__cDNA_P Parameter: Timepoint (hr) Value: 1
  misc_feature: MA Experiment 108574 PARAMETER Experiment Name: At_Wounding__cDNA_P Parameter: Tissue Value: Aerial
  misc_feature: MA Experiment 108574 PARAMETER Experiment Name: At_Wounding__cDNA_P Parameter: Treatment Value: Wounding vs. No Wounding
  misc_feature: MA Experiment ID: 108579 Result: Up-regulated in Transcription
  misc_feature: MA Experiment 108579 PARAMETER Experiment Name: At_4deg_Cold_cDNA_P Parameter: Temperature (deg C) Value: 4 vs. 22
  misc_feature: MA Experiment 108579 PARAMETER Experiment Name: At_4deg_Cold_cDNA_P Parameter: Timepoint (hr) Value: 6
  misc_feature: MA Experiment 108579 PARAMETER Experiment Name: At_4deg_Cold_cDNA_P Parameter: Tissue Value: Aerial
  misc_feature: MA Experiment ID: 108594 Result: Up-regulated in Transcription
  misc_feature: MA Experiment 108594 PARAMETER Experiment Name: At_Ler-rhl_Root_cDNA_P Parameter: Plant Line Value: null
  misc_feature: MA Experiment ID: 20000113 Result: Up-regulated in Transcription
  misc_feature: MA Experiment 20000113 PARAMETER Experiment Name: At_42deg_Heat_cDNA_P Parameter: Temperature (deg C) Value: 42 vs. 22
  misc_feature: MA Experiment 20000113 PARAMETER Experiment Name: At_42deg_Heat_cDNA_P Parameter: Timepoint (hr) Value: 8
  misc_feature: MA Experiment 20000113 PARAMETER Experiment Name: At_42deg_Heat_cDNA_P Parameter: Tissue Value: Aerial
  misc_feature: MA Experiment ID: 20000224 Result: Up-regulated in Transcription
  misc_feature: MA Experiment ID: 20000234 Result: Down-regulated in Transcription
  misc_feature: MA Experiment 20000234 PARAMETER Experiment Name: At_Siliques_P Parameter: Age (day) Value: 21
  misc_feature: MA Experiment 20000234 PARAMETER Experiment Name: At_Siliques_P Parameter: Organism Value: A. thaliana
  misc_feature: MA Experiment 20000234 PARAMETER Experiment Name: At_Siliques_P Parameter: Plant Line Value: WS
  misc_feature: MA Experiment 20000234 PARAMETER Experiment Name: At_Siliques_P Parameter: Tissue Value: Less Than 5mm Siliques vs. Whole Plant
  misc_feature: MA Experiment ID: 20001450 Result: Up-regulated in Transcription
  misc_feature: MA Experiment 20001450 PARAMETER Experiment Name: At_Far-red-induction_P Parameter: Age (day) Value: 7
  misc_feature: MA Experiment 20001450 PARAMETER Experiment Name: At_Far-red-induction_P Parameter: Light Value: Far-red vs. White
  misc_feature: MA Experiment 20001450 PARAMETER Experiment Name: At_Far-red-induction_P Parameter: Organism Value: A. thaliana
  misc_feature: MA Experiment 20001450 PARAMETER Experiment Name: At_Far-red-induction_P Parameter: Plant Line Value: Columbia
  misc_feature: MA Experiment 20001450 PARAMETER Experiment Name: At_Far-red-induction_P Parameter: Timepoint (hr) Value: 8
  misc_feature: MA Experiment 20001450 PARAMETER Experiment Name: At_Far-red-induction_P Parameter: Tissue Value: Whole Plant
  misc_feature: MA Experiment ID: 20001451 Result: Up-regulated in Transcription
  misc_feature: MA Experiment 20001451 PARAMETER Experiment Name: At_Far-red-induction_P Parameter: Age (day) Value: 7
  misc_feature: MA Experiment 20001451 PARAMETER Experiment Name: At_Far-red-induction_P Parameter: Light Value: Far-red vs. White
  misc_feature: MA Experiment 20001451 PARAMETER Experiment Name: At_Far-red-induction_P Parameter: Organism Value: A. thaliana
  misc_feature: MA Experiment 20001451 PARAMETER Experiment Name: At_Far-red-induction_P Parameter: Plant Line Value: Columbia
  misc_feature: MA Experiment 20001451 PARAMETER Experiment Name: At_Far-red-induction_P Parameter: Timepoint (hr) Value: 24
  misc_feature: MA Experiment 20001451 PARAMETER Experiment Name: At_Far-red-induction_P Parameter: Tissue Value: Whole Plant

SEQ ID NO: 34257 - protein, 190 aa, Arabidopsis thaliana; identical to SEQ ID NO: 30667
  peptide (1)..(190): Ceres Seq. ID no. 12603612
  misc_feature (78)..(187): Pfam Name: Remorin, C-terminal region Pfam Description: Remorin, C-terminal region
  misc_feature (78)..(187): Pfam Name: Remorin, C-terminal region Pfam Description: Remorin, C-terminal region
  misc_feature (3)..(190): Homolog of NCBI NO: 15229057 NR Description: remorin -like protein; protein id: At3g48940.1
  misc_feature (39)..(189): Homolog of NCBI NO: 4883530 NR Description: remorin 2 [Lycopersicon esculentum]
  misc_feature (1)..(189): Homolog of NCBI NO: 21555669 NR Description: remorin [Arabidopsis thaliana]
  misc_feature (1)..(189): Homolog of NCBI NO: 15237822 NR Description: putative protein
  misc_feature (4)..(190): Homolog of NCBI NO: 34925093 NR Description: Remorin (pp34)
  misc_feature (3)..(190): Homolog of NCBI NO: 15229057 NR Description: remorin -like protein; protein id: At3g48940.1
  misc_feature (1)..(189): Homolog of NCBI NO: 21555669 NR Description: remorin [Arabidopsis thaliana]
  misc_feature (4)..(190): Homolog of NCBI NO: 34925093 NR Description: Remorin (pp34)
  misc_feature (1)..(190): Homolog of NCBI NO: 15225899 NR Description: remorin
  misc_feature (1)..(190): Homolog of NCBI NO: 601843 NR Description: DNA-binding protein
  misc_feature (1)..(190): Homolog of NCBI NO: 15233068 NR Description: putative DNA-binding protein
  misc_feature (1)..(190): Homolog of NCBI NO: 32489830 NR Description: OSJNBb0039L24.13 [Oryza sativa (japonica
  misc_feature (4)..(190): Homolog of NCBI NO: 4731573 NR Description: remorin 1 [Lycopersicon esculentum]
  misc_feature (1)..(189): Homolog of NCBI NO: 15237822 NR Description: putative protein
  misc_feature (39)..(189): Homolog of NCBI NO: 4883530 NR Description: remorin 2 [Lycopersicon esculentum]
  misc_feature (4)..(190): Homolog of NCBI NO: 4731573 NR Description: remorin 1 [Lycopersicon esculentum]
  misc_feature (1)..(190): Homolog of NCBI NO: 32489830 NR Description: OSJNBb0039L24.13 [Oryza sativa (japonica
  misc_feature (1)..(190): Homolog of NCBI NO: 15233068 NR Description: putative DNA-binding protein
  misc_feature (1)..(190): Homolog of NCBI NO: 601843 NR Description: DNA-binding protein
  misc_feature (1)..(190): Homolog of NCBI NO: 15225899 NR Description: remorin

SEQ ID NO: 34258 - DNA, 1371 bp, Arabidopsis thaliana; identical to SEQ ID NO: 30668
  misc_feature (1)..(1371): Ceres Seq. ID no. 12722627
  misc_feature: MA Experiment ID: 20000184 Result: Up-regulated in Transcription
  misc_feature: MA Experiment 20000184 PARAMETER Experiment Name: At_Shoots__P Parameter: Age (day) Value: 7
  misc_feature: MA Experiment 20000184 PARAMETER Experiment Name: At_Shoots__P Parameter: Tissue Value: Shoots vs. Whole Plant
  misc_feature: MA Experiment ID: 20000234 Result: Up-regulated in Transcription
  misc_feature: MA Experiment 20000234 PARAMETER Experiment Name: At_Siliques_P Parameter: Age (day) Value: 21
  misc_feature: MA Experiment 20000234 PARAMETER Experiment Name: At_Siliques_P Parameter: Organism Value: A. thaliana
  misc_feature: MA Experiment 20000234 PARAMETER Experiment Name: At_Siliques_P Parameter: Plant Line Value: WS
  misc_feature: MA Experiment 20000234 PARAMETER Experiment Name: At_Siliques_P Parameter: Tissue Value: Less Than 5mm Siliques vs. Whole Plant
  misc_feature: MA Experiment ID: 20000235 Result: Up-regulated in Transcription
  misc_feature: MA Experiment 20000235 PARAMETER Experiment Name: At_Siliques_P Parameter: Age (day) Value: 21
  misc_feature: MA Experiment 20000235 PARAMETER Experiment Name: At_Siliques_P Parameter: Organism Value: A. thaliana
  misc_feature: MA Experiment 20000235 PARAMETER Experiment Name: At_Siliques_P Parameter: Plant Line Value: WS
  misc_feature: MA Experiment 20000235 PARAMETER Experiment Name: At_Siliques_P Parameter: Tissue Value: 5-10mm Siliques vs. Whole Plant
  misc_feature: MA Experiment ID: 20000495 Result: Up-regulated in Transcription
  misc_feature: MA Experiment 20000495 PARAMETER Experiment Name: At_Guard_Cells_P Parameter: Harvest Date Value: 8/2/2002
  misc_feature: MA Experiment 20000495 PARAMETER Experiment Name: At_Guard_Cells_P Parameter: Organism Value: A. thaliana
  misc_feature: MA Experiment 20000495 PARAMETER Experiment Name: At_Guard_Cells_P Parameter: Tissue Value: Guard Cells vs. Leaves
  misc_feature: MA Experiment ID: 20001557 Result: Up-regulated in Transcription
  misc_feature: MA Experiment 20001557 PARAMETER Experiment Name: At_Drought_Soil_Dry_P Parameter: Age (day) Value: 27
  misc_feature: MA Experiment 20001557 PARAMETER Experiment Name: At_Drought_Soil_Dry_P Parameter: Organism Value: A. thaliana
  misc_feature: MA Experiment 20001557 PARAMETER Experiment Name: At_Drought_Soil_Dry_P Parameter: Plant Line Value: WS
  misc_feature: MA Experiment 20001557 PARAMETER Experiment Name: At_Drought_Soil_Dry_P Parameter: Post Timepoint (hr) Value: 3
  misc_feature: MA Experiment 20001557 PARAMETER Experiment Name: At_Drought_Soil_Dry_P Parameter: Post-Treatment Value: Re-Water vs. No Drought
  misc_feature: MA Experiment 20001557 PARAMETER Experiment Name: At_Drought_Soil_Dry_P Parameter: Timepoint (day) Value: 13
  misc_feature: MA Experiment 20001557 PARAMETER Experiment Name: At_Drought_Soil_Dry_P Parameter: Treatment Value: Drought vs. No Drought

SEQ ID NO: 34259 - protein, 303 aa, Arabidopsis thaliana; identical to SEQ ID NO: 30669
  peptide (1)..(303): Ceres Seq. ID no. 12722628
  misc_feature (83)..(286): Homolog of NCBI NO: 37572451 NR Description: AG-motif binding protein-5 [Nicotiana tabacum]
  misc_feature (114)..(286): Homolog of NCBI NO: 37572445 NR Description: AG-motif binding protein-2 [Nicotiana tabacum]
  misc_feature (114)..(286): Homolog of NCBI NO: 12711287 NR Description: GATA-1 zinc finger protein [Nicotiana tabacum]
  misc_feature (19)..(286): Homolog of NCBI NO: 15233101 NR Description: GATA zinc finger protein
  misc_feature (3)..(301): Homolog of NCBI NO: 15226388 NR Description: GATA zinc finger protein; protein id: At2g28340.1
  misc_feature (1)..(302): Homolog of NCBI NO: 15223085 NR Description: GATA zinc finger protein
  misc_feature (1)..(302): Homolog of NCBI NO: 8778844 NR Description: T6D22.9 [Arabidopsis thaliana]
  misc_feature (1)..(303): Homolog of NCBI NO: 15223086 NR Description: GATA zinc finger protein; protein id: At1g08010.1
  misc_feature (1)..(99): Homolog of NCBI NO: 8778844 NR Description: T6D22.9 [Arabidopsis thaliana]
  misc_feature (90)..(303): Homolog of NCBI NO: 8778844 NR Description: T6D22.9 [Arabidopsis thaliana]

SEQ ID NO: 34260 - protein, 247 aa, Arabidopsis thaliana; identical to SEQ ID NO: 30670
  peptide (1)..(247): Ceres Seq. ID no. 12722629
  misc_feature (27)..(230): Homolog of NCBI NO: 37572451 NR Description: AG-motif binding protein-5 [Nicotiana tabacum]
  misc_feature (58)..(230): Homolog of NCBI NO: 37572445 NR Description: AG-motif binding protein-2 [Nicotiana tabacum]
  misc_feature (58)..(230): Homolog of NCBI NO: 12711287 NR Description: GATA-1 zinc finger protein [Nicotiana tabacum]
  misc_feature (1)..(230): Homolog of NCBI NO: 15233101 NR Description: GATA zinc finger protein
  misc_feature (1)..(245): Homolog of NCBI NO: 15226388 NR Description: GATA zinc finger protein; protein id: At2g28340.1
  misc_feature (1)..(246): Homolog of NCBI NO: 15223085 NR Description: GATA zinc finger protein
  misc_feature (1)..(246): Homolog of NCBI NO: 8778844 NR Description: T6D22.9 [Arabidopsis thaliana]
  misc_feature (1)..(247): Homolog of NCBI NO: 15223086 NR Description: GATA zinc finger protein; protein id: At1g08010.1
  misc_feature (1)..(43): Homolog of NCBI NO: 8778844 NR Description: T6D22.9 [Arabidopsis thaliana]
  misc_feature (34)..(247): Homolog of NCBI NO: 8778844 NR Description: T6D22.9 [Arabidopsis thaliana]

SEQ ID NO: 34261 - protein, 245 aa, Arabidopsis thaliana; identical to SEQ ID NO: 30671
  peptide (1)..(245): Ceres Seq. ID no. 12722630
  misc_feature (25)..(228): Homolog of NCBI NO: 37572451 NR Description: AG-motif binding protein-5 [Nicotiana tabacum]
  misc_feature (56)..(228): Homolog of NCBI NO: 37572445 NR Description: AG-motif binding protein-2 [Nicotiana tabacum]
  misc_feature (56)..(228): Homolog of NCBI NO: 12711287 NR Description: GATA-1 zinc finger protein [Nicotiana tabacum]
  misc_feature (1)..(228): Homolog of NCBI NO: 15233101 NR Description: GATA zinc finger protein
  misc_feature (1)..(243): Homolog of NCBI NO: 15226388 NR Description: GATA zinc finger protein; protein id: At2g28340.1
  misc_feature (1)..(244): Homolog of NCBI NO: 15223085 NR Description: GATA zinc finger protein
  misc_feature (1)..(244): Homolog of NCBI NO: 8778844 NR Description: T6D22.9 [Arabidopsis thaliana]
  misc_feature (1)..(245): Homolog of NCBI NO: 15223086 NR Description: GATA zinc finger protein; protein id: At1g08010.1
  misc_feature (1)..(41): Homolog of NCBI NO: 8778844 NR Description: T6D22.9 [Arabidopsis thaliana]
  misc_feature (32)..(245): Homolog of NCBI NO: 8778844 NR Description: T6D22.9 [Arabidopsis thaliana]

SEQ ID NO: 34262 - DNA, 1359 bp, Arabidopsis thaliana; identical to SEQ ID NO: 30672
  misc_feature (1)..(1359): Ceres Seq. ID no. 12384828
  misc_feature: MA Experiment ID: 108434 Result: Down-regulated in Transcription
  misc_feature: MA Experiment 108434 PARAMETER Experiment Name: At_Root_Tips_cDNA_P Parameter: Tissue Value: Root Tips
  misc_feature: MA Experiment ID: 108462 Result: Up-regulated in Transcription
  misc_feature: MA Experiment 108462 PARAMETER Experiment Name: At_Germinating_Seeds_cDNA_P Parameter: Age (day) Value: 2 vs. 0
  misc_feature: MA Experiment 108462 PARAMETER Experiment Name: At_Germinating_Seeds_cDNA_P Parameter: Tissue Value: Germinating Seeds
  misc_feature: MA Experiment ID: 108463 Result: Up-regulated in Transcription
  misc_feature: MA Experiment 108463 PARAMETER Experiment Name: At_Germinating_Seeds_cDNA_P Parameter: Age (day) Value: 3 vs. 0
  misc_feature: MA Experiment 108463 PARAMETER Experiment Name: At_Germinating_Seeds_cDNA_P Parameter: Tissue Value: Germinating Seeds
  misc_feature: MA Experiment ID: 108464 Result: Up-regulated in Transcription
  misc_feature: MA Experiment 108464 PARAMETER Experiment Name: At_Germinating_Seeds_cDNA_P Parameter: Age (day) Value: 4 vs. 0
  misc_feature: MA Experiment 108464 PARAMETER Experiment Name: At_Germinating_Seeds_cDNA_P Parameter: Tissue Value: Germinating Seeds
  misc_feature: MA Experiment ID: 108573 Result: Up-regulated in Transcription
  misc_feature: MA Experiment 108573 PARAMETER Experiment Name: At_Drought_cDNA_P Parameter: Timepoint (hr) Value: 6
  misc_feature: MA Experiment 108573 PARAMETER Experiment Name: At_Drought_cDNA_P Parameter: Tissue Value: Aerial
  misc_feature: MA Experiment 108573 PARAMETER Experiment Name: At_Drought_cDNA_P Parameter: Treatment Value: Drought vs. No Drought
  misc_feature: MA Experiment ID: 20000090 Result: Down-regulated in Transcription
  misc_feature: MA Experiment ID: 20000111 Result: Down-regulated in Transcription
  misc_feature: MA Experiment 20000111 PARAMETER Experiment Name: At_42deg_Heat_cDNA_P Parameter: Temperature (deg C) Value: 42 vs. 22
  misc_feature: MA Experiment 20000111 PARAMETER Experiment Name: At_42deg_Heat_cDNA_P Parameter: Timepoint (hr) Value: 6
  misc_feature: MA Experiment 20000111 PARAMETER Experiment Name: At_42deg_Heat_cDNA_P Parameter: Tissue Value: Aerial
  misc_feature: MA Experiment ID: 20000171 Result: Down-regulated in Transcription
  misc_feature: MA Experiment 20000171 PARAMETER Experiment Name: At_42deg_Heat_P Parameter: Age (day) Value: 14
  misc_feature: MA Experiment 20000171 PARAMETER Experiment Name: At_42deg_Heat_P Parameter: Organism Value: A. thaliana
  misc_feature: MA Experiment 20000171 PARAMETER Experiment Name: At_42deg_Heat_P Parameter: Plant Line Value: WS
  misc_feature: MA Experiment 20000171 PARAMETER Experiment Name: At_42deg_Heat_P Parameter: Temperature (deg C) Value: 42 vs. 22
  misc_feature: MA Experiment 20000171 PARAMETER Experiment Name: At_42deg_Heat_P Parameter: Timepoint (hr) Value: 1
  misc_feature: MA Experiment 20000171 PARAMETER Experiment Name: At_42deg_Heat_P Parameter: Tissue Value: Aerial
  misc_feature: MA Experiment ID: 20000173 Result: Down-regulated in Transcription
  misc_feature: MA Experiment 20000173 PARAMETER Experiment Name: At_42deg_Heat_P Parameter: Age (day) Value: 14
  misc_feature: MA Experiment 20000173 PARAMETER Experiment Name: At_42deg_Heat_P Parameter: Organism Value: A. thaliana
  misc_feature: MA Experiment 20000173 PARAMETER Experiment Name: At_42deg_Heat_P Parameter: Plant Line Value: WS
  misc_feature: MA Experiment 20000173 PARAMETER Experiment Name: At_42deg_Heat_P Parameter: Temperature (deg C) Value: 42 vs. 22
  misc_feature: MA Experiment 20000173 PARAMETER Experiment Name: At_42deg_Heat_P Parameter: Timepoint (hr) Value: 6
  misc_feature: MA Experiment 20000173 PARAMETER Experiment Name: At_42deg_Heat_P Parameter: Tissue Value: Aerial
  misc_feature: MA Experiment ID: 20000185 Result: Down-regulated in Transcription
  misc_feature: MA Experiment 20000185 PARAMETER Experiment Name: At_Roots__P Parameter: Age (day) Value: 7 vs. 21
  misc_feature: MA Experiment 20000185 PARAMETER Experiment Name: At_Roots__P Parameter: Organism Value: A. thaliana
  misc_feature: MA Experiment 20000185 PARAMETER Experiment Name: At_Roots__P Parameter: Tissue Value: Roots vs. Whole Plant
  misc_feature: MA Experiment ID: 20000235 Result: Down-regulated in Transcription
  misc_feature: MA Experiment 20000235 PARAMETER Experiment Name: At_Siliques_P Parameter: Age (day) Value: 21
  misc_feature: MA Experiment 20000235 PARAMETER Experiment Name: At_Siliques_P Parameter: Organism Value: A. thaliana
  misc_feature: MA Experiment 20000235 PARAMETER Experiment Name: At_Siliques_P Parameter: Plant Line Value: WS
  misc_feature: MA Experiment 20000235 PARAMETER Experiment Name: At_Siliques_P Parameter: Tissue Value: 5-10mm Siliques vs. Whole Plant
  misc_feature: MA Experiment ID: 20000265 Result: Down-regulated in Transcription
  misc_feature: MA Experiment 20000265 PARAMETER Experiment Name: At_Open_Flower_P Parameter: Age (day) Value: 21
  misc_feature: MA Experiment 20000265 PARAMETER Experiment Name: At_Open_Flower_P Parameter: Plant Line Value: WS
  misc_feature: MA Experiment 20000265 PARAMETER Experiment Name: At_Open_Flower_P Parameter: Tissue Value: Closed Flower vs. Whole Plant
  misc_feature: MA Experiment ID: 20000268 Result: Down-regulated in Transcription
  misc_feature: MA Experiment 20000268 PARAMETER Experiment Name: At_100mM_NaCl__P Parameter: Age (day) Value: 14
  misc_feature: MA Experiment 20000268 PARAMETER Experiment Name: At_100mM_NaCl__P Parameter: Organism Value: A. thaliana
  misc_feature: MA Experiment 20000268 PARAMETER Experiment Name: At_100mM_NaCl__P Parameter: Plant Line Value: WS
  misc_feature: MA Experiment 20000268 PARAMETER Experiment Name: At_100mM_NaCl__P Parameter: Timepoint (hr) Value: 6
  misc_feature: MA Experiment 20000268 PARAMETER Experiment Name: At_100mM_NaCl__P Parameter: Tissue Value: Whole Plant
  misc_feature: MA Experiment 20000268 PARAMETER Experiment Name: At_100mM_NaCl__P Parameter: Treatment Value: 100mM NaCl vs. No Treatment
  misc_feature: MA Experiment ID: 20000286 Result: Down-regulated in Transcription
  misc_feature: MA Experiment 20000286 PARAMETER Experiment Name: At_Open_Flower_P Parameter: Age (day) Value: 21
  misc_feature: MA Experiment 20000286 PARAMETER Experiment Name: At_Open_Flower_P Parameter: Plant Line Value: WS
  misc_feature: MA Experiment 20000286 PARAMETER Experiment Name: At_Open_Flower_P Parameter: Tissue Value: Half Open vs. Whole Plant
  misc_feature: MA Experiment ID: 20000439 Result: Down-regulated in Transcription
  misc_feature: MA Experiment 20000439 PARAMETER Experiment Name: At_Roots__P Parameter: Age (day) Value: 14 vs. 21
  misc_feature: MA Experiment 20000439 PARAMETER Experiment Name: At_Roots__P Parameter: Organism Value: A. thaliana
  misc_feature: MA Experiment 20000439 PARAMETER Experiment Name: At_Roots__P Parameter: Tissue Value: Roots vs. Whole Plant
  misc_feature: MA Experiment ID: 20000441 Result: Up-regulated in Transcription
  misc_feature: MA Experiment 20000441 PARAMETER Experiment Name: At_1uM_BR-BRZ__P Parameter: Tissue Value: Shoot Apices
  misc_feature: MA Experiment 20000441 PARAMETER Experiment Name: At_1uM_BR-BRZ__P Parameter: Treatment Value: 1uM BR vs. No Treatment
  misc_feature: MA Experiment ID: 20000443 Result: Up-regulated in Transcription
  misc_feature: MA Experiment 20000443 PARAMETER Experiment Name: At_1uM_BR-BRZ__P Parameter: Tissue Value: Shoot Apices
  misc_feature: MA Experiment 20000443 PARAMETER Experiment Name: At_1uM_BR-BRZ__P Parameter: Treatment Value: 1uM BRZ vs. No Treatment
  misc_feature: MA Experiment ID: 20000495 Result: Down-regulated in Transcription
  misc_feature: MA Experiment 20000495 PARAMETER Experiment Name: At_Guard_Cells_P Parameter: Harvest Date Value: 8/2/2002
  misc_feature: MA Experiment 20000495 PARAMETER Experiment Name: At_Guard_Cells_P Parameter: Organism Value: A. thaliana
  misc_feature: MA Experiment 20000495 PARAMETER Experiment Name: At_Guard_Cells_P Parameter: Tissue Value: Guard Cells vs. Leaves
  misc_feature: MA Experiment ID: 20000496 Result: Down-regulated in Transcription
  misc_feature: MA Experiment 20000496 PARAMETER Experiment Name: At_Guard_Cells_P Parameter: Harvest Date Value: 7/19/2002
  misc_feature: MA Experiment 20000496 PARAMETER Experiment Name: At_Guard_Cells_P Parameter: Organism Value: Canola
  misc_feature: MA Experiment 20000496 PARAMETER Experiment Name: At_Guard_Cells_P Parameter: Tissue Value: Guard Cells vs. Leaves
  misc_feature: MA Experiment ID: 20000709 Result: Up-regulated in Transcription
  misc_feature: MA Experiment 20000709 PARAMETER Experiment Name: At_15mM_NH4NO3_L-to-H_P Parameter: Age (hr) Value: 14
  misc_feature: MA Experiment 20000709 PARAMETER Experiment Name: At_15mM_NH4NO3_L-to-H_P Parameter: Organism Value: A. thaliana
  misc_feature: MA Experiment 20000709 PARAMETER Experiment Name: At_15mM_NH4NO3_L-to-H_P Parameter: Plant Line Value: WS
  misc_feature: MA Experiment 20000709 PARAMETER Experiment Name: At_15mM_NH4NO3_L-to-H_P Parameter: Timepoint (hr) Value: 4
  misc_feature: MA Experiment 20000709 PARAMETER Experiment Name: At_15mM_NH4NO3_L-to-H_P Parameter: Tissue Value: Aerial
  misc_feature: MA Experiment 20000709 PARAMETER Experiment Name: At_15mM_NH4NO3_L-to-H_P Parameter: Treatment Value: 15mM NH4NO3 vs. 30mM Mannitol
  misc_feature: MA Experiment ID: 20001247 Result: Up-regulated in Transcription
  misc_feature: MA Experiment 20001247 PARAMETER Experiment Name: At_Far-red-induction_P Parameter: Age (day) Value: 7
  misc_feature: MA Experiment 20001247 PARAMETER Experiment Name: At_Far-red-induction_P Parameter: Light Value: Far-red vs. White
  misc_feature: MA Experiment 20001247 PARAMETER Experiment Name: At_Far-red-induction_P Parameter: Organism Value: A. thaliana
  misc_feature: MA Experiment 20001247 PARAMETER Experiment Name: At_Far-red-induction_P Parameter: Plant Line Value: Columbia
  misc_feature: MA Experiment 20001247 PARAMETER Experiment Name: At_Far-red-induction_P Parameter: Timepoint (hr) Value: 1
  misc_feature: MA Experiment 20001247 PARAMETER Experiment Name: At_Far-red-induction_P Parameter: Tissue Value: Whole Plant
  misc_feature: MA Experiment ID: 20001450 Result: Up-regulated in Transcription
  misc_feature: MA Experiment 20001450 PARAMETER Experiment Name: At_Far-red-induction_P Parameter: Age (day) Value: 7
  misc_feature: MA Experiment 20001450 PARAMETER Experiment Name: At_Far-red-induction_P Parameter: Light Value: Far-red vs. White
  misc_feature: MA Experiment 20001450 PARAMETER Experiment Name: At_Far-red-induction_P Parameter: Organism Value: A. thaliana
  misc_feature: MA Experiment 20001450 PARAMETER Experiment Name: At_Far-red-induction_P Parameter: Plant Line Value: Columbia
  misc_feature: MA Experiment 20001450 PARAMETER Experiment Name: At_Far-red-induction_P Parameter: Timepoint (hr) Value: 8
  misc_feature: MA Experiment 20001450 PARAMETER Experiment Name: At_Far-red-induction_P Parameter: Tissue Value: Whole Plant
  misc_feature: MA Experiment ID: 20001451 Result: Up-regulated in Transcription
  misc_feature: MA Experiment 20001451 PARAMETER Experiment Name: At_Far-red-induction_P Parameter: Age (day) Value: 7
  misc_feature: MA Experiment 20001451 PARAMETER Experiment Name: At_Far-red-induction_P Parameter: Light Value: Far-red vs. White
  misc_feature: MA Experiment 20001451 PARAMETER Experiment Name: At_Far-red-induction_P Parameter: Organism Value: A. thaliana
  misc_feature: MA Experiment 20001451 PARAMETER Experiment Name: At_Far-red-induction_P Parameter: Plant Line Value: Columbia
  misc_feature: MA Experiment 20001451 PARAMETER Experiment Name: At_Far-red-induction_P Parameter: Timepoint (hr) Value: 24
  misc_feature: MA Experiment 20001451 PARAMETER Experiment Name: At_Far-red-induction_P Parameter: Tissue Value: Whole Plant
  misc_feature: MA Experiment ID: 20001558 Result: Up-regulated in Transcription
  misc_feature: MA Experiment 20001558 PARAMETER Experiment Name: At_Drought_Soil_Dry_P Parameter: Age (day) Value: 27
  misc_feature: MA Experiment 20001558 PARAMETER Experiment Name: At_Drought_Soil_Dry_P Parameter: Organism Value: A. thaliana
  misc_feature: MA Experiment 20001558 PARAMETER Experiment Name: At_Drought_Soil_Dry_P Parameter: Plant Line Value: WS
  misc_feature: MA Experiment 20001558 PARAMETER Experiment Name: At_Drought_Soil_Dry_P Parameter: Post Timepoint (hr) Value: 6
  misc_feature: MA Experiment 20001558 PARAMETER Experiment Name: At_Drought_Soil_Dry_P Parameter: Post-Treatment Value: Re-Water vs. No Drought
  misc_feature: MA Experiment 20001558 PARAMETER Experiment Name: At_Drought_Soil_Dry_P Parameter: Timepoint (day) Value: 13
  misc_feature: MA Experiment 20001558 PARAMETER Experiment Name: At_Drought_Soil_Dry_P Parameter: Treatment Value: Drought vs. No Drought
  misc_feature: MA Experiment ID: 20001911 Result: Up-regulated in Transcription
  misc_feature: MA Experiment 20001911 PARAMETER Experiment Name: At_Drought_Reproduction_P Parameter: Age (day) Value: 40
  misc_feature: MA Experiment 20001911 PARAMETER Experiment Name: At_Drought_Reproduction_P Parameter: Organism Value: A. thaliana
  misc_feature: MA Experiment 20001911 PARAMETER Experiment Name: At_Drought_Reproduction_P Parameter: Plant Line Value: WS
  misc_feature: MA Experiment 20001911 PARAMETER Experiment Name: At_Drought_Reproduction_P Parameter: Timepoint (day) Value: 10
  misc_feature: MA Experiment 20001911 PARAMETER Experiment Name: At_Drought_Reproduction_P Parameter: Tissue Value: Flowers
  misc_feature: MA Experiment 20001911 PARAMETER Experiment Name: At_Drought_Reproduction_P Parameter: Treatment Value: Drought vs. No Drought

SEQ ID NO: 34263 - protein, 333 aa, Arabidopsis thaliana; identical to SEQ ID NO: 30673
  peptide (1)..(333): Ceres Seq. ID no. 12384829
  misc_feature (31)..(216): Pfam Name: Glycosyl hydrolases family 16 Pfam Description: Glycosyl hydrolases family 16
  misc_feature (25)..(332): Homolog of NCBI NO: 32470643 NR Description: putative xyloglucan endotransglycosylase-related
  misc_feature (17)..(324): Homolog of NCBI NO: 21618261 NR Description: endoxyloglucan transferase, putative [Arabidopsis
  misc_feature (17)..(324): Homolog of NCBI NO: 15222593 NR Description: xyloglucan endotransglycosylase (XTR4), putative
  misc_feature (17)..(324): Homolog of NCBI NO: 2129774 NR Description: xyloglucan endo-1,4-beta-D-glucanase (EC 3.2.1.-)
  misc_feature (24)..(333): Homolog of NCBI NO: 13560781 NR Description: endoxyloglucan transferase [Daucus carota]
  misc_feature (17)..(332): Homolog of NCBI NO: 6681351 NR Description: ETAG-A3 [Lycopersicon esculentum]
  misc_feature (1)..(333): Homolog of NCBI NO: 15223878 NR Description: xyloglucan endotransglycosylase (XTR2)
  misc_feature (1)..(333): Homolog of NCBI NO: 21553969 NR Description: putative xyloglucan-specific glucanase
  misc_feature (1)..(333): Homolog of NCBI NO: 5533313 NR Description: endoxyloglucan transferase [Arabidopsis thaliana]
  misc_feature (1)..(333): Homolog of NCBI NO: 15226364 NR Description: xyloglucan endotransglycosylase (EXGT-A3)

SEQ ID NO: 34264 - protein, 323 aa, Arabidopsis thaliana; identical to SEQ ID NO: 30674
  peptide (1)..(323): Ceres Seq. ID no. 12384830
  misc_feature (21)..(206): Pfam Name: Glycosyl hydrolases family 16 Pfam Description: Glycosyl hydrolases family 16
  misc_feature (15)..(322): Homolog of NCBI NO: 32470643 NR Description: putative xyloglucan endotransglycosylase-related
  misc_feature (7)..(314): Homolog of NCBI NO: 21618261 NR Description: endoxyloglucan transferase, putative [Arabidopsis
  misc_feature (7)..(314): Homolog of NCBI NO: 15222593 NR Description: xyloglucan endotransglycosylase (XTR4), putative
  misc_feature (7)..(314): Homolog of NCBI NO: 2129774 NR Description: xyloglucan endo-1,4-beta-D-glucanase (EC 3.2.1.-)
  misc_feature (14)..(323): Homolog of NCBI NO: 13560781 NR Description: endoxyloglucan transferase [Daucus carota]
  misc_feature (7)..(322): Homolog of NCBI NO: 6681351 NR Description: ETAG-A3 [Lycopersicon esculentum]
  misc_feature (1)..(323): Homolog of NCBI NO: 15223878 NR Description: xyloglucan endotransglycosylase (XTR2)
  misc_feature (1)..(323): Homolog of NCBI NO: 21553969 NR Description: putative xyloglucan-specific glucanase
  misc_feature (1)..(323): Homolog of NCBI NO: 5533313 NR Description: endoxyloglucan transferase [Arabidopsis thaliana]
  misc_feature (1)..(323): Homolog of NCBI NO: 15226364 NR Description: xyloglucan endotransglycosylase (EXGT-A3)

SEQ ID NO: 34265 - protein, 238 aa, Arabidopsis thaliana; identical to SEQ ID NO: 30675
  peptide (1)..(238): Ceres Seq. ID no. 12384831
  misc_feature (1)..(121): Pfam Name: Glycosyl hydrolases family 16 Pfam Description: Glycosyl hydrolases family 16
  misc_feature (1)..(237): Homolog of NCBI NO: 32470643 NR Description: putative xyloglucan endotransglycosylase-related
  misc_feature (1)..(229): Homolog of NCBI NO: 21618261 NR Description: endoxyloglucan transferase, putative [Arabidopsis
  misc_feature (1)..(229): Homolog of NCBI NO: 15222593 NR Description: xyloglucan endotransglycosylase (XTR4), putative
  misc_feature (1)..(229): Homolog of NCBI NO: 2129774 NR Description: xyloglucan endo-1,4-beta-D-glucanase (EC 3.2.1.-)
  misc_feature (1)..(238): Homolog of NCBI NO: 13560781 NR Description: endoxyloglucan transferase [Daucus carota]
  misc_feature (1)..(237): Homolog of NCBI NO: 6681351 NR Description: ETAG-A3 [Lycopersicon esculentum]
  misc_feature (1)..(238): Homolog of NCBI NO: 15223878 NR Description: xyloglucan endotransglycosylase (XTR2)
  misc_feature (1)..(238): Homolog of NCBI NO: 21553969 NR Description: putative xyloglucan-specific glucanase
  misc_feature (1)..(238): Homolog of NCBI NO: 5533313 NR Description: endoxyloglucan transferase [Arabidopsis thaliana]
  misc_feature (1)..(238): Homolog of NCBI NO: 15226364 NR Description: xyloglucan endotransglycosylase (EXGT-A3)

SEQ ID NO: 34266 - DNA, 1810 bp, Arabidopsis thaliana; identical to SEQ ID NO: 30676
  misc_feature (1)..(1810): Ceres Seq. ID no. 12327223
  misc_feature: MA Experiment ID: 108434 Result: Down-regulated in Transcription
  misc_feature: MA Experiment 108434 PARAMETER Experiment Name: At_Root_Tips_cDNA_P Parameter: Tissue Value: Root Tips
  misc_feature: MA Experiment ID: 108488 Result: Up-regulated in Transcription
  misc_feature: MA Experiment ID: 108573 Result: Up-regulated in Transcription
  misc_feature: MA Experiment 108573 PARAMETER Experiment Name: At_Drought_cDNA_P Parameter: Timepoint (hr) Value: 6
  misc_feature: MA Experiment 108573 PARAMETER Experiment Name: At_Drought_cDNA_P Parameter: Tissue Value: Aerial
  misc_feature: MA Experiment 108573 PARAMETER Experiment Name: At_Drought_cDNA_P Parameter: Treatment Value: Drought vs. No Drought
  misc_feature: MA Experiment ID: 20000113 Result: Down-regulated in Transcription
  misc_feature: MA Experiment 20000113 PARAMETER Experiment Name: At_42deg_Heat_cDNA_P Parameter: Temperature (deg C) Value: 42 vs. 22
  misc_feature: MA Experiment 20000113 PARAMETER Experiment Name: At_42deg_Heat_cDNA_P Parameter: Timepoint (hr) Value: 8
  misc_feature: MA Experiment 20000113 PARAMETER Experiment Name: At_42deg_Heat_cDNA_P Parameter: Tissue Value: Aerial
  misc_feature: MA Experiment ID: 20000184 Result: Up-regulated in Transcription
  misc_feature: MA Experiment 20000184 PARAMETER Experiment Name: At_Shoots__P Parameter: Age (day) Value: 7
  misc_feature: MA Experiment 20000184 PARAMETER Experiment Name: At_Shoots__P Parameter: Tissue Value: Shoots vs. Whole Plant
  misc_feature: MA Experiment ID: 20000185 Result: Up-regulated in Transcription
  misc_feature: MA Experiment 20000185 PARAMETER Experiment Name: At_Roots__P Parameter: Age (day) Value: 7 vs. 21
  misc_feature: MA Experiment 20000185 PARAMETER Experiment Name: At_Roots__P Parameter: Organism Value: A. thaliana
  misc_feature: MA Experiment 20000185 PARAMETER Experiment Name: At_Roots__P Parameter: Tissue Value: Roots vs. Whole Plant
  misc_feature: MA Experiment ID: 20000234 Result: Up-regulated in Transcription
  misc_feature: MA Experiment 20000234 PARAMETER Experiment Name: At_Siliques_P Parameter: Age (day) Value: 21
  misc_feature: MA Experiment 20000234 PARAMETER Experiment Name: At_Siliques_P Parameter: Organism Value: A. thaliana
  misc_feature: MA Experiment 20000234 PARAMETER Experiment Name: At_Siliques_P Parameter: Plant Line Value: WS
  misc_feature: MA Experiment 20000234 PARAMETER Experiment Name: At_Siliques_P Parameter: Tissue Value: Less Than 5mm Siliques vs. Whole Plant
  misc_feature: MA Experiment ID: 20000235 Result: Up-regulated in Transcription
  misc_feature: MA Experiment 20000235 PARAMETER Experiment Name: At_Siliques_P Parameter: Age (day) Value: 21
  misc_feature: MA Experiment 20000235 PARAMETER Experiment Name: At_Siliques_P Parameter: Organism Value: A. thaliana
  misc_feature: MA Experiment 20000235 PARAMETER Experiment Name: At_Siliques_P Parameter: Plant Line Value: WS
  misc_feature: MA Experiment 20000235 PARAMETER Experiment Name: At_Siliques_P Parameter: Tissue Value: 5-10mm Siliques vs. Whole Plant
  misc_feature: MA Experiment ID: 20000307 Result: Up-regulated in Transcription
  misc_feature: MA Experiment 20000307 PARAMETER Experiment Name: At_Germinating_Seeds_Sub_P Parameter: Age (hr) Value: 24 vs. 0
  misc_feature: MA Experiment 20000307 PARAMETER Experiment Name: At_Germinating_Seeds_Sub_P Parameter: Organism Value: A. thaliana
  misc_feature: MA Experiment 20000307 PARAMETER Experiment Name: At_Germinating_Seeds_Sub_P Parameter: Plant Line Value: WS
  misc_feature: MA Experiment 20000307 PARAMETER Experiment Name: At_Germinating_Seeds_Sub_P Parameter: Tissue Value: Germinating Seeds
  misc_feature: MA Experiment ID: 20000314 Result: Up-regulated in Transcription
  misc_feature: MA Experiment 20000314 PARAMETER Experiment Name: At_14day_Shoots-Roots_Sub_P Parameter: Age (day) Value: 14
  misc_feature: MA Experiment 20000314 PARAMETER Experiment Name: At_14day_Shoots-Roots_Sub_P Parameter: Organism Value: A. thaliana
  misc_feature: MA Experiment 20000314 PARAMETER Experiment Name: At_14day_Shoots-Roots_Sub_P Parameter: Plant Line Value: WS
  misc_feature: MA Experiment 20000314 PARAMETER Experiment Name: At_14day_Shoots-Roots_Sub_P Parameter: Tissue Value: Roots vs. Whole Plant
  misc_feature: MA Experiment ID: 20000315 Result: Up-regulated in Transcription
  misc_feature: MA Experiment 20000315 PARAMETER Experiment Name: At_14day_Shoots-Roots_Sub_P Parameter: Age (day) Value: 14
  misc_feature: MA Experiment 20000315 PARAMETER Experiment Name: At_14day_Shoots-Roots_Sub_P Parameter: Organism Value: A. thaliana
  misc_feature: MA Experiment 20000315 PARAMETER Experiment Name: At_14day_Shoots-Roots_Sub_P Parameter: Plant Line Value: WS
  misc_feature: MA Experiment 20000315 PARAMETER Experiment Name: At_14day_Shoots-Roots_Sub_P Parameter: Tissue Value: Shoots vs. Whole Plant
  misc_feature: MA Experiment ID: 20000355 Result: Up-regulated in Transcription
  misc_feature: MA Experiment 20000355 PARAMETER Experiment Name: At_Siliques_Sub_P Parameter: Age (day) Value: 21
  misc_feature: MA Experiment 20000355 PARAMETER Experiment Name: At_Siliques_Sub_P Parameter: Organism Value: A. thaliana
  misc_feature: MA Experiment 20000355 PARAMETER Experiment Name: At_Siliques_Sub_P Parameter: Plant Line Value: WS
  misc_feature: MA Experiment 20000355 PARAMETER Experiment Name: At_Siliques_Sub_P Parameter: Tissue Value: Less Than 5mm Siliques vs. Whole Plant
  misc_feature: MA Experiment ID: 20000440 Result: Up-regulated in Transcription
  misc_feature: MA Experiment 20000440 PARAMETER Experiment Name: At_Closed-Flower__Sub_P Parameter: Tissue Value: Closed Flower vs. Whole Plant
  misc_feature: MA Experiment ID: 20001248 Result: Down-regulated in Transcription
  misc_feature: MA Experiment 20001248 PARAMETER Experiment Name: At_Far-red-induction_P Parameter: Age (day) Value: 7
  misc_feature: MA Experiment 20001248 PARAMETER Experiment Name: At_Far-red-induction_P Parameter: Light Value: Far-red vs. White
  misc_feature: MA Experiment 20001248 PARAMETER Experiment Name: At_Far-red-induction_P Parameter: Organism Value: A. thaliana
  misc_feature: MA Experiment 20001248 PARAMETER Experiment Name: At_Far-red-induction_P Parameter: Plant Line Value: Columbia
  misc_feature: MA Experiment 20001248 PARAMETER Experiment Name: At_Far-red-induction_P Parameter: Timepoint (hr) Value: 4
  misc_feature: MA Experiment 20001248 PARAMETER Experiment Name: At_Far-red-induction_P Parameter: Tissue Value: Whole Plant
  misc_feature: MA Experiment ID: 20001451 Result: Up-regulated in Transcription
  misc_feature: MA Experiment 20001451 PARAMETER Experiment Name: At_Far-red-induction_P Parameter: Age (day) Value: 7
  misc_feature: MA Experiment 20001451 PARAMETER Experiment Name: At_Far-red-induction_P Parameter: Light Value: Far-red vs. White
  misc_feature: MA Experiment 20001451 PARAMETER Experiment Name: At_Far-red-induction_P Parameter: Organism Value: A. thaliana
  misc_feature: MA Experiment 20001451 PARAMETER Experiment Name: At_Far-red-induction_P Parameter: Plant Line Value: Columbia
  misc_feature: MA Experiment 20001451 PARAMETER Experiment Name: At_Far-red-induction_P Parameter: Timepoint (hr) Value: 24
  misc_feature: MA Experiment 20001451 PARAMETER Experiment Name: At_Far-red-induction_P Parameter: Tissue Value: Whole Plant
  misc_feature: MA Experiment ID: 20001557 Result: Up-regulated in Transcription
  misc_feature: MA Experiment 20001557 PARAMETER Experiment Name: At_Drought_Soil_Dry_P Parameter: Age (day) Value: 27
  misc_feature: MA Experiment 20001557 PARAMETER Experiment Name: At_Drought_Soil_Dry_P Parameter: Organism Value: A. thaliana
  misc_feature: MA Experiment 20001557 PARAMETER Experiment Name: At_Drought_Soil_Dry_P Parameter: Plant Line Value: WS
  misc_feature: MA Experiment 20001557 PARAMETER Experiment Name: At_Drought_Soil_Dry_P Parameter: Post Timepoint (hr) Value: 3
  misc_feature: MA Experiment 20001557 PARAMETER Experiment Name: At_Drought_Soil_Dry_P Parameter: Post-Treatment Value: Re-Water vs. No Drought
  misc_feature: MA Experiment 20001557 PARAMETER Experiment Name: At_Drought_Soil_Dry_P Parameter: Timepoint (day) Value: 13
  misc_feature: MA Experiment 20001557 PARAMETER Experiment Name: At_Drought_Soil_Dry_P Parameter: Treatment Value: Drought vs. No Drought

SEQ ID NO: 34267 - protein, 522 aa, Arabidopsis thaliana; identical to SEQ ID NO: 30677
  peptide (1)..(522): Ceres Seq. ID no. 12327224
  misc_feature (306)..(423): Pfam Name: Acyltransferase Pfam Description: Acyltransferase
  misc_feature (41)..(512): Homolog of NCBI NO: 18390661 NR Description: expressed protein
  misc_feature (42)..(516): Homolog of NCBI NO: 15239924 NR Description: putative protein; protein id: At5g06090.1
  misc_feature (42)..(516): Homolog of NCBI NO: 15229747 NR Description: unknown protein; protein id: At3g11430.1
  misc_feature (64)..(521): Homolog of NCBI NO: 29788867 NR Description: hypothetical protein [Oryza sativa (japonica
  misc_feature (29)..(514): Homolog of NCBI NO: 37534314 NR Description: hypothetical protein [Oryza sativa (japonica
  misc_feature (29)..(521): Homolog of NCBI NO: 38000002 NR Description: unknown protein [Oryza sativa (japonica
  misc_feature (232)..(519): Homolog of NCBI NO: 15236797 NR Description: putative protein; protein id: At4g00400.1
  misc_feature (20)..(520): Homolog of NCBI NO: 15224445 NR Description: unknown protein
  misc_feature (20)..(522): Homolog of NCBI NO: 15223437 NR Description: hypothetical protein
  misc_feature (20)..(522): Homolog of NCBI NO: 17064780 NR Description: Unknown protein [Arabidopsis thaliana]

SEQ ID NO: 34268 - protein, 503 aa, Arabidopsis thaliana; identical to SEQ ID NO: 30678
  peptide (1)..(503): Ceres Seq. ID no. 12327225
  misc_feature (287)..(404): Pfam Name: Acyltransferase Pfam Description: Acyltransferase
  misc_feature (22)..(493): Homolog of NCBI NO: 18390661 NR Description: expressed protein
  misc_feature (23)..(497): Homolog of NCBI NO: 15239924 NR Description: putative protein; protein id: At5g06090.1
  misc_feature (23)..(497): Homolog of NCBI NO: 15229747 NR Description: unknown protein; protein id: At3g11430.1
  misc_feature (45)..(502): Homolog of NCBI NO: 29788867 NR Description: hypothetical protein [Oryza sativa (japonica
  misc_feature (10)..(495): Homolog of NCBI NO: 37534314 NR Description: hypothetical protein [Oryza sativa (japonica
  misc_feature (10)..(502): Homolog of NCBI NO: 38000002 NR Description: unknown protein [Oryza sativa (japonica
  misc_feature (213)..(500): Homolog of NCBI NO: 15236797 NR Description: putative protein; protein id: At4g00400.1
  misc_feature (1)..(501): Homolog of NCBI NO: 15224445 NR Description: unknown protein
  misc_feature (1)..(503): Homolog of NCBI NO: 15223437 NR Description: hypothetical protein
  misc_feature (1)..(503): Homolog of NCBI NO: 17064780 NR Description: Unknown protein [Arabidopsis thaliana]

SEQ ID NO: 34269 - protein, 461 aa, Arabidopsis thaliana; identical to SEQ ID NO: 30679
  peptide (1)..(461): Ceres Seq. ID no. 12327226
  misc_feature (245)..(362): Pfam Name: Acyltransferase Pfam Description: Acyltransferase
  misc_feature (1)..(451): Homolog of NCBI NO: 18390661 NR Description: expressed protein
  misc_feature (1)..(455): Homolog of NCBI NO: 15239924 NR Description: putative protein; protein id: At5g06090.1
  misc_feature (1)..(455): Homolog of NCBI NO: 15229747 NR Description: unknown protein; protein id: At3g11430.1
  misc_feature (3)..(460): Homolog of NCBI NO: 29788867 NR Description: hypothetical protein [Oryza sativa (japonica
  misc_feature (1)..(453): Homolog of NCBI NO: 37534314 NR Description: hypothetical protein [Oryza sativa (japonica
  misc_feature (1)..(460): Homolog of NCBI NO: 38000002 NR Description: unknown protein [Oryza sativa (japonica
  misc_feature (171)..(458): Homolog of NCBI NO: 15236797 NR Description: putative protein; protein id: At4g00400.1
  misc_feature (1)..(459): Homolog of NCBI NO: 15224445 NR Description: unknown protein
  misc_feature (1)..(461): Homolog of NCBI NO: 15223437 NR Description: hypothetical protein
  misc_feature (1)..(461): Homolog of NCBI NO: 17064780 NR Description: Unknown protein [Arabidopsis thaliana]

SEQ ID NO: 34270 - DNA, 921 bp, Arabidopsis thaliana; identical to SEQ ID NO: 30680
  misc_feature (1)..(921): Ceres Seq. ID no. 12385734
  misc_feature: MA Experiment ID: 20000087 Result: Down-regulated in Transcription
  misc_feature: MA Experiment 20000087 PARAMETER Experiment Name: At_100uM_ABA_Mutants_cDNA_P Parameter: Plant Line Value: WS
  misc_feature: MA Experiment 20000087 PARAMETER Experiment Name: At_100uM_ABA_Mutants_cDNA_P Parameter: Timepoint (hr) Value: 6
  misc_feature: MA Experiment 20000087 PARAMETER Experiment Name: At_100uM_ABA_Mutants_cDNA_P Parameter: Tissue Value: Aerial
  misc_feature: MA Experiment 20000087 PARAMETER Experiment Name: At_100uM_ABA_Mutants_cDNA_P Parameter: Treatment Value: 100uM ABA vs. No Treatment
  misc_feature: MA Experiment ID: 20000113 Result: Down-regulated in Transcription
  misc_feature: MA Experiment 20000113 PARAMETER Experiment Name: At_42deg_Heat_cDNA_P Parameter: Temperature (deg C) Value: 42 vs. 22
  misc_feature: MA Experiment 20000113 PARAMETER Experiment Name: At_42deg_Heat_cDNA_P Parameter: Timepoint (hr) Value: 8
  misc_feature: MA Experiment 20000113 PARAMETER Experiment Name: At_42deg_Heat_cDNA_P Parameter: Tissue Value: Aerial
  misc_feature: MA Experiment ID: 20000173 Result: Down-regulated in Transcription
  misc_feature: MA Experiment 20000173 PARAMETER Experiment Name: At_42deg_Heat_P Parameter: Age (day) Value: 14
  misc_feature: MA Experiment 20000173 PARAMETER Experiment Name: At_42deg_Heat_P Parameter: Organism Value: A. thaliana
  misc_feature: MA Experiment 20000173 PARAMETER Experiment Name: At_42deg_Heat_P Parameter: Plant Line Value: WS
  misc_feature: MA Experiment 20000173 PARAMETER Experiment Name: At_42deg_Heat_P Parameter: Temperature (deg C) Value: 42 vs. 22
  misc_feature: MA Experiment 20000173 PARAMETER Experiment Name: At_42deg_Heat_P Parameter: Timepoint (hr) Value: 6
  misc_feature: MA Experiment 20000173 PARAMETER Experiment Name: At_42deg_Heat_P Parameter: Tissue Value: Aerial
  misc_feature: MA Experiment ID: 20000184 Result: Down-regulated in Transcription
  misc_feature: MA Experiment 20000184 PARAMETER Experiment Name: At_Shoots__P Parameter: Age (day) Value: 7
  misc_feature: MA Experiment 20000184 PARAMETER Experiment Name: At_Shoots__P Parameter: Tissue Value: Shoots vs. Whole Plant
  misc_feature: MA Experiment ID: 20000185 Result: Down-regulated in Transcription
  misc_feature: MA Experiment 20000185 PARAMETER Experiment Name: At_Roots__P Parameter: Age (day) Value: 7 vs. 21
  misc_feature: MA Experiment 20000185 PARAMETER Experiment Name: At_Roots__P Parameter: Organism Value: A. thaliana
  misc_feature: MA Experiment 20000185 PARAMETER Experiment Name: At_Roots__P Parameter: Tissue Value: Roots vs. Whole Plant
  misc_feature: MA Experiment ID: 20000234 Result: Down-regulated in Transcription
  misc_feature: MA Experiment 20000234 PARAMETER Experiment Name: At_Siliques_P Parameter: Age (day) Value: 21
  misc_feature: MA Experiment 20000234 PARAMETER Experiment Name: At_Siliques_P Parameter: Organism Value: A. thaliana
  misc_feature: MA Experiment 20000234 PARAMETER Experiment Name: At_Siliques_P Parameter: Plant Line Value: WS
  misc_feature: MA Experiment 20000234 PARAMETER Experiment Name: At_Siliques_P Parameter: Tissue Value: Less Than 5mm Siliques vs. Whole Plant
  misc_feature: MA Experiment ID: 20000235 Result: Down-regulated in Transcription
  misc_feature: MA Experiment 20000235 PARAMETER Experiment Name: At_Siliques_P Parameter: Age (day) Value: 21
  misc_feature: MA Experiment 20000235 PARAMETER Experiment Name: At_Siliques_P Parameter: Organism Value: A. thaliana
  misc_feature: MA Experiment 20000235 PARAMETER Experiment Name: At_Siliques_P Parameter: Plant Line Value: WS
  misc_feature: MA Experiment 20000235 PARAMETER Experiment Name: At_Siliques_P Parameter: Tissue Value: 5-10mm Siliques vs. Whole Plant
  misc_feature: MA Experiment ID: 20000438 Result: Down-regulated in Transcription
  misc_feature: MA Experiment 20000438 PARAMETER Experiment Name: At_Shoots__P Parameter: Age (day) Value: 14
  misc_feature: MA Experiment 20000438 PARAMETER Experiment Name: At_Shoots__P Parameter: Tissue Value: Shoots vs. Whole Plant
  misc_feature: MA Experiment ID: 20000794 Result: Up-regulated in Transcription
  misc_feature: MA Experiment 20000794 PARAMETER Experiment Name: At_Petals_P Parameter: Age (day) Value: 23-25 days
  misc_feature: MA Experiment 20000794 PARAMETER Experiment Name: At_Petals_P Parameter: Plant Line Value: WS
  misc_feature: MA Experiment 20000794 PARAMETER Experiment Name: At_Petals_P Parameter: Tissue Value: Petals vs. Whole plant
  misc_feature: MA Experiment ID: 20001904 Result: Up-regulated in Transcription
  misc_feature: MA Experiment 20001904 PARAMETER Experiment Name: At_Drought_Reproduction_P Parameter: Age (day) Value: 37
  misc_feature: MA Experiment 20001904 PARAMETER Experiment Name: At_Drought_Reproduction_P Parameter: Organism Value: A. thaliana
  misc_feature: MA Experiment 20001904 PARAMETER Experiment Name: At_Drought_Reproduction_P Parameter: Plant Line Value: WS
  misc_feature: MA Experiment 20001904 PARAMETER Experiment Name: At_Drought_Reproduction_P Parameter: Timepoint (day) Value: 7
  misc_feature: MA Experiment 20001904 PARAMETER Experiment Name: At_Drought_Reproduction_P Parameter: Tissue Value: Rosettes
  misc_feature: MA Experiment 20001904 PARAMETER Experiment Name: At_Drought_Reproduction_P Parameter: Treatment Value: Drought vs. No Drought
  misc_feature: MA Experiment ID: 20001905 Result: Up-regulated in Transcription
  misc_feature: MA Experiment 20001905 PARAMETER Experiment Name: At_Drought_Reproduction_P Parameter: Age (day) Value: 40
  misc_feature: MA Experiment 20001905 PARAMETER Experiment Name: At_Drought_Reproduction_P Parameter: Organism Value: A. thaliana
  misc_feature: MA Experiment 20001905 PARAMETER Experiment Name: At_Drought_Reproduction_P Parameter: Plant Line Value: WS
  misc_feature: MA Experiment 20001905 PARAMETER Experiment Name: At_Drought_Reproduction_P Parameter: Timepoint (day) Value: 10
  misc_feature: MA Experiment 20001905 PARAMETER Experiment Name: At_Drought_Reproduction_P Parameter: Tissue Value: Rosettes
  misc_feature: MA Experiment 20001905 PARAMETER Experiment Name: At_Drought_Reproduction_P Parameter: Treatment Value: Drought vs. No Drought

SEQ ID NO: 34271 - protein, 268 aa, Arabidopsis thaliana; identical to SEQ ID NO: 30681
  peptide (1)..(268): Ceres Seq. ID no. 12385735
  misc_feature (15)..(138): Pfam Name: No apical meristem (NAM) protein Pfam Description: No apical meristem (NAM) protein
  misc_feature (15)..(227): Homolog of NCBI NO: 6223651 NR Description: NAM-like protein (no apical meristem)
  misc_feature (15)..(179): Homolog of NCBI NO: 15148914 NR Description: NAC domain protein NAC2 [Phaseolus vulgaris]
  misc_feature (15)..(192): Homolog of NCBI NO: 21554255 NR Description: NAC domain protein NAC2 [Arabidopsis thaliana]
  misc_feature (7)..(183): Homolog of NCBI NO: 21593134 NR Description: GRAB1-like protein [Arabidopsis thaliana]
  misc_feature (7)..(183): Homolog of NCBI NO: 15223963 NR Description: GRAB1-like protein
  misc_feature (15)..(192): Homolog of NCBI NO: 18409291 NR Description: expressed protein
  misc_feature (13)..(255): Homolog of NCBI NO: 15221787 NR Description: NAM protein, putative; protein id: At1g54330.1
  misc_feature (1)..(267): Homolog of NCBI NO: 7489024 NR Description: hypothetical protein SENU5, senescence
  misc_feature (1)..(250): Homolog of NCBI NO: 15240042 NR Description: NAM-like protein
  misc_feature (1)..(268): Homolog of NCBI NO: 15226119 NR Description: putative NAM (no apical meristem)-like protein

SEQ ID NO: 34272 - protein, 201 aa, Arabidopsis thaliana; identical to SEQ ID NO: 30682
  peptide (1)..(201): Ceres Seq. ID no. 12385736
  misc_feature (1)..(71): Pfam Name: No apical meristem (NAM) protein Pfam Description: No apical meristem (NAM) protein
  misc_feature (1)..(160): Homolog of NCBI NO: 6223651 NR Description: NAM-like protein (no apical meristem)
  misc_feature (1)..(112): Homolog of NCBI NO: 15148914 NR Description: NAC domain protein NAC2 [Phaseolus vulgaris]
  misc_feature (1)..(125): Homolog of NCBI NO: 21554255 NR Description: NAC domain protein NAC2 [Arabidopsis thaliana]
  misc_feature (1)..(116): Homolog of NCBI NO: 21593134 NR Description: GRAB1-like protein [Arabidopsis thaliana]
  misc_feature (1)..(116): Homolog of NCBI NO: 15223963 NR Description: GRAB1-like protein
  misc_feature (1)..(125): Homolog of NCBI NO: 18409291 NR Description: expressed protein
  misc_feature (1)..(188): Homolog of NCBI NO: 15221787 NR Description: NAM protein, putative; protein id: At1g54330.1
  misc_feature (1)..(200): Homolog of NCBI NO: 7489024 NR Description: hypothetical protein SENU5, senescence
  misc_feature (1)..(183): Homolog of NCBI NO: 15240042 NR Description: NAM-like protein
  misc_feature (1)..(201): Homolog of NCBI NO: 15226119 NR Description: putative NAM (no apical meristem)-like protein

SEQ ID NO: 34273 - protein, 158 aa, Arabidopsis thaliana; identical to SEQ ID NO: 30683
  peptide (1)..(158): Ceres Seq. ID no. 12385737
  misc_feature (1)..(117): Homolog of NCBI NO: 6223651 NR Description: NAM-like protein (no apical meristem)
  misc_feature (1)..(69): Homolog of NCBI NO: 15148914 NR Description: NAC domain protein NAC2 [Phaseolus vulgaris]
  misc_feature (1)..(82): Homolog of NCBI NO: 21554255 NR Description: NAC domain protein NAC2 [Arabidopsis thaliana]
  misc_feature (1)..(73): Homolog of NCBI NO: 21593134 NR Description: GRAB1-like protein [Arabidopsis thaliana]
  misc_feature (1)..(73): Homolog of NCBI NO: 15223963 NR Description: GRAB1-like protein
  misc_feature (1)..(82): Homolog of NCBI NO: 18409291 NR Description: expressed protein
  misc_feature (1)..(145): Homolog of NCBI NO: 15221787 NR Description: NAM protein, putative; protein id: At1g54330.1
  misc_feature (1)..(157): Homolog of NCBI NO: 7489024 NR Description: hypothetical protein SENU5, senescence
  misc_feature (1)..(140): Homolog of NCBI NO: 15240042 NR Description: NAM-like protein
  misc_feature (1)..(158): Homolog of NCBI NO: 15226119 NR Description: putative NAM (no apical meristem)-like protein

SEQ ID NO: 34274 - DNA, 1781 bp, Arabidopsis thaliana; identical to SEQ ID NO: 30684
  misc_feature (1)..(1781): Ceres Seq. ID no. 12372041
  misc_feature: MA Experiment ID: 108434 Result: Down-regulated in Transcription
  misc_feature: MA Experiment 108434 PARAMETER Experiment Name: At_Root_Tips_cDNA_P Parameter: Tissue Value: Root Tips
  misc_feature: MA Experiment ID: 108577 Result: Down-regulated in Transcription
  misc_feature: MA Experiment 108577 PARAMETER Experiment Name: At_42deg_Heat_cDNA_P Parameter: Temperature (deg C) Value: 42 vs. 22
  misc_feature: MA Experiment 108577 PARAMETER Experiment Name: At_42deg_Heat_cDNA_P Parameter: Timepoint (hr) Value: 6
  misc_feature: MA Experiment 108577 PARAMETER Experiment Name: At_42deg_Heat_cDNA_P Parameter: Tissue Value: Aerial
  misc_feature: MA Experiment ID: 108585 Result: Up-regulated in Transcription
  misc_feature: MA Experiment 108585 PARAMETER Experiment Name: At_5mM_NaNP_cDNA_P Parameter: Timepoint (hr) Value: 6
  misc_feature: MA Experiment 108585 PARAMETER Experiment Name: At_5mM_NaNP_cDNA_P Parameter: Tissue Value: Aerial
  misc_feature: MA Experiment 108585 PARAMETER Experiment Name: At_5mM_NaNP_cDNA_P Parameter: Treatment Value: null
  misc_feature: MA Experiment ID: 108667 Result: Up-regulated in Transcription
  misc_feature: MA Experiment 108667 PARAMETER Experiment Name: At_2mM_SA_cDNA_P Parameter: Plant Line Value: WS
  misc_feature: MA Experiment 108667 PARAMETER Experiment Name: At_2mM_SA_cDNA_P Parameter: Timepoint (hr) Value: 1
  misc_feature: MA Experiment 108667 PARAMETER Experiment Name: At_2mM_SA_cDNA_P Parameter: Treatment Value: 2mM SA vs. No Treatment
  misc_feature: MA Experiment ID: 20000111 Result: Down-regulated in Transcription
  misc_feature: MA Experiment 20000111 PARAMETER Experiment Name: At_42deg_Heat_cDNA_P Parameter: Temperature (deg C) Value: 42 vs. 22
  misc_feature: MA Experiment 20000111 PARAMETER Experiment Name: At_42deg_Heat_cDNA_P Parameter: Timepoint (hr) Value: 6
  misc_feature: MA Experiment 20000111 PARAMETER Experiment Name: At_42deg_Heat_cDNA_P Parameter: Tissue Value: Aerial
  misc_feature: MA Experiment ID: 20000113 Result: Down-regulated in Transcription
  misc_feature: MA Experiment 20000113 PARAMETER Experiment Name: At_42deg_Heat_cDNA_P Parameter: Temperature (deg C) Value: 42 vs. 22
  misc_feature: MA Experiment 20000113 PARAMETER Experiment Name: At_42deg_Heat_cDNA_P Parameter: Timepoint (hr) Value: 8
  misc_feature: MA Experiment 20000113 PARAMETER Experiment Name: At_42deg_Heat_cDNA_P Parameter: Tissue Value: Aerial
  misc_feature: MA Experiment ID: 20000184 Result: Down-regulated in Transcription
  misc_feature: MA Experiment 20000184 PARAMETER Experiment Name: At_Shoots__P Parameter: Age (day) Value: 7
  misc_feature: MA Experiment 20000184 PARAMETER Experiment Name: At_Shoots__P Parameter: Tissue Value: Shoots vs. Whole Plant
  misc_feature: MA Experiment ID: 20000185 Result: Down-regulated in Transcription
  misc_feature: MA Experiment 20000185 PARAMETER Experiment Name: At_Roots__P Parameter: Age (day) Value: 7 vs. 21
  misc_feature: MA Experiment 20000185 PARAMETER Experiment Name: At_Roots__P Parameter: Organism Value: A. thaliana
  misc_feature: MA Experiment 20000185 PARAMETER Experiment Name: At_Roots__P Parameter: Tissue Value: Roots vs. Whole Plant
  misc_feature: MA Experiment ID: 20000234 Result: Down-regulated in Transcription
  misc_feature: MA Experiment 20000234 PARAMETER Experiment Name: At_Siliques_P Parameter: Age (day) Value: 21
  misc_feature: MA Experiment 20000234 PARAMETER Experiment Name: At_Siliques_P Parameter: Organism Value: A. thaliana
  misc_feature: MA Experiment 20000234 PARAMETER Experiment Name: At_Siliques_P Parameter: Plant Line Value: WS
  misc_feature: MA Experiment 20000234 PARAMETER Experiment Name: At_Siliques_P Parameter: Tissue Value: Less Than 5mm Siliques vs. Whole Plant
  misc_feature: MA Experiment ID: 20000235 Result: Down-regulated in Transcription
  misc_feature: MA Experiment 20000235 PARAMETER Experiment Name: At_Siliques_P Parameter: Age (day) Value: 21
  misc_feature: MA Experiment 20000235 PARAMETER Experiment Name: At_Siliques_P Parameter: Organism Value: A. thaliana
  misc_feature: MA Experiment 20000235 PARAMETER Experiment Name: At_Siliques_P Parameter: Plant Line Value: WS
  misc_feature: MA Experiment 20000235 PARAMETER Experiment Name: At_Siliques_P Parameter: Tissue Value: 5-10mm Siliques vs. Whole Plant
  misc_feature: MA Experiment ID: 20000264 Result: Down-regulated in Transcription
  misc_feature: MA Experiment 20000264 PARAMETER Experiment Name: At_Open_Flower_P Parameter: Age (day) Value: 21
  misc_feature: MA Experiment 20000264 PARAMETER Experiment Name: At_Open_Flower_P Parameter: Plant Line Value: WS
  misc_feature: MA Experiment 20000264 PARAMETER Experiment Name: At_Open_Flower_P Parameter: Tissue Value: Open Flower vs. Whole Plant
  misc_feature: MA Experiment ID: 20000265 Result: Down-regulated in Transcription
  misc_feature: MA Experiment 20000265 PARAMETER Experiment Name: At_Open_Flower_P Parameter: Age (day) Value: 21
  misc_feature: MA Experiment 20000265 PARAMETER Experiment Name: At_Open_Flower_P Parameter: Plant Line Value: WS
  misc_feature: MA Experiment 20000265 PARAMETER Experiment Name: At_Open_Flower_P Parameter: Tissue Value: Closed Flower vs. Whole Plant
  misc_feature: MA Experiment ID: 20000437 Result: Down-regulated in Transcription
  misc_feature: MA Experiment 20000437 PARAMETER Experiment Name: At_Drought_P Parameter: Age (day) Value: 8
  misc_feature: MA Experiment 20000437 PARAMETER Experiment Name: At_Drought_P Parameter: Organism Value: A. thaliana
  misc_feature: MA Experiment 20000437 PARAMETER Experiment Name: At_Drought_P Parameter: Plant Line Value: WS
  misc_feature: MA Experiment 20000437 PARAMETER Experiment Name: At_Drought_P Parameter: Timepoint (hr) Value: 24
  misc_feature: MA Experiment 20000437 PARAMETER Experiment Name: At_Drought_P Parameter: Tissue Value: Whole Plant
  misc_feature: MA Experiment 20000437 PARAMETER Experiment Name: At_Drought_P Parameter: Treatment Value: Drought vs. No Drought
  misc_feature: MA Experiment ID: 20000438 Result: Down-regulated in Transcription
  misc_feature: MA Experiment 20000438 PARAMETER Experiment Name: At_Shoots__P Parameter: Age (day) Value: 14
  misc_feature: MA Experiment 20000438 PARAMETER Experiment Name: At_Shoots__P Parameter: Tissue Value: Shoots vs. Whole Plant
  misc_feature: MA Experiment ID: 20000439 Result: Down-regulated in Transcription
  misc_feature: MA Experiment 20000439 PARAMETER Experiment Name: At_Roots__P Parameter: Age (day) Value: 14 vs. 21
  misc_feature: MA Experiment 20000439 PARAMETER Experiment Name: At_Roots__P Parameter: Organism Value: A. thaliana
  misc_feature: MA Experiment 20000439 PARAMETER Experiment Name: At_Roots__P Parameter: Tissue Value: Roots vs. Whole Plant
  misc_feature: MA Experiment ID: 20000460 Result: Up-regulated in Transcription
  misc_feature: MA Experiment 20000460 PARAMETER Experiment Name: At_10percent_PEG_P Parameter: Age (day) Value: 12
  misc_feature: MA Experiment 20000460 PARAMETER Experiment Name: At_10percent_PEG_P Parameter: Organism Value: A. thaliana
  misc_feature: MA Experiment 20000460 PARAMETER Experiment Name: At_10percent_PEG_P Parameter: Plant Line Value: WS
  misc_feature: MA Experiment 20000460 PARAMETER Experiment Name: At_10percent_PEG_P Parameter: Timepoint (day) Value: 12
  misc_feature: MA Experiment 20000460 PARAMETER Experiment Name: At_10percent_PEG_P Parameter: Tissue Value: Whole Plant
  misc_feature: MA Experiment 20000460 PARAMETER Experiment Name: At_10percent_PEG_P Parameter: Treatment Value: 10percent PEG vs. No Treatment
  misc_feature: MA Experiment ID: 20000527 Result: Up-regulated in Transcription
  misc_feature: MA Experiment 20000527 PARAMETER Experiment Name: At_10percent_PEG_P Parameter: Age (day) Value: 20
  misc_feature: MA Experiment 20000527 PARAMETER Experiment Name: At_10percent_PEG_P Parameter: Organism Value: A. thaliana
  misc_feature: MA Experiment 20000527 PARAMETER Experiment Name: At_10percent_PEG_P Parameter: Plant Line Value: WS
  misc_feature: MA Experiment 20000527 PARAMETER Experiment Name: At_10percent_PEG_P Parameter: Timepoint (day) Value: 20
  misc_feature: MA Experiment 20000527 PARAMETER Experiment Name: At_10percent_PEG_P Parameter: Tissue Value: Whole Plant
  misc_feature: MA Experiment 20000527 PARAMETER Experiment Name: At_10percent_PEG_P Parameter: Treatment Value: 10percent PEG vs. No Treatment
  misc_feature: MA Experiment ID: 20000573 Result: Down-regulated in Transcription
  misc_feature: MA Experiment 20000573 PARAMETER Experiment Name: At_100uM_ABA_Mutants__P Parameter: Organism Value: A. thaliana
  misc_feature: MA Experiment 20000573 PARAMETER Experiment Name: At_100uM_ABA_Mutants__P Parameter: Plant Line Value: CS22 vs. Ler wt
  misc_feature: MA Experiment 20000573 PARAMETER Experiment Name: At_100uM_ABA_Mutants__P Parameter: Timepoint (hr) Value: N/A
  misc_feature: MA Experiment 20000573 PARAMETER Experiment Name: At_100uM_ABA_Mutants__P Parameter: Tissue Value: Whole Plant
  misc_feature: MA Experiment 20000573 PARAMETER Experiment Name: At_100uM_ABA_Mutants__P Parameter: Treatment Value: None
  misc_feature: MA Experiment ID: 20000574 Result: Down-regulated in Transcription
  misc_feature: MA Experiment 20000574 PARAMETER Experiment Name: At_100uM_ABA_Mutants__P Parameter: Organism Value: A. thaliana
  misc_feature: MA Experiment 20000574 PARAMETER Experiment Name: At_100uM_ABA_Mutants__P Parameter: Plant Line Value: CS23 vs. Ler wt
  misc_feature: MA Experiment 20000574 PARAMETER Experiment Name: At_100uM_ABA_Mutants__P Parameter: Timepoint (hr) Value: N/A
  misc_feature: MA Experiment 20000574 PARAMETER Experiment Name: At_100uM_ABA_Mutants__P Parameter: Tissue Value: Whole Plant
  misc_feature: MA Experiment 20000574 PARAMETER Experiment Name: At_100uM_ABA_Mutants__P Parameter: Treatment Value: None
  misc_feature: MA Experiment ID: 20000794 Result: Down-regulated in Transcription
  misc_feature: MA Experiment 20000794 PARAMETER Experiment Name: At_Petals_P Parameter: Age (day) Value: 23-25 days
  misc_feature: MA Experiment 20000794 PARAMETER Experiment Name: At_Petals_P Parameter: Plant Line Value: WS
  misc_feature: MA Experiment 20000794 PARAMETER Experiment Name: At_Petals_P Parameter: Tissue Value: Petals vs. Whole plant
  misc_feature: MA Experiment ID: 20001248 Result: Up-regulated in Transcription
  misc_feature: MA Experiment 20001248 PARAMETER Experiment Name: At_Far-red-induction_P Parameter: Age (day) Value: 7
  misc_feature: MA Experiment 20001248 PARAMETER Experiment Name: At_Far-red-induction_P Parameter: Light Value: Far-red vs. White
  misc_feature: MA Experiment 20001248 PARAMETER Experiment Name: At_Far-red-induction_P Parameter: Organism Value: A. thaliana
  misc_feature: MA Experiment 20001248 PARAMETER Experiment Name: At_Far-red-induction_P Parameter: Plant Line Value: Columbia
  misc_feature: MA Experiment 20001248 PARAMETER Experiment Name: At_Far-red-induction_P Parameter: Timepoint (hr) Value: 4
  misc_feature: MA Experiment 20001248 PARAMETER Experiment Name: At_Far-red-induction_P Parameter: Tissue Value: Whole Plant
  misc_feature: MA Experiment ID: 20001905 Result: Down-regulated in Transcription
  misc_feature: MA Experiment 20001905 PARAMETER Experiment Name: At_Drought_Reproduction_P Parameter: Age (day) Value: 40
  misc_feature: MA Experiment 20001905 PARAMETER Experiment Name: At_Drought_Reproduction_P Parameter: Organism Value: A. thaliana
  misc_feature: MA Experiment 20001905 PARAMETER Experiment Name: At_Drought_Reproduction_P Parameter: Plant Line Value: WS
  misc_feature: MA Experiment 20001905 PARAMETER Experiment Name: At_Drought_Reproduction_P Parameter: Timepoint (day) Value: 10
  misc_feature: MA Experiment 20001905 PARAMETER Experiment Name: At_Drought_Reproduction_P Parameter: Tissue Value: Rosettes
  misc_feature: MA Experiment 20001905 PARAMETER Experiment Name: At_Drought_Reproduction_P Parameter: Treatment Value: Drought vs. No Drought

SEQ ID NO: 34275 - protein, 523 aa, Arabidopsis thaliana; identical to SEQ ID NO: 30685
  peptide (1)..(523): Ceres Seq. ID no. 12372042
  misc_feature (62)..(322): Pfam Name: Protein kinase domain Pfam Description: Protein kinase domain
  misc_feature (52)..(510): Homolog of NCBI NO: 33146627 NR Description: putative CDPK-related protein kinase
  misc_feature (1)..(510): Homolog of NCBI NO: 6689920 NR Description: calcium-dependent protein kinase [Oryza sativa]
  misc_feature (40)..(521): Homolog of NCBI NO: 34902680 NR Description: similar to calcium-dependent protein kinase
  misc_feature (1)..(520): Homolog of NCBI NO: 15234291 NR Description: Calcium-dependent serine/threonine protein kinase
  misc_feature (32)..(510): Homolog of NCBI NO: 3779218 NR Description: protein kinase CPK1 [Solanum tuberosum]
  misc_feature (1)..(521): Homolog of NCBI NO: 12592069 NR Description: calcium-dependent protein kinase [Oryza sativa]
  misc_feature (17)..(519): Homolog of NCBI NO: 15227920 NR Description: putative Ca2+-dependent ser/thr protein kinase
  misc_feature (38)..(516): Homolog of NCBI NO: 16904224 NR Description: calcium/calmodulin-dependent protein kinase CaMK2
  misc_feature (1)..(523): Homolog of NCBI NO: 15239300 NR Description: calcium-dependent protein kinase
  misc_feature (1)..(523): Homolog of NCBI NO: 21553971 NR Description: calcium-dependent protein kinase [Arabidopsis

SEQ ID NO: 34276 - protein, 426 aa, Arabidopsis thaliana; identical to SEQ ID NO: 30686
  peptide (1)..(426): Ceres Seq. ID no. 12372043
  misc_feature (1)..(225): Pfam Name: Protein kinase domain Pfam Description: Protein kinase domain
  misc_feature (1)..(413): Homolog of NCBI NO: 33146627 NR Description: putative CDPK-related protein kinase
  misc_feature (1)..(413): Homolog of NCBI NO: 6689920 NR Description: calcium-dependent protein kinase [Oryza sativa]
  misc_feature (1)..(424): Homolog of NCBI NO: 34902680 NR Description: similar to calcium-dependent protein kinase
  misc_feature (1)..(423): Homolog of NCBI NO: 15234291 NR Description: Calcium-dependent serine/threonine protein kinase
  misc_feature (1)..(413): Homolog of NCBI NO: 3779218 NR Description: protein kinase CPK1 [Solanum tuberosum]
  misc_feature (1)..(424): Homolog of NCBI NO: 12592069 NR Description: calcium-dependent protein kinase [Oryza sativa]
  misc_feature (1)..(422): Homolog of NCBI NO: 15227920 NR Description: putative Ca2+-dependent ser/thr protein kinase
  misc_feature (1)..(419): Homolog of NCBI NO: 16904224 NR Description: calcium/calmodulin-dependent protein kinase CaMK2
  misc_feature (1)..(426): Homolog of NCBI NO: 15239300 NR Description: calcium-dependent protein kinase
  misc_feature (1)..(426): Homolog of NCBI NO: 21553971 NR Description: calcium-dependent protein kinase [Arabidopsis

SEQ ID NO: 34277 - protein, 384 aa, Arabidopsis thaliana; identical to SEQ ID NO: 30687
  peptide (1)..(384): Ceres Seq. ID no. 12372044
  misc_feature (1)..(183): Pfam Name: Protein kinase domain Pfam Description: Protein kinase domain
  misc_feature (1)..(371): Homolog of NCBI NO: 33146627 NR Description: putative CDPK-related protein kinase
  misc_feature (1)..(371): Homolog of NCBI NO: 6689920 NR Description: calcium-dependent protein kinase [Oryza sativa]
  misc_feature (1)..(382): Homolog of NCBI NO: 34902680 NR Description: similar to calcium-dependent protein kinase
  misc_feature (1)..(381): Homolog of NCBI NO: 15234291 NR Description: Calcium-dependent serine/threonine protein kinase
  misc_feature (1)..(371): Homolog of NCBI NO: 3779218 NR Description: protein kinase CPK1 [Solanum tuberosum]
  misc_feature (1)..(382): Homolog of NCBI NO: 12592069 NR Description: calcium-dependent protein kinase [Oryza sativa]
  misc_feature (1)..(380): Homolog of NCBI NO: 15227920 NR Description: putative Ca2+-dependent ser/thr protein kinase
  misc_feature (1)..(377): Homolog of NCBI NO: 16904224 NR Description: calcium/calmodulin-dependent protein kinase CaMK2
  misc_feature (1)..(384): Homolog of NCBI NO: 15239300 NR Description: calcium-dependent protein kinase
  misc_feature (1)..(384): Homolog of NCBI NO: 21553971 NR Description: calcium-dependent protein kinase [Arabidopsis

SEQ ID NO: 34278 - DNA, 711 bp, Arabidopsis thaliana; identical to SEQ ID NO: 30688
  misc_feature (1)..(711): Ceres Seq. ID no. 12321740
  misc_feature: MA Experiment ID: 108434 Result: Up-regulated in Transcription
  misc_feature: MA Experiment 108434 PARAMETER Experiment Name: At_Root_Tips_cDNA_P Parameter: Tissue Value: Root Tips
  misc_feature: MA Experiment ID: 108435 Result: Up-regulated in Transcription
  misc_feature: MA Experiment 108435 PARAMETER Experiment Name: At_stm_Mutants_cDNA_P Parameter: Plant Line Value: wt Landsburg vs stm
  misc_feature: MA Experiment 108435 PARAMETER Experiment Name: At_stm_Mutants_cDNA_P Parameter: Tissue Value: Shoot Apical Meristem Region
  misc_feature: MA Experiment ID: 108462 Result: Down-regulated in Transcription
  misc_feature: MA Experiment 108462 PARAMETER Experiment Name: At_Germinating_Seeds_cDNA_P Parameter: Age (day) Value: 2 vs. 0
  misc_feature: MA Experiment 108462 PARAMETER Experiment Name: At_Germinating_Seeds_cDNA_P Parameter: Tissue Value: Germinating Seeds
  misc_feature: MA Experiment ID: 108463 Result: Down-regulated in Transcription
  misc_feature: MA Experiment 108463 PARAMETER Experiment Name: At_Germinating_Seeds_cDNA_P Parameter: Age (day) Value: 3 vs. 0
  misc_feature: MA Experiment 108463 PARAMETER Experiment Name: At_Germinating_Seeds_cDNA_P Parameter: Tissue Value: Germinating Seeds
  misc_feature: MA Experiment ID: 108489 Result: Up-regulated in Transcription
  misc_feature: MA Experiment ID: 108561 Result: Down-regulated in Transcription
  misc_feature: MA Experiment 108561 PARAMETER Experiment Name: At_100uM_ABA_cDNA_P Parameter: Timepoint (hr) Value: 6
  misc_feature: MA Experiment 108561 PARAMETER Experiment Name: At_100uM_ABA_cDNA_P Parameter: Tissue Value: Aerial
  misc_feature: MA Experiment 108561 PARAMETER Experiment Name: At_100uM_ABA_cDNA_P Parameter: Treatment Value: 100uM ABA vs. No Treatment
  misc_feature: MA Experiment ID: 108573 Result: Down-regulated in Transcription
  misc_feature: MA Experiment 108573 PARAMETER Experiment Name: At_Drought_cDNA_P Parameter: Timepoint (hr) Value: 6
  misc_feature: MA Experiment 108573 PARAMETER Experiment Name: At_Drought_cDNA_P Parameter: Tissue Value: Aerial
  misc_feature: MA Experiment 108573 PARAMETER Experiment Name: At_Drought_cDNA_P Parameter: Treatment Value: Drought vs. No Drought
  misc_feature: MA Experiment ID: 108607 Result: Down-regulated in Transcription
  misc_feature: MA Experiment 108607 PARAMETER Experiment Name: At_100uM_ABA_cDNA_P Parameter: Timepoint (hr) Value: 4
  misc_feature: MA Experiment 108607 PARAMETER Experiment Name: At_100uM_ABA_cDNA_P Parameter: Tissue Value: Aerial
  misc_feature: MA Experiment 108607 PARAMETER Experiment Name: At_100uM_ABA_cDNA_P Parameter: Treatment Value: 100uM ABA vs. No Treatment
  misc_feature: MA Experiment ID: 108609 Result: Down-regulated in Transcription
  misc_feature: MA Experiment 108609 PARAMETER Experiment Name: At_100uM_ABA_cDNA_P Parameter: Timepoint (hr) Value: 24
  misc_feature: MA Experiment 108609 PARAMETER Experiment Name: At_100uM_ABA_cDNA_P Parameter: Tissue Value: Aerial
  misc_feature: MA Experiment 108609 PARAMETER Experiment Name: At_100uM_ABA_cDNA_P Parameter: Treatment Value: 100uM ABA vs. No Treatment
  misc_feature: MA Experiment ID: 20000180 Result: Down-regulated in Transcription
  misc_feature: MA Experiment 20000180 PARAMETER Experiment Name: At_Germinating_Seeds_P Parameter: Age (hr) Value: 24 vs. 0
  misc_feature: MA Experiment 20000180 PARAMETER Experiment Name: At_Germinating_Seeds_P Parameter: Tissue Value: Germinating Seeds
  misc_feature: MA Experiment ID: 20000227 Result: Up-regulated in Transcription
  misc_feature: MA Experiment 20000227 PARAMETER Experiment Name: At_Root-Tips-vs-Tops_P Parameter: Tissue Value: Root Tips vs. Root Tops
  misc_feature: MA Experiment ID: 20000264 Result: Up-regulated in Transcription
  misc_feature: MA Experiment 20000264 PARAMETER Experiment Name: At_Open_Flower_P Parameter: Age (day) Value: 21
  misc_feature: MA Experiment 20000264 PARAMETER Experiment Name: At_Open_Flower_P Parameter: Plant Line Value: WS
  misc_feature: MA Experiment 20000264 PARAMETER Experiment Name: At_Open_Flower_P Parameter: Tissue Value: Open Flower vs. Whole Plant
  misc_feature: MA Experiment ID: 20000453 Result: Down-regulated in Transcription
  misc_feature: MA Experiment 20000453 PARAMETER Experiment Name: At_100uM_ABA_P Parameter: Age (day) Value: 15
  misc_feature: MA Experiment 20000453 PARAMETER Experiment Name: At_100uM_ABA_P Parameter: Organism Value: A. thaliana
  misc_feature: MA Experiment 20000453 PARAMETER Experiment Name: At_100uM_ABA_P Parameter: Plant Line Value: WS
  misc_feature: MA Experiment 20000453 PARAMETER Experiment Name: At_100uM_ABA_P Parameter: Timepoint (hr) Value: 24
  misc_feature: MA Experiment 20000453 PARAMETER Experiment Name: At_100uM_ABA_P Parameter: Tissue Value: Aerial
  misc_feature: MA Experiment 20000453 PARAMETER Experiment Name: At_100uM_ABA_P Parameter: Treatment Value: 100uM ABA vs. No Treatment
  misc_feature: MA Experiment ID: 20000456 Result: Up-regulated in Transcription
  misc_feature: MA Experiment 20000456 PARAMETER Experiment Name: At_100uM_BA_P Parameter: Age (day) Value: 14
  misc_feature: MA Experiment 20000456 PARAMETER Experiment Name: At_100uM_BA_P Parameter: Organism Value: A. thaliana
  misc_feature: MA Experiment 20000456 PARAMETER Experiment Name: At_100uM_BA_P Parameter: Plant Line Value: WS
  misc_feature: MA Experiment 20000456 PARAMETER Experiment Name: At_100uM_BA_P Parameter: Timepoint (hr) Value: 6
  misc_feature: MA Experiment 20000456 PARAMETER Experiment Name: At_100uM_BA_P Parameter: Tissue Value: Aerial
  misc_feature: MA Experiment 20000456 PARAMETER Experiment Name: At_100uM_BA_P Parameter: Treatment Value: 100uM BA vs. No Treatment
  misc_feature: MA Experiment ID: 20000495 Result: Up-regulated in Transcription
  misc_feature: MA Experiment 20000495 PARAMETER Experiment Name: At_Guard_Cells_P Parameter: Harvest Date Value: 8/2/2002
  misc_feature: MA Experiment 20000495 PARAMETER Experiment Name: At_Guard_Cells_P Parameter: Organism Value: A. thaliana
  misc_feature: MA Experiment 20000495 PARAMETER Experiment Name: At_Guard_Cells_P Parameter: Tissue Value: Guard Cells vs. Leaves
  misc_feature: MA Experiment ID: 20000794 Result: Down-regulated in Transcription
  misc_feature: MA Experiment 20000794 PARAMETER Experiment Name: At_Petals_P Parameter: Age (day) Value: 23-25 days
  misc_feature: MA Experiment 20000794 PARAMETER Experiment Name: At_Petals_P Parameter: Plant Line Value: WS
  misc_feature: MA Experiment 20000794 PARAMETER Experiment Name: At_Petals_P Parameter: Tissue Value: Petals vs. Whole plant
  misc_feature: MA Experiment ID: 20001247 Result: Down-regulated in Transcription
  misc_feature: MA Experiment 20001247 PARAMETER Experiment Name: At_Far-red-induction_P Parameter: Age (day) Value: 7
  misc_feature: MA Experiment 20001247 PARAMETER Experiment Name: At_Far-red-induction_P Parameter: Light Value: Far-red vs. White
  misc_feature: MA Experiment 20001247 PARAMETER Experiment Name: At_Far-red-induction_P Parameter: Organism Value: A. thaliana
  misc_feature: MA Experiment 20001247 PARAMETER Experiment Name: At_Far-red-induction_P Parameter: Plant Line Value: Columbia
  misc_feature: MA Experiment 20001247 PARAMETER Experiment Name: At_Far-red-induction_P Parameter: Timepoint (hr) Value: 1
  misc_feature: MA Experiment 20001247 PARAMETER Experiment Name: At_Far-red-induction_P Parameter: Tissue Value: Whole Plant
  misc_feature: MA Experiment ID: 20001458 Result: Up-regulated in Transcription
  misc_feature: MA Experiment 20001458 PARAMETER Experiment Name: At_50mM_NH4NO3_L-to-H_P Parameter: Age (day) Value: Undefined
  misc_feature: MA Experiment 20001458 PARAMETER Experiment Name: At_50mM_NH4NO3_L-to-H_P Parameter: Organism Value: Undefined
  misc_feature: MA Experiment 20001458 PARAMETER Experiment Name: At_50mM_NH4NO3_L-to-H_P Parameter: Plant Line Value: Undefined
  misc_feature: MA Experiment 20001458 PARAMETER Experiment Name: At_50mM_NH4NO3_L-to-H_P Parameter: Timepoint (hr) Value: 2
  misc_feature: MA Experiment 20001458 PARAMETER Experiment Name: At_50mM_NH4NO3_L-to-H_P Parameter: Tissue Value: Siliques
  misc_feature: MA Experiment 20001458 PARAMETER Experiment Name: At_50mM_NH4NO3_L-to-H_P Parameter: Treatment Value: 50mM NH4NO3 vs. 100mM Manitol
  misc_feature: MA Experiment ID: 20001556 Result: Up-regulated in Transcription
  misc_feature: MA Experiment 20001556 PARAMETER Experiment Name: At_Drought_Soil_Dry_P Parameter: Age (day) Value: 26
  misc_feature: MA Experiment 20001556 PARAMETER Experiment Name: At_Drought_Soil_Dry_P Parameter: Organism Value: A. thaliana
  misc_feature: MA Experiment 20001556 PARAMETER Experiment Name: At_Drought_Soil_Dry_P Parameter: Plant Line Value: WS
  misc_feature: MA Experiment 20001556 PARAMETER Experiment Name: At_Drought_Soil_Dry_P Parameter: Post Timepoint (hr) Value: None
  misc_feature: MA Experiment 20001556 PARAMETER Experiment Name: At_Drought_Soil_Dry_P Parameter: Post-Treatment Value: None
  misc_feature: MA Experiment 20001556 PARAMETER Experiment Name: At_Drought_Soil_Dry_P Parameter: Timepoint (day) Value: 12
  misc_feature: MA Experiment 20001556 PARAMETER Experiment Name: At_Drought_Soil_Dry_P Parameter: Treatment Value: Drought vs. No Drought
  misc_feature: MA Experiment ID: 20001557 Result: Up-regulated in Transcription
  misc_feature: MA Experiment 20001557 PARAMETER Experiment Name: At_Drought_Soil_Dry_P Parameter: Age (day) Value: 27
  misc_feature: MA Experiment 20001557 PARAMETER Experiment Name: At_Drought_Soil_Dry_P Parameter: Organism Value: A. thaliana
  misc_feature: MA Experiment 20001557 PARAMETER Experiment Name: At_Drought_Soil_Dry_P Parameter: Plant Line Value: WS
  misc_feature: MA Experiment 20001557 PARAMETER Experiment Name: At_Drought_Soil_Dry_P Parameter: Post Timepoint (hr) Value: 3
  misc_feature: MA Experiment 20001557 PARAMETER Experiment Name: At_Drought_Soil_Dry_P Parameter: Post-Treatment Value: Re-Water vs. No Drought
  misc_feature: MA Experiment 20001557 PARAMETER Experiment Name: At_Drought_Soil_Dry_P Parameter: Timepoint (day) Value: 13
  misc_feature: MA Experiment 20001557 PARAMETER Experiment Name: At_Drought_Soil_Dry_P Parameter: Treatment Value: Drought vs. No Drought
  misc_feature: MA Experiment ID: 20001558 Result: Up-regulated in Transcription
  misc_feature: MA Experiment 20001558 PARAMETER Experiment Name: At_Drought_Soil_Dry_P Parameter: Age (day) Value: 27
  misc_feature: MA Experiment 20001558 PARAMETER Experiment Name: At_Drought_Soil_Dry_P Parameter: Organism Value: A. thaliana
  misc_feature: MA Experiment 20001558 PARAMETER Experiment Name: At_Drought_Soil_Dry_P Parameter: Plant Line Value: WS
  misc_feature: MA Experiment 20001558 PARAMETER Experiment Name: At_Drought_Soil_Dry_P Parameter: Post Timepoint (hr) Value: 6
  misc_feature: MA Experiment 20001558 PARAMETER Experiment Name: At_Drought_Soil_Dry_P Parameter: Post-Treatment Value: Re-Water vs. No Drought
  misc_feature: MA Experiment 20001558 PARAMETER Experiment Name: At_Drought_Soil_Dry_P Parameter: Timepoint (day) Value: 13
  misc_feature: MA Experiment 20001558 PARAMETER Experiment Name: At_Drought_Soil_Dry_P Parameter: Treatment Value: Drought vs. No Drought
  misc_feature: MA Experiment ID: 20001560 Result: Up-regulated in Transcription
  misc_feature: MA Experiment 20001560 PARAMETER Experiment Name: At_Drought_Soil_Dry_P Parameter: Age (day) Value: 28
  misc_feature: MA Experiment 20001560 PARAMETER Experiment Name: At_Drought_Soil_Dry_P Parameter: Organism Value: A. thaliana
  misc_feature: MA Experiment 20001560 PARAMETER Experiment Name: At_Drought_Soil_Dry_P Parameter: Plant Line Value: WS
  misc_feature: MA Experiment 20001560 PARAMETER Experiment Name: At_Drought_Soil_Dry_P Parameter: Post Timepoint (hr) Value: None
  misc_feature: MA Experiment 20001560 PARAMETER Experiment Name: At_Drought_Soil_Dry_P Parameter: Post-Treatment Value: None
  misc_feature: MA Experiment 20001560 PARAMETER Experiment Name: At_Drought_Soil_Dry_P Parameter: Timepoint (day) Value: 14
  misc_feature: MA Experiment 20001560 PARAMETER Experiment Name: At_Drought_Soil_Dry_P Parameter: Treatment Value: Drought vs. No Drought
  misc_feature: MA Experiment ID: 20001756 Result: Up-regulated in Transcription
  misc_feature: MA Experiment 20001756 PARAMETER Experiment Name: At_50mM_NH4NO3_L-to-H_P Parameter: Timepoint (hr) Value: 4
  misc_feature: MA Experiment 20001756 PARAMETER Experiment Name: At_50mM_NH4NO3_L-to-H_P Parameter: Tissue Value: Leaf
  misc_feature: MA Experiment 20001756 PARAMETER Experiment Name: At_50mM_NH4NO3_L-to-H_P Parameter: Treatment Value: 50mM NH4NO3 vs 100mM Mannitol
  misc_feature: MA Experiment ID: 20001757 Result: Up-regulated in Transcription
  misc_feature: MA Experiment 20001757 PARAMETER Experiment Name: At_50mM_NH4NO3_L-to-H_P Parameter: Timepoint (hr) Value: 6
  misc_feature: MA Experiment 20001757 PARAMETER Experiment Name: At_50mM_NH4NO3_L-to-H_P Parameter: Tissue Value: Leaf
  misc_feature: MA Experiment 20001757 PARAMETER Experiment Name: At_50mM_NH4NO3_L-to-H_P Parameter: Treatment Value: 50mM NH4NO3 vs 100mM Mannitol

SEQ ID NO: 34279 - protein, 168 aa, Arabidopsis thaliana; identical to SEQ ID NO: 30689
  peptide (1)..(168): Ceres Seq. ID no. 12321741
  misc_feature (69)..(140): Pfam Name: RNA recognition motif. (a.k.a. RRM, RBD, or RNP domain) Pfam Description: RNA recognition motif. (a.k.a. RRM, RBD, or RNP
  misc_feature (155)..(168): Homolog of NCBI NO: 15239505 NR Description: glycine-rich RNA-binding protein
  misc_feature (33)..(166): Homolog of NCBI NO: 15239505 NR Description: glycine-rich RNA-binding protein
  misc_feature (33)..(168): Homolog of NCBI NO: 7439995 NR Description: RNA binding protein 3 - wood tobacco
  misc_feature (52)..(166): Homolog of NCBI NO: 322514 NR Description: glycine-rich RNA-binding protein (clone A81) -
  misc_feature (33)..(168): Homolog of NCBI NO: 7439994 NR Description: glycine-rich RNA-binding protein - garden pea
  misc_feature (33)..(166): Homolog of NCBI NO: 15236359 NR Description: glycine-rich RNA-binding protein AtGRP2
  misc_feature (33)..(168): Homolog of NCBI NO: 30682622 NR Description: glycine-rich RNA-binding protein (AtGRP2)
  misc_feature (33)..(168): Homolog of NCBI NO: 2826811 NR Description: AtGRP2 [Arabidopsis thaliana]
  misc_feature (33)..(168): Homolog of NCBI NO: 21553972 NR Description: glycine-rich RNA binding protein, putative
  misc_feature (33)..(168): Homolog of NCBI NO: 15229525 NR Description: glycine-rich RNA-binding protein

SEQ ID NO: 34280 - protein, 136 aa, Arabidopsis thaliana; identical to SEQ ID NO: 25481
  peptide (1)..(136): Ceres Seq. ID no. 12321742
  misc_feature (37)..(108): Pfam Name: RNA recognition motif. (a.k.a. RRM, RBD, or RNP domain) Pfam Description: RNA recognition motif. (a.k.a. RRM, RBD, or RNP
  misc_feature (123)..(136): Homolog of NCBI NO: 15239505 NR Description: glycine-rich RNA-binding protein
  misc_feature (1)..(134): Homolog of NCBI NO: 15239505 NR Description: glycine-rich RNA-binding protein
  misc_feature (1)..(136): Homolog of NCBI NO: 7439995 NR Description: RNA binding protein 3 - wood tobacco
  misc_feature (20)..(134): Homolog of NCBI NO: 322514 NR Description: glycine-rich RNA-binding protein (clone A81) -
  misc_feature (1)..(136): Homolog of NCBI NO: 7439994 NR Description: glycine-rich RNA-binding protein - garden pea
  misc_feature (1)..(134): Homolog of NCBI NO: 15236359 NR Description: glycine-rich RNA-binding protein AtGRP2
  misc_feature (1)..(136): Homolog of NCBI NO: 30682622 NR Description: glycine-rich RNA-binding protein (AtGRP2)
  misc_feature (1)..(136): Homolog of NCBI NO: 2826811 NR Description: AtGRP2 [Arabidopsis thaliana]
  misc_feature (1)..(136): Homolog of NCBI NO: 21553972 NR Description: glycine-rich RNA binding protein, putative
  misc_feature (1)..(136): Homolog of NCBI NO: 15229525 NR Description: glycine-rich RNA-binding protein

SEQ ID NO: 34281 - protein, 111 aa, Arabidopsis thaliana; identical to SEQ ID NO: 25482
  peptide (1)..(111): Ceres Seq. ID no. 12321743
  misc_feature (12)..(83): Pfam Name: RNA recognition motif. (a.k.a. RRM, RBD, or RNP domain) Pfam Description: RNA recognition motif. (a.k.a. RRM, RBD, or RNP
  misc_feature (98)..(111): Homolog of NCBI NO: 15239505 NR Description: glycine-rich RNA-binding protein
  misc_feature (1)..(109): Homolog of NCBI NO: 15239505 NR Description: glycine-rich RNA-binding protein
  misc_feature (1)..(111): Homolog of NCBI NO: 7439995 NR Description: RNA binding protein 3 - wood tobacco
  misc_feature (1)..(109): Homolog of NCBI NO: 322514 NR Description: glycine-rich RNA-binding protein (clone A81) -
  misc_feature (1)..(111): Homolog of NCBI NO: 7439994 NR Description: glycine-rich RNA-binding protein - garden pea
  misc_feature (1)..(109): Homolog of NCBI NO: 15236359 NR Description: glycine-rich RNA-binding protein AtGRP2
  misc_feature (1)..(111): Homolog of NCBI NO: 30682622 NR Description: glycine-rich RNA-binding protein (AtGRP2)
  misc_feature (1)..(111): Homolog of NCBI NO: 2826811 NR Description: AtGRP2 [Arabidopsis thaliana]
  misc_feature (1)..(111): Homolog of NCBI NO: 21553972 NR Description: glycine-rich RNA binding protein, putative
  misc_feature (1)..(111): Homolog of NCBI NO: 15229525 NR Description: glycine-rich RNA-binding protein

SEQ ID NO: 34282 - DNA, 1207 bp, Arabidopsis thaliana; identical to SEQ ID NO: 30692
  misc_feature (1)..(1207): Ceres Seq. ID no. 13486911
  misc_feature: MA Experiment ID: 108573 Result: Down-regulated in Transcription
  misc_feature: MA Experiment 108573 PARAMETER Experiment Name: At_Drought_cDNA_P Parameter: Timepoint (hr) Value: 6
  misc_feature: MA Experiment 108573 PARAMETER Experiment Name: At_Drought_cDNA_P Parameter: Tissue Value: Aerial
  misc_feature: MA Experiment 108573 PARAMETER Experiment Name: At_Drought_cDNA_P Parameter: Treatment Value: Drought vs. No Drought
  misc_feature: MA Experiment ID: 108585 Result: Down-regulated in Transcription
  misc_feature: MA Experiment 108585 PARAMETER Experiment Name: At_5mM_NaNP_cDNA_P Parameter: Timepoint (hr) Value: 6
  misc_feature: MA Experiment 108585 PARAMETER Experiment Name: At_5mM_NaNP_cDNA_P Parameter: Tissue Value: Aerial
  misc_feature: MA Experiment 108585 PARAMETER Experiment Name: At_5mM_NaNP_cDNA_P Parameter: Treatment Value: null
  misc_feature: MA Experiment ID: 108595 Result: Down-regulated in Transcription
  misc_feature: MA Experiment 108595 PARAMETER Experiment Name: At_Ler-pi_Ovule_cDNA_P Parameter: Plant Line Value: null
  misc_feature: MA Experiment ID: 20000173 Result: Down-regulated in Transcription
  misc_feature: MA Experiment 20000173 PARAMETER Experiment Name: At_42deg_Heat_P Parameter: Age (day) Value: 14
  misc_feature: MA Experiment 20000173 PARAMETER Experiment Name: At_42deg_Heat_P Parameter: Organism Value: A. thaliana
  misc_feature: MA Experiment 20000173 PARAMETER Experiment Name: At_42deg_Heat_P Parameter: Plant Line Value: WS
  misc_feature: MA Experiment 20000173 PARAMETER Experiment Name: At_42deg_Heat_P Parameter: Temperature (deg C) Value: 42 vs. 22
  misc_feature: MA Experiment 20000173 PARAMETER Experiment Name: At_42deg_Heat_P Parameter: Timepoint (hr) Value: 6
  misc_feature: MA Experiment 20000173 PARAMETER Experiment Name: At_42deg_Heat_P Parameter: Tissue Value: Aerial
  misc_feature: MA Experiment ID: 20000185 Result: Down-regulated in Transcription
  misc_feature: MA Experiment 20000185 PARAMETER Experiment Name: At_Roots__P Parameter: Age (day) Value: 7 vs. 21
  misc_feature: MA Experiment 20000185 PARAMETER Experiment Name: At_Roots__P Parameter: Organism Value: A. thaliana
  misc_feature: MA Experiment 20000185 PARAMETER Experiment Name: At_Roots__P Parameter: Tissue Value: Roots vs. Whole Plant
  misc_feature: MA Experiment ID: 20000436 Result: Down-regulated in Transcription
  misc_feature: MA Experiment 20000436 PARAMETER Experiment Name: At_Drought_P Parameter: Age (day) Value: 7
  misc_feature: MA Experiment 20000436 PARAMETER Experiment Name: At_Drought_P Parameter: Organism Value: A. thaliana
  misc_feature: MA Experiment 20000436 PARAMETER Experiment Name: At_Drought_P Parameter: Plant Line Value: WS
  misc_feature: MA Experiment 20000436 PARAMETER Experiment Name: At_Drought_P Parameter: Timepoint (hr) Value: 12
  misc_feature: MA Experiment 20000436 PARAMETER Experiment Name: At_Drought_P Parameter: Tissue Value: Whole Plant
  misc_feature: MA Experiment 20000436 PARAMETER Experiment Name: At_Drought_P Parameter: Treatment Value: Drought vs. No Drought
  misc_feature: MA Experiment ID: 20000437 Result: Down-regulated in Transcription
  misc_feature: MA Experiment 20000437 PARAMETER Experiment Name: At_Drought_P Parameter: Age (day) Value: 8
  misc_feature: MA Experiment 20000437 PARAMETER Experiment Name: At_Drought_P Parameter: Organism Value: A. thaliana
  misc_feature: MA Experiment 20000437 PARAMETER Experiment Name: At_Drought_P Parameter: Plant Line Value: WS
  misc_feature: MA Experiment 20000437 PARAMETER Experiment Name: At_Drought_P Parameter: Timepoint (hr) Value: 24
  misc_feature: MA Experiment 20000437 PARAMETER Experiment Name: At_Drought_P Parameter: Tissue Value: Whole Plant
  misc_feature: MA Experiment 20000437 PARAMETER Experiment Name: At_Drought_P Parameter: Treatment Value: Drought vs. No Drought
  misc_feature: MA Experiment ID: 20000439 Result: Down-regulated in Transcription
  misc_feature: MA Experiment 20000439 PARAMETER Experiment Name: At_Roots__P Parameter: Age (day) Value: 14 vs. 21
  misc_feature: MA Experiment 20000439 PARAMETER Experiment Name: At_Roots__P Parameter: Organism Value: A. thaliana
  misc_feature: MA Experiment 20000439 PARAMETER Experiment Name: At_Roots__P Parameter: Tissue Value: Roots vs. Whole Plant
  misc_feature: MA Experiment ID: 20000495 Result: Down-regulated in Transcription
  misc_feature: MA Experiment 20000495 PARAMETER Experiment Name: At_Guard_Cells_P Parameter: Harvest Date Value: 8/2/2002
  misc_feature: MA Experiment 20000495 PARAMETER Experiment Name: At_Guard_Cells_P Parameter: Organism Value: A. thaliana
  misc_feature: MA Experiment 20000495 PARAMETER Experiment Name: At_Guard_Cells_P Parameter: Tissue Value: Guard Cells vs. Leaves
  misc_feature: MA Experiment ID: 20000496 Result: Down-regulated in Transcription
  misc_feature: MA Experiment 20000496 PARAMETER Experiment Name: At_Guard_Cells_P Parameter: Harvest Date Value: 7/19/2002
  misc_feature: MA Experiment 20000496 PARAMETER Experiment Name: At_Guard_Cells_P Parameter: Organism Value: Canola
  misc_feature: MA Experiment 20000496 PARAMETER Experiment Name: At_Guard_Cells_P Parameter: Tissue Value: Guard Cells vs. Leaves
  misc_feature: MA Experiment ID: 20001450 Result: Down-regulated in Transcription
  misc_feature: MA Experiment 20001450 PARAMETER Experiment Name: At_Far-red-induction_P Parameter: Age (day) Value: 7
  misc_feature: MA Experiment 20001450 PARAMETER Experiment Name: At_Far-red-induction_P Parameter: Light Value: Far-red vs. White
  misc_feature: MA Experiment 20001450 PARAMETER Experiment Name: At_Far-red-induction_P Parameter: Organism Value: A. thaliana
  misc_feature: MA Experiment 20001450 PARAMETER Experiment Name: At_Far-red-induction_P Parameter: Plant Line Value: Columbia
  misc_feature: MA Experiment 20001450 PARAMETER Experiment Name: At_Far-red-induction_P Parameter: Timepoint (hr) Value: 8
  misc_feature: MA Experiment 20001450 PARAMETER Experiment Name: At_Far-red-induction_P Parameter: Tissue Value: Whole Plant
  misc_feature: MA Experiment ID: 20001451 Result: Down-regulated in Transcription
  misc_feature: MA Experiment 20001451 PARAMETER Experiment Name: At_Far-red-induction_P Parameter: Age (day) Value: 7
  misc_feature: MA Experiment 20001451 PARAMETER Experiment Name: At_Far-red-induction_P Parameter: Light Value: Far-red vs. White
  misc_feature: MA Experiment 20001451 PARAMETER Experiment Name: At_Far-red-induction_P Parameter: Organism Value: A. thaliana
  misc_feature: MA Experiment 20001451 PARAMETER Experiment Name: At_Far-red-induction_P Parameter: Plant Line Value: Columbia
  misc_feature: MA Experiment 20001451 PARAMETER Experiment Name: At_Far-red-induction_P Parameter: Timepoint (hr) Value: 24
  misc_feature: MA Experiment 20001451 PARAMETER Experiment Name: At_Far-red-induction_P Parameter: Tissue Value: Whole Plant
  misc_feature: MA Experiment ID: 20001905 Result: Down-regulated in Transcription
  misc_feature: MA Experiment 20001905 PARAMETER Experiment Name: At_Drought_Reproduction_P Parameter: Age (day) Value: 40
  misc_feature: MA Experiment 20001905 PARAMETER Experiment Name: At_Drought_Reproduction_P Parameter: Organism Value: A. thaliana
  misc_feature: MA Experiment 20001905 PARAMETER Experiment Name: At_Drought_Reproduction_P Parameter: Plant Line Value: WS
  misc_feature: MA Experiment 20001905 PARAMETER Experiment Name: At_Drought_Reproduction_P Parameter: Timepoint (day) Value: 10
  misc_feature: MA Experiment 20001905 PARAMETER Experiment Name: At_Drought_Reproduction_P Parameter: Tissue Value: Rosettes
  misc_feature: MA Experiment 20001905 PARAMETER Experiment Name: At_Drought_Reproduction_P Parameter: Treatment Value: Drought vs. No Drought
  misc_feature: MA Experiment ID: 20001911 Result: Down-regulated in Transcription
  misc_feature: MA Experiment 20001911 PARAMETER Experiment Name: At_Drought_Reproduction_P Parameter: Age (day) Value: 40
  misc_feature: MA Experiment 20001911 PARAMETER Experiment Name: At_Drought_Reproduction_P Parameter: Organism Value: A. thaliana
  misc_feature: MA Experiment 20001911 PARAMETER Experiment Name: At_Drought_Reproduction_P Parameter: Plant Line Value: WS
  misc_feature: MA Experiment 20001911 PARAMETER Experiment Name: At_Drought_Reproduction_P Parameter: Timepoint (day) Value: 10
  misc_feature: MA Experiment 20001911 PARAMETER Experiment Name: At_Drought_Reproduction_P Parameter: Tissue Value: Flowers
  misc_feature: MA Experiment 20001911 PARAMETER Experiment Name: At_Drought_Reproduction_P Parameter: Treatment Value: Drought vs. No Drought

SEQ ID NO: 34283 - protein, 362 aa, Arabidopsis thaliana; identical to SEQ ID NO: 30693
  peptide (1)..(362): Ceres Seq. ID no. 13486912
  misc_feature (87)..(360): Homolog of NCBI NO: 11320958 NR Description: methionine aminopeptidase-like protein
  misc_feature (87)..(360): Homolog of NCBI NO: 15230872 NR Description: methionine aminopeptidase -related [Arabidopsis
  misc_feature (80)..(361): Homolog of NCBI NO: 34394646 NR Description: putative methionine aminopeptidase I (MAP1)
  misc_feature (87)..(360): Homolog of NCBI NO: 7939560 NR Description: methionine aminopeptidase-like protein
  misc_feature (51)..(362): Homolog of NCBI NO: 15222218 NR Description: methionine aminopeptidase I (MAP1) -related
  misc_feature (51)..(362): Homolog of NCBI NO: 11320956 NR Description: methionine aminopeptidase-like protein
  misc_feature (80)..(362): Homolog of NCBI NO: 38345794 NR Description: OSJNBa0085I10.11 [Oryza sativa (japonica
  misc_feature (13)..(28): Homolog of NCBI NO: 25289731 NR Description: methionyl aminopeptidase-like protein
  misc_feature (74)..(362): Homolog of NCBI NO: 25289731 NR Description: methionyl aminopeptidase-like protein
  misc_feature (13)..(362): Homolog of NCBI NO: 18419957 NR Description: methionyl aminopeptidase-related protein

SEQ ID NO: 34284 - protein, 350 aa, Arabidopsis thaliana; identical to SEQ ID NO: 30694
  peptide (1)..(350): Ceres Seq. ID no. 13486913
  misc_feature (75)..(348): Homolog of NCBI NO: 11320958 NR Description: methionine aminopeptidase-like protein
  misc_feature (75)..(348): Homolog of NCBI NO: 15230872 NR Description: methionine aminopeptidase -related [Arabidopsis
  misc_feature (68)..(349): Homolog of NCBI NO: 34394646 NR Description: putative methionine aminopeptidase I (MAP1)
  misc_feature (75)..(348): Homolog of NCBI NO: 7939560 NR Description: methionine aminopeptidase-like protein
  misc_feature (39)..(350): Homolog of NCBI NO: 15222218 NR Description: methionine aminopeptidase I (MAP1) -related
  misc_feature (39)..(350): Homolog of NCBI NO: 11320956 NR Description: methionine aminopeptidase-like protein
  misc_feature (68)..(350): Homolog of NCBI NO: 38345794 NR Description: OSJNBa0085I10.11 [Oryza sativa (japonica
  misc_feature (1)..(16): Homolog of NCBI NO: 25289731 NR Description: methionyl aminopeptidase-like protein
  misc_feature (62)..(350): Homolog of NCBI NO: 25289731 NR Description: methionyl aminopeptidase-like protein
  misc_feature (1)..(350): Homolog of NCBI NO: 18419957 NR Description: methionyl aminopeptidase-related protein

SEQ ID NO: 34285 - protein, 309 aa, Arabidopsis thaliana; identical to SEQ ID NO: 30695
  peptide (1)..(309): Ceres Seq. ID no. 13486914
  misc_feature (26)..(308): Homolog of NCBI NO: 24583427 NR Description: CG5188-PA [Drosophila melanogaster]
  misc_feature (34)..(307): Homolog of NCBI NO: 11320958 NR Description: methionine aminopeptidase-like protein
  misc_feature (34)..(307): Homolog of NCBI NO: 15230872 NR Description: methionine aminopeptidase -related [Arabidopsis
  misc_feature (27)..(308): Homolog of NCBI NO: 34394646 NR Description: putative methionine aminopeptidase I (MAP1)
  misc_feature (34)..(307): Homolog of NCBI NO: 7939560 NR Description: methionine aminopeptidase-like protein
  misc_feature (1)..(309): Homolog of NCBI NO: 15222218 NR Description: methionine aminopeptidase I (MAP1) -related
  misc_feature (1)..(309): Homolog of NCBI NO: 11320956 NR Description: methionine aminopeptidase-like protein
  misc_feature (27)..(309): Homolog of NCBI NO: 38345794 NR Description: OSJNBa0085I10.11 [Oryza sativa (japonica
  misc_feature (21)..(309): Homolog of NCBI NO: 25289731 NR Description: methionyl aminopeptidase-like protein
  misc_feature (1)..(309): Homolog of NCBI NO: 18419957 NR Description: methionyl aminopeptidase-related protein

SEQ ID NO: 34286 - DNA, 2350 bp, Arabidopsis thaliana; identical to SEQ ID NO: 30696
  misc_feature (1)..(2350): Ceres Seq. ID no. 13488462
  misc_feature: MA Experiment ID: 108434 Result: Up-regulated in Transcription
  misc_feature: MA Experiment 108434 PARAMETER Experiment Name: At_Root_Tips_cDNA_P Parameter: Tissue Value: Root Tips
  misc_feature: MA Experiment ID: 108569 Result: Up-regulated in Transcription
  misc_feature: MA Experiment 108569 PARAMETER Experiment Name: At_0.001%_MeJA__cDNA_P Parameter: Timepoint (hr) Value: 6
  misc_feature: MA Experiment 108569 PARAMETER Experiment Name: At_0.001%_MeJA__cDNA_P Parameter: Tissue Value: Aerial
  misc_feature: MA Experiment 108569 PARAMETER Experiment Name: At_0.001%_MeJA__cDNA_P Parameter: Treatment Value: 0.001% MeJA vs. No Treatment
  misc_feature: MA Experiment ID: 108573 Result: Up-regulated in Transcription
  misc_feature: MA Experiment 108573 PARAMETER Experiment Name: At_Drought_cDNA_P Parameter: Timepoint (hr) Value: 6
  misc_feature: MA Experiment 108573 PARAMETER Experiment Name: At_Drought_cDNA_P Parameter: Tissue Value: Aerial
  misc_feature: MA Experiment 108573 PARAMETER Experiment Name: At_Drought_cDNA_P Parameter: Treatment Value: Drought vs. No Drought
  misc_feature: MA Experiment ID: 108577 Result: Down-regulated in Transcription
  misc_feature: MA Experiment 108577 PARAMETER Experiment Name: At_42deg_Heat_cDNA_P Parameter: Temperature (deg C) Value: 42 vs. 22
  misc_feature: MA Experiment 108577 PARAMETER Experiment Name: At_42deg_Heat_cDNA_P Parameter: Timepoint (hr) Value: 6
  misc_feature: MA Experiment 108577 PARAMETER Experiment Name: At_42deg_Heat_cDNA_P Parameter: Tissue Value: Aerial
  misc_feature: MA Experiment ID: 20000087 Result: Down-regulated in Transcription
  misc_feature: MA Experiment 20000087 PARAMETER Experiment Name: At_100uM_ABA_Mutants_cDNA_P Parameter: Plant Line Value: WS
  misc_feature: MA Experiment 20000087 PARAMETER Experiment Name: At_100uM_ABA_Mutants_cDNA_P Parameter: Timepoint (hr) Value: 6
  misc_feature: MA Experiment 20000087 PARAMETER Experiment Name: At_100uM_ABA_Mutants_cDNA_P Parameter: Tissue Value: Aerial
  misc_feature: MA Experiment 20000087 PARAMETER Experiment Name: At_100uM_ABA_Mutants_cDNA_P Parameter: Treatment Value: 100uM ABA vs. No Treatment
  misc_feature: MA Experiment ID: 20000111 Result: Down-regulated in Transcription
  misc_feature: MA Experiment 20000111 PARAMETER Experiment Name: At_42deg_Heat_cDNA_P Parameter: Temperature (deg C) Value: 42 vs. 22
  misc_feature: MA Experiment 20000111 PARAMETER Experiment Name: At_42deg_Heat_cDNA_P Parameter: Timepoint (hr) Value: 6
  misc_feature: MA Experiment 20000111 PARAMETER Experiment Name: At_42deg_Heat_cDNA_P Parameter: Tissue Value: Aerial
  misc_feature: MA Experiment ID: 20000113 Result: Down-regulated in Transcription
  misc_feature: MA Experiment 20000113 PARAMETER Experiment Name: At_42deg_Heat_cDNA_P Parameter: Temperature (deg C) Value: 42 vs. 22
  misc_feature: MA Experiment 20000113 PARAMETER Experiment Name: At_42deg_Heat_cDNA_P Parameter: Timepoint (hr) Value: 8
  misc_feature: MA Experiment 20000113 PARAMETER Experiment Name: At_42deg_Heat_cDNA_P Parameter: Tissue Value: Aerial
  misc_feature: MA Experiment ID: 20000173 Result: Down-regulated in Transcription
  misc_feature: MA Experiment 20000173 PARAMETER Experiment Name: At_42deg_Heat_P Parameter: Age (day) Value: 14
  misc_feature: MA Experiment 20000173 PARAMETER Experiment Name: At_42deg_Heat_P Parameter: Organism Value: A. thaliana
  misc_feature: MA Experiment 20000173 PARAMETER Experiment Name: At_42deg_Heat_P Parameter: Plant Line Value: WS
  misc_feature: MA Experiment 20000173 PARAMETER Experiment Name: At_42deg_Heat_P Parameter: Temperature (deg C) Value: 42 vs. 22
  misc_feature: MA Experiment 20000173 PARAMETER Experiment Name: At_42deg_Heat_P Parameter: Timepoint (hr) Value: 6
  misc_feature: MA Experiment 20000173 PARAMETER Experiment Name: At_42deg_Heat_P Parameter: Tissue Value: Aerial
  misc_feature: MA Experiment ID: 20000179 Result: Up-regulated in Transcription
  misc_feature: MA Experiment 20000179 PARAMETER Experiment Name: At_Germinating_Seeds_P Parameter: Age (hr) Value: 6 vs. 0
  misc_feature: MA Experiment 20000179 PARAMETER Experiment Name: At_Germinating_Seeds_P Parameter: Tissue Value: Germinating Seeds
  misc_feature: MA Experiment ID: 20000180 Result: Up-regulated in Transcription
  misc_feature: MA Experiment 20000180 PARAMETER Experiment Name: At_Germinating_Seeds_P Parameter: Age (hr) Value: 24 vs. 0
  misc_feature: MA Experiment 20000180 PARAMETER Experiment Name: At_Germinating_Seeds_P Parameter: Tissue Value: Germinating Seeds
  misc_feature: MA Experiment ID: 20001451 Result: Down-regulated in Transcription
  misc_feature: MA Experiment 20001451 PARAMETER Experiment Name: At_Far-red-induction_P Parameter: Age (day) Value: 7
  misc_feature: MA Experiment 20001451 PARAMETER Experiment Name: At_Far-red-induction_P Parameter: Light Value: Far-red vs. White
  misc_feature: MA Experiment 20001451 PARAMETER Experiment Name: At_Far-red-induction_P Parameter: Organism Value: A. thaliana
  misc_feature: MA Experiment 20001451 PARAMETER Experiment Name: At_Far-red-induction_P Parameter: Plant Line Value: Columbia
  misc_feature: MA Experiment 20001451 PARAMETER Experiment Name: At_Far-red-induction_P Parameter: Timepoint (hr) Value: 24
  misc_feature: MA Experiment 20001451 PARAMETER Experiment Name: At_Far-red-induction_P Parameter: Tissue Value: Whole Plant
  misc_feature: MA Experiment ID: 20001911 Result: Down-regulated in Transcription
  misc_feature: MA Experiment 20001911 PARAMETER Experiment Name: At_Drought_Reproduction_P Parameter: Age (day) Value: 40
  misc_feature: MA Experiment 20001911 PARAMETER Experiment Name: At_Drought_Reproduction_P Parameter: Organism Value: A. thaliana
  misc_feature: MA Experiment 20001911 PARAMETER Experiment Name: At_Drought_Reproduction_P Parameter: Plant Line Value: WS
  misc_feature: MA Experiment 20001911 PARAMETER Experiment Name: At_Drought_Reproduction_P Parameter: Timepoint (day) Value: 10
  misc_feature: MA Experiment 20001911 PARAMETER Experiment Name: At_Drought_Reproduction_P Parameter: Tissue Value: Flowers
  misc_feature: MA Experiment 20001911 PARAMETER Experiment Name: At_Drought_Reproduction_P Parameter: Treatment Value: Drought vs. No Drought

SEQ ID NO: 34287 - protein, 691 aa, Arabidopsis thaliana; identical to SEQ ID NO: 30697
  peptide (1)..(691): Ceres Seq. ID no. 13488463
  misc_feature (415)..(687): Homolog of NCBI NO: 39598219 NR Description: Hypothetical protein CBG14887 [Caenorhabditis
  misc_feature (294)..(682): Homolog of NCBI NO: 13928974 NR Description: ribophorin 2 [Rattus norvegicus]
  misc_feature (71)..(682): Homolog of NCBI NO: 36049 NR Description: unnamed protein product [Homo sapiens]
  misc_feature (71)..(682): Homolog of NCBI NO: 88567 NR Description: ribophorin II precursor - human
  misc_feature (71)..(682): Homolog of NCBI NO: 35493916 NR Description: ribophorin II precursor
  misc_feature (82)..(682): Homolog of NCBI NO: 28279254 NR Description: Similar to ribophorin II [Danio rerio]
  misc_feature (299)..(682): Homolog of NCBI NO: 28436786 NR Description: Similar to ribophorin II [Xenopus laevis]
  misc_feature (10)..(691): Homolog of NCBI NO: 34906860 NR Description: P0470A12.7 [Oryza sativa (japonica
  misc_feature (1)..(204): Homolog of NCBI NO: 7486600 NR Description: hypothetical protein F7J7.90 - Arabidopsis
  misc_feature (209)..(660): Homolog of NCBI NO: 7486600 NR Description: hypothetical protein F7J7.90 - Arabidopsis

SEQ ID NO: 34288 - protein, 690 aa, Arabidopsis thaliana; identical to SEQ ID NO: 30698
  peptide (1)..(690): Ceres Seq. ID no. 13488464
  misc_feature (414)..(686): Homolog of NCBI NO: 39598219 NR Description: Hypothetical protein CBG14887 [Caenorhabditis
  misc_feature (293)..(681): Homolog of NCBI NO: 13928974 NR Description: ribophorin 2 [Rattus norvegicus]
  misc_feature (70)..(681): Homolog of NCBI NO: 36049 NR Description: unnamed protein product [Homo sapiens]
  misc_feature (70)..(681): Homolog of NCBI NO: 88567 NR Description: ribophorin II precursor - human
  misc_feature (70)..(681): Homolog of NCBI NO: 35493916 NR Description: ribophorin II precursor
  misc_feature (81)..(681): Homolog of NCBI NO: 28279254 NR Description: Similar to ribophorin II [Danio rerio]
  misc_feature (298)..(681): Homolog of NCBI NO: 28436786 NR Description: Similar to ribophorin II [Xenopus laevis]
  misc_feature (9)..(690): Homolog of NCBI NO: 34906860 NR Description: P0470A12.7 [Oryza sativa (japonica
  misc_feature (1)..(203): Homolog of NCBI NO: 7486600 NR Description: hypothetical protein F7J7.90 - Arabidopsis
  misc_feature (208)..(659): Homolog of NCBI NO: 7486600 NR Description: hypothetical protein F7J7.90 - Arabidopsis

SEQ ID NO: 34289 - DNA, 1597 bp, Arabidopsis thaliana; identical to SEQ ID NO: 30699
  misc_feature (1)..(1597): Ceres Seq. ID no. 13491734
  misc_feature: MA Experiment ID: 108434 Result: Up-regulated in Transcription
  misc_feature: MA Experiment 108434 PARAMETER Experiment Name: At_Root_Tips_cDNA_P Parameter: Tissue Value: Root Tips
  misc_feature: MA Experiment ID: 108573 Result: Up-regulated in Transcription
  misc_feature: MA Experiment 108573 PARAMETER Experiment Name: At_Drought_cDNA_P Parameter: Timepoint (hr) Value: 6
  misc_feature: MA Experiment 108573 PARAMETER Experiment Name: At_Drought_cDNA_P Parameter: Tissue Value: Aerial
  misc_feature: MA Experiment 108573 PARAMETER Experiment Name: At_Drought_cDNA_P Parameter: Treatment Value: Drought vs. No Drought
  misc_feature: MA Experiment ID: 108595 Result: Down-regulated in Transcription
  misc_feature: MA Experiment 108595 PARAMETER Experiment Name: At_Ler-pi_Ovule_cDNA_P Parameter: Plant Line Value: null
  misc_feature: MA Experiment ID: 20000087 Result: Down-regulated in Transcription
  misc_feature: MA Experiment 20000087 PARAMETER Experiment Name: At_100uM_ABA_Mutants_cDNA_P Parameter: Plant Line Value: WS
  misc_feature: MA Experiment 20000087 PARAMETER Experiment Name: At_100uM_ABA_Mutants_cDNA_P Parameter: Timepoint (hr) Value: 6
  misc_feature: MA Experiment 20000087 PARAMETER Experiment Name: At_100uM_ABA_Mutants_cDNA_P Parameter: Tissue Value: Aerial
  misc_feature: MA Experiment 20000087 PARAMETER Experiment Name: At_100uM_ABA_Mutants_cDNA_P Parameter: Treatment Value: 100uM ABA vs. No Treatment
  misc_feature: MA Experiment ID: 20000117 Result: Down-regulated in Transcription
  misc_feature: MA Experiment 20000117 PARAMETER Experiment Name: At_100uM_ABA_Mutants_cDNA_P Parameter: Plant Line Value: Columbia
  misc_feature: MA Experiment 20000117 PARAMETER Experiment Name: At_100uM_ABA_Mutants_cDNA_P Parameter: Timepoint (hr) Value: 6
  misc_feature: MA Experiment 20000117 PARAMETER Experiment Name: At_100uM_ABA_Mutants_cDNA_P Parameter: Tissue Value: Aerial
  misc_feature: MA Experiment 20000117 PARAMETER Experiment Name: At_100uM_ABA_Mutants_cDNA_P Parameter: Treatment Value: 100uM ABA vs. No Treatment
  misc_feature: MA Experiment ID: 20000495 Result: Up-regulated in Transcription
  misc_feature: MA Experiment 20000495 PARAMETER Experiment Name: At_Guard_Cells_P Parameter: Harvest Date Value: 8/2/2002
  misc_feature: MA Experiment 20000495 PARAMETER Experiment Name: At_Guard_Cells_P Parameter: Organism Value: A. thaliana
  misc_feature: MA Experiment 20000495 PARAMETER Experiment Name: At_Guard_Cells_P Parameter: Tissue Value: Guard Cells vs. Leaves
  misc_feature: MA Experiment ID: 20001248 Result: Up-regulated in Transcription
  misc_feature: MA Experiment 20001248 PARAMETER Experiment Name: At_Far-red-induction_P Parameter: Age (day) Value: 7
  misc_feature: MA Experiment 20001248 PARAMETER Experiment Name: At_Far-red-induction_P Parameter: Light Value: Far-red vs. White
  misc_feature: MA Experiment 20001248 PARAMETER Experiment Name: At_Far-red-induction_P Parameter: Organism Value: A. thaliana
  misc_feature: MA Experiment 20001248 PARAMETER Experiment Name: At_Far-red-induction_P Parameter: Plant Line Value: Columbia
  misc_feature: MA Experiment 20001248 PARAMETER Experiment Name: At_Far-red-induction_P Parameter: Timepoint (hr) Value: 4
  misc_feature: MA Experiment 20001248 PARAMETER Experiment Name: At_Far-red-induction_P Parameter: Tissue Value: Whole Plant
  misc_feature: MA Experiment ID: 20001451 Result: Up-regulated in Transcription
  misc_feature: MA Experiment 20001451 PARAMETER Experiment Name: At_Far-red-induction_P Parameter: Age (day) Value: 7
  misc_feature: MA Experiment 20001451 PARAMETER Experiment Name: At_Far-red-induction_P Parameter: Light Value: Far-red vs. White
  misc_feature: MA Experiment 20001451 PARAMETER Experiment Name: At_Far-red-induction_P Parameter: Organism Value: A. thaliana
  misc_feature: MA Experiment 20001451 PARAMETER Experiment Name: At_Far-red-induction_P Parameter: Plant Line Value: Columbia
  misc_feature: MA Experiment 20001451 PARAMETER Experiment Name: At_Far-red-induction_P Parameter: Timepoint (hr) Value: 24
  misc_feature: MA Experiment 20001451 PARAMETER Experiment Name: At_Far-red-induction_P Parameter: Tissue Value: Whole Plant

SEQ ID NO: 34290 - protein, 407 aa, Arabidopsis thaliana; identical to SEQ ID NO: 30700
  peptide (1)..(407): Ceres Seq. ID no. 13491735
  misc_feature (70)..(354): Pfam Name: Protein kinase domain Pfam Description: Protein kinase domain
  misc_feature (16)..(398): Homolog of NCBI NO: 7434282 NR Description: shaggy protein kinase (EC 2.7.1.-) 6 - common
  misc_feature (30)..(401): Homolog of NCBI NO: 22326813 NR Description: serine/threonine protein kinase, Msk family
  misc_feature (1)..(398): Homolog of NCBI NO: 7434281 NR Description: probable shaggy-like protein kinase etha (EC
  misc_feature (34)..(406): Homolog of NCBI NO: 18700188 NR Description: AT4g18710/F28A21_120 [Arabidopsis thaliana]
  misc_feature (34)..(406): Homolog of NCBI NO: 15233984 NR Description: shaggy-related protein kinase etha (EC 2.7.1.-)
  misc_feature (34)..(406): Homolog of NCBI NO: 12643751 NR Description: Shaggy-related protein kinase eta (ASK-eta)
  misc_feature (1)..(403): Homolog of NCBI NO: 21593135 NR Description: putative shaggy-like protein kinase dzeta
  misc_feature (1)..(403): Homolog of NCBI NO: 15224593 NR Description: shaggy-related protein kinase dzeta [Arabidopsis
  misc_feature (1)..(403): Homolog of NCBI NO: 12643750 NR Description: Shaggy-related protein kinase delta (ASK-delta)
  misc_feature (1)..(407): Homolog of NCBI NO: 15221476 NR Description: shaggy-related kinase [Arabidopsis thaliana]

SEQ ID NO: 34291 - protein, 371 aa, Arabidopsis thaliana; identical to SEQ ID NO: 30701
  peptide (1)..(371): Ceres Seq. ID no. 13491736
  misc_feature (34)..(318): Pfam Name: Protein kinase domain Pfam Description: Protein kinase domain
  misc_feature (1)..(362): Homolog of NCBI NO: 7434282 NR Description: shaggy protein kinase (EC 2.7.1.-) 6 - common
  misc_feature (1)..(365): Homolog of NCBI NO: 22326813 NR Description: serine/threonine protein kinase, Msk family
  misc_feature (1)..(362): Homolog of NCBI NO: 7434281 NR Description: probable shaggy-like protein kinase etha (EC
  misc_feature (1)..(370): Homolog of NCBI NO: 18700188 NR Description: AT4g18710/F28A21_120 [Arabidopsis thaliana]
  misc_feature (1)..(370): Homolog of NCBI NO: 15233984 NR Description: shaggy-related protein kinase etha (EC 2.7.1.-)
  misc_feature (1)..(370): Homolog of NCBI NO: 12643751 NR Description: Shaggy-related protein kinase eta (ASK-eta)
  misc_feature (1)..(367): Homolog of NCBI NO: 21593135 NR Description: putative shaggy-like protein kinase dzeta
  misc_feature (1)..(367): Homolog of NCBI NO: 15224593 NR Description: shaggy-related protein kinase dzeta [Arabidopsis
  misc_feature (1)..(367): Homolog of NCBI NO: 12643750 NR Description: Shaggy-related protein kinase delta (ASK-delta)
  misc_feature (1)..(371): Homolog of NCBI NO: 15221476 NR Description: shaggy-related kinase [Arabidopsis thaliana]

SEQ ID NO: 34292 - protein, 337 aa, Arabidopsis thaliana; identical to SEQ ID NO: 30702
  peptide (1)..(337): Ceres Seq. ID no. 13491737
  misc_feature (1)..(284): Pfam Name: Protein kinase domain Pfam Description: Protein kinase domain
  misc_feature (1)..(328): Homolog of NCBI NO: 7434282 NR Description: shaggy protein kinase (EC 2.7.1.-) 6 - common
  misc_feature (1)..(331): Homolog of NCBI NO: 22326813 NR Description: serine/threonine protein kinase, Msk family
  misc_feature (1)..(328): Homolog of NCBI NO: 7434281 NR Description: probable shaggy-like protein kinase etha (EC
  misc_feature (1)..(336): Homolog of NCBI NO: 18700188 NR Description: AT4g18710/F28A21_120 [Arabidopsis thaliana]
  misc_feature (1)..(336): Homolog of NCBI NO: 15233984 NR Description: shaggy-related protein kinase etha (EC 2.7.1.-)
  misc_feature (1)..(336): Homolog of NCBI NO: 12643751 NR Description: Shaggy-related protein kinase eta (ASK-eta)
  misc_feature (1)..(333): Homolog of NCBI NO: 21593135 NR Description: putative shaggy-like protein kinase dzeta
  misc_feature (1)..(333): Homolog of NCBI NO: 15224593 NR Description: shaggy-related protein kinase dzeta [Arabidopsis
  misc_feature (1)..(333): Homolog of NCBI NO: 12643750 NR Description: Shaggy-related protein kinase delta (ASK-delta)
  misc_feature (1)..(337): Homolog of NCBI NO: 15221476 NR Description: shaggy-related kinase [Arabidopsis thaliana]

SEQ ID NO: 34293 - DNA, 1878 bp, Arabidopsis thaliana; identical to SEQ ID NO: 30703
  misc_feature (1)..(1878): Ceres Seq. ID no. 12639121
  misc_feature: MA Experiment ID: 108434 Result: Down-regulated in Transcription
  misc_feature: MA Experiment 108434 PARAMETER Experiment Name: At_Root_Tips_cDNA_P Parameter: Tissue Value: Root Tips
  misc_feature: MA Experiment ID: 108463 Result: Up-regulated in Transcription
  misc_feature: MA Experiment 108463 PARAMETER Experiment Name: At_Germinating_Seeds_cDNA_P Parameter: Age (day) Value: 3 vs. 0
  misc_feature: MA Experiment 108463 PARAMETER Experiment Name: At_Germinating_Seeds_cDNA_P Parameter: Tissue Value: Germinating Seeds
  misc_feature: MA Experiment ID: 108464 Result: Up-regulated in Transcription
  misc_feature: MA Experiment 108464 PARAMETER Experiment Name: At_Germinating_Seeds_cDNA_P Parameter: Age (day) Value: 4 vs. 0
  misc_feature: MA Experiment 108464 PARAMETER Experiment Name: At_Germinating_Seeds_cDNA_P Parameter: Tissue Value: Germinating Seeds
  misc_feature: MA Experiment ID: 108473 Result: Up-regulated in Transcription
  misc_feature: MA Experiment 108473 PARAMETER Experiment Name: At_Drought_Flowers_cDNA_P Parameter: Timepoint (hr) Value: 7 d
  misc_feature: MA Experiment 108473 PARAMETER Experiment Name: At_Drought_Flowers_cDNA_P Parameter: Tissue Value: Flower
  misc_feature: MA Experiment 108473 PARAMETER Experiment Name: At_Drought_Flowers_cDNA_P Parameter: Treatment Value: Drought vs. No Drought
  misc_feature: MA Experiment ID: 108561 Result: Up-regulated in Transcription
  misc_feature: MA Experiment 108561 PARAMETER Experiment Name: At_100uM_ABA_cDNA_P Parameter: Timepoint (hr) Value: 6
  misc_feature: MA Experiment 108561 PARAMETER Experiment Name: At_100uM_ABA_cDNA_P Parameter: Tissue Value: Aerial
  misc_feature: MA Experiment 108561 PARAMETER Experiment Name: At_100uM_ABA_cDNA_P Parameter: Treatment Value: 100uM ABA vs. No Treatment
  misc_feature: MA Experiment ID: 108572 Result: Up-regulated in Transcription
  misc_feature: MA Experiment 108572 PARAMETER Experiment Name: At_Drought_cDNA_P Parameter: Timepoint (hr) Value: 1
  misc_feature: MA Experiment 108572 PARAMETER Experiment Name: At_Drought_cDNA_P Parameter: Tissue Value: Aerial
  misc_feature: MA Experiment 108572 PARAMETER Experiment Name: At_Drought_cDNA_P Parameter: Treatment Value: Drought vs. No Drought
  misc_feature: MA Experiment ID: 108573 Result: Up-regulated in Transcription
  misc_feature: MA Experiment 108573 PARAMETER Experiment Name: At_Drought_cDNA_P Parameter: Timepoint (hr) Value: 6
  misc_feature: MA Experiment 108573 PARAMETER Experiment Name: At_Drought_cDNA_P Parameter: Tissue Value: Aerial
  misc_feature: MA Experiment 108573 PARAMETER Experiment Name: At_Drought_cDNA_P Parameter: Treatment Value: Drought vs. No Drought
  misc_feature: MA Experiment ID: 108574 Result: Up-regulated in Transcription
  misc_feature: MA Experiment 108574 PARAMETER Experiment Name: At_Wounding__cDNA_P Parameter: Timepoint (hr) Value: 1
  misc_feature: MA Experiment 108574 PARAMETER Experiment Name: At_Wounding__cDNA_P Parameter: Tissue Value: Aerial
  misc_feature: MA Experiment 108574 PARAMETER Experiment Name: At_Wounding__cDNA_P Parameter: Treatment Value: Wounding vs. No Wounding
  misc_feature: MA Experiment ID: 108585 Result: Up-regulated in Transcription
  misc_feature: MA Experiment 108585 PARAMETER Experiment Name: At_5mM_NaNP_cDNA_P Parameter: Timepoint (hr) Value: 6
  misc_feature: MA Experiment 108585 PARAMETER Experiment Name: At_5mM_NaNP_cDNA_P Parameter: Tissue Value: Aerial
  misc_feature: MA Experiment 108585 PARAMETER Experiment Name: At_5mM_NaNP_cDNA_P Parameter: Treatment Value: null
  misc_feature: MA Experiment ID: 108595 Result: Up-regulated in Transcription
  misc_feature: MA Experiment 108595 PARAMETER Experiment Name: At_Ler-pi_Ovule_cDNA_P Parameter: Plant Line Value: null
  misc_feature: MA Experiment ID: 108605 Result: Up-regulated in Transcription
  misc_feature: MA Experiment 108605 PARAMETER Experiment Name: At_100uM_ABA_cDNA_P Parameter: Timepoint (hr) Value: 6
  misc_feature: MA Experiment 108605 PARAMETER Experiment Name: At_100uM_ABA_cDNA_P Parameter: Tissue Value: Aerial
  misc_feature: MA Experiment 108605 PARAMETER Experiment Name: At_100uM_ABA_cDNA_P Parameter: Treatment Value: 100uM ABA vs. No Treatment
  misc_feature: MA Experiment ID: 108607 Result: Up-regulated in Transcription
  misc_feature: MA Experiment 108607 PARAMETER Experiment Name: At_100uM_ABA_cDNA_P Parameter: Timepoint (hr) Value: 4
  misc_feature: MA Experiment 108607 PARAMETER Experiment Name: At_100uM_ABA_cDNA_P Parameter: Tissue Value: Aerial
  misc_feature: MA Experiment 108607 PARAMETER Experiment Name: At_100uM_ABA_cDNA_P Parameter: Treatment Value: 100uM ABA vs. No Treatment
  misc_feature: MA Experiment ID: 108608 Result: Up-regulated in Transcription
  misc_feature: MA Experiment 108608 PARAMETER Experiment Name: At_100uM_ABA_cDNA_P Parameter: Timepoint (hr) Value: 1
  misc_feature: MA Experiment 108608 PARAMETER Experiment Name: At_100uM_ABA_cDNA_P Parameter: Tissue Value: Aerial
  misc_feature: MA Experiment 108608 PARAMETER Experiment Name: At_100uM_ABA_cDNA_P Parameter: Treatment Value: 100uM ABA vs. No Treatment
  misc_feature: MA Experiment ID: 108609 Result: Up-regulated in Transcription
  misc_feature: MA Experiment 108609 PARAMETER Experiment Name: At_100uM_ABA_cDNA_P Parameter: Timepoint (hr) Value: 24
  misc_feature: MA Experiment 108609 PARAMETER Experiment Name: At_100uM_ABA_cDNA_P Parameter: Tissue Value: Aerial
  misc_feature: MA Experiment 108609 PARAMETER Experiment Name: At_100uM_ABA_cDNA_P Parameter: Treatment Value: 100uM ABA vs. No Treatment
  misc_feature: MA Experiment ID: 108668 Result: Up-regulated in Transcription
  misc_feature: MA Experiment 108668 PARAMETER Experiment Name: At_2mM_SA_cDNA_P Parameter: Plant Line Value: WS
  misc_feature: MA Experiment 108668 PARAMETER Experiment Name: At_2mM_SA_cDNA_P Parameter: Timepoint (hr) Value: 6
  misc_feature: MA Experiment 108668 PARAMETER Experiment Name: At_2mM_SA_cDNA_P Parameter: Treatment Value: 2mM SA vs. No Treatment
  misc_feature: MA Experiment ID: 20000069 Result: Up-regulated in Transcription
  misc_feature: MA Experiment 20000069 PARAMETER Experiment Name: At_100uM_ABA_Mutants_cDNA_P Parameter: Plant Line Value: CS23
  misc_feature: MA Experiment 20000069 PARAMETER Experiment Name: At_100uM_ABA_Mutants_cDNA_P Parameter: Timepoint (hr) Value: 6
  misc_feature: MA Experiment 20000069 PARAMETER Experiment Name: At_100uM_ABA_Mutants_cDNA_P Parameter: Tissue Value: Aerial
  misc_feature: MA Experiment 20000069 PARAMETER Experiment Name: At_100uM_ABA_Mutants_cDNA_P Parameter: Treatment Value: 100uM ABA vs. No Treatment
  misc_feature: MA Experiment ID: 20000070 Result: Up-regulated in Transcription
  misc_feature: MA Experiment 20000070 PARAMETER Experiment Name: At_100uM_ABA_Mutants_cDNA_P Parameter: Plant Line Value: CS24
  misc_feature: MA Experiment 20000070 PARAMETER Experiment Name: At_100uM_ABA_Mutants_cDNA_P Parameter: Timepoint (hr) Value: 6
  misc_feature: MA Experiment 20000070 PARAMETER Experiment Name: At_100uM_ABA_Mutants_cDNA_P Parameter: Tissue Value: Aerial
  misc_feature: MA Experiment 20000070 PARAMETER Experiment Name: At_100uM_ABA_Mutants_cDNA_P Parameter: Treatment Value: 100uM ABA vs. No Treatment
  misc_feature: MA Experiment ID: 20000072 Result: Up-regulated in Transcription
  misc_feature: MA Experiment 20000072 PARAMETER Experiment Name: At_100uM_ABA_Mutants_cDNA_P Parameter: Plant Line Value: CS8105
  misc_feature: MA Experiment 20000072 PARAMETER Experiment Name: At_100uM_ABA_Mutants_cDNA_P Parameter: Timepoint (hr) Value: 6
  misc_feature: MA Experiment 20000072 PARAMETER Experiment Name: At_100uM_ABA_Mutants_cDNA_P Parameter: Tissue Value: Aerial
  misc_feature: MA Experiment 20000072 PARAMETER Experiment Name: At_100uM_ABA_Mutants_cDNA_P Parameter: Treatment Value: 100uM ABA vs. No Treatment
  misc_feature: MA Experiment ID: 20000086 Result: Up-regulated in Transcription
  misc_feature: MA Experiment 20000086 PARAMETER Experiment Name: At_100uM_ABA_Mutants_cDNA_P Parameter: Plant Line Value: CS22
  misc_feature: MA Experiment 20000086 PARAMETER Experiment Name: At_100uM_ABA_Mutants_cDNA_P Parameter: Timepoint (hr) Value: 6
  misc_feature: MA Experiment 20000086 PARAMETER Experiment Name: At_100uM_ABA_Mutants_cDNA_P Parameter: Tissue Value: Aerial
  misc_feature: MA Experiment 20000086 PARAMETER Experiment Name: At_100uM_ABA_Mutants_cDNA_P Parameter: Treatment Value: 100uM ABA vs. No Treatment
  misc_feature: MA Experiment ID: 20000087 Result: Up-regulated in Transcription
  misc_feature: MA Experiment 20000087 PARAMETER Experiment Name: At_100uM_ABA_Mutants_cDNA_P Parameter: Plant Line Value: WS
  misc_feature: MA Experiment 20000087 PARAMETER Experiment Name: At_100uM_ABA_Mutants_cDNA_P Parameter: Timepoint (hr) Value: 6
  misc_feature: MA Experiment 20000087 PARAMETER Experiment Name: At_100uM_ABA_Mutants_cDNA_P Parameter: Tissue Value: Aerial
  misc_feature: MA Experiment 20000087 PARAMETER Experiment Name: At_100uM_ABA_Mutants_cDNA_P Parameter: Treatment Value: 100uM ABA vs. No Treatment
  misc_feature: MA Experiment ID: 20000088 Result: Up-regulated in Transcription
  misc_feature: MA Experiment 20000088 PARAMETER Experiment Name: At_100uM_ABA_Mutants_cDNA_P Parameter: Plant Line Value: Landsberg
  misc_feature: MA Experiment 20000088 PARAMETER Experiment Name: At_100uM_ABA_Mutants_cDNA_P Parameter: Timepoint (hr) Value: 6
  misc_feature: MA Experiment 20000088 PARAMETER Experiment Name: At_100uM_ABA_Mutants_cDNA_P Parameter: Tissue Value: Aerial
  misc_feature: MA Experiment 20000088 PARAMETER Experiment Name: At_100uM_ABA_Mutants_cDNA_P Parameter: Treatment Value: 100uM ABA vs. No Treatment
  misc_feature: MA Experiment ID: 20000117 Result: Up-regulated in Transcription
  misc_feature: MA Experiment 20000117 PARAMETER Experiment Name: At_100uM_ABA_Mutants_cDNA_P Parameter: Plant Line Value: Columbia
  misc_feature: MA Experiment 20000117 PARAMETER Experiment Name: At_100uM_ABA_Mutants_cDNA_P Parameter: Timepoint (hr) Value: 6
  misc_feature: MA Experiment 20000117 PARAMETER Experiment Name: At_100uM_ABA_Mutants_cDNA_P Parameter: Tissue Value: Aerial
  misc_feature: MA Experiment 20000117 PARAMETER Experiment Name: At_100uM_ABA_Mutants_cDNA_P Parameter: Treatment Value: 100uM ABA vs. No Treatment
  misc_feature: MA Experiment ID: 20000144 Result: Down-regulated in Transcription
  misc_feature: MA Experiment 20000144 PARAMETER Experiment Name: At_42deg_Heat_cDNA_P Parameter: Temperature (deg C) Value: 42 vs. 22
  misc_feature: MA Experiment 20000144 PARAMETER Experiment Name: At_42deg_Heat_cDNA_P Parameter: Timepoint (hr) Value: 1
  misc_feature: MA Experiment 20000144 PARAMETER Experiment Name: At_42deg_Heat_cDNA_P Parameter: Tissue Value: Aerial
  misc_feature: MA Experiment ID: 20000166 Result: Up-regulated in Transcription
  misc_feature: MA Experiment 20000166 PARAMETER Experiment Name: At_100uM_ABA_P Parameter: Age (day) Value: 14
  misc_feature: MA Experiment 20000166 PARAMETER Experiment Name: At_100uM_ABA_P Parameter: Organism Value: A. thaliana
  misc_feature: MA Experiment 20000166 PARAMETER Experiment Name: At_100uM_ABA_P Parameter: Plant Line Value: WS
  misc_feature: MA Experiment 20000166 PARAMETER Experiment Name: At_100uM_ABA_P Parameter: Timepoint (hr) Value: 1
  misc_feature: MA Experiment 20000166 PARAMETER Experiment Name: At_100uM_ABA_P Parameter: Tissue Value: Aerial
  misc_feature: MA Experiment 20000166 PARAMETER Experiment Name: At_100uM_ABA_P Parameter: Treatment Value: 100uM ABA vs. No Treatment
  misc_feature: MA Experiment ID: 20000169 Result: Up-regulated in Transcription
  misc_feature: MA Experiment 20000169 PARAMETER Experiment Name: At_100uM_ABA_P Parameter: Age (day) Value: 14
  misc_feature: MA Experiment 20000169 PARAMETER Experiment Name: At_100uM_ABA_P Parameter: Organism Value: A. thaliana
  misc_feature: MA Experiment 20000169 PARAMETER Experiment Name: At_100uM_ABA_P Parameter: Plant Line Value: WS
  misc_feature: MA Experiment 20000169 PARAMETER Experiment Name: At_100uM_ABA_P Parameter: Timepoint (hr) Value: 6
  misc_feature: MA Experiment 20000169 PARAMETER Experiment Name: At_100uM_ABA_P Parameter: Tissue Value: Aerial
  misc_feature: MA Experiment 20000169 PARAMETER Experiment Name: At_100uM_ABA_P Parameter: Treatment Value: 100uM ABA vs. No Treatment
  misc_feature: MA Experiment ID: 20000171 Result: Down-regulated in Transcription
  misc_feature: MA Experiment 20000171 PARAMETER Experiment Name: At_42deg_Heat_P Parameter: Age (day) Value: 14
  misc_feature: MA Experiment 20000171 PARAMETER Experiment Name: At_42deg_Heat_P Parameter: Organism Value: A. thaliana
  misc_feature: MA Experiment 20000171 PARAMETER Experiment Name: At_42deg_Heat_P Parameter: Plant Line Value: WS
  misc_feature: MA Experiment 20000171 PARAMETER Experiment Name: At_42deg_Heat_P Parameter: Temperature (deg C) Value: 42 vs. 22
  misc_feature: MA Experiment 20000171 PARAMETER Experiment Name: At_42deg_Heat_P Parameter: Timepoint (hr) Value: 1
  misc_feature: MA Experiment 20000171 PARAMETER Experiment Name: At_42deg_Heat_P Parameter: Tissue Value: Aerial
  misc_feature: MA Experiment ID: 20000173 Result: Down-regulated in Transcription
  misc_feature: MA Experiment 20000173 PARAMETER Experiment Name: At_42deg_Heat_P Parameter: Age (day) Value: 14
  misc_feature: MA Experiment 20000173 PARAMETER Experiment Name: At_42deg_Heat_P Parameter: Organism Value: A. thaliana
  misc_feature: MA Experiment 20000173 PARAMETER Experiment Name: At_42deg_Heat_P Parameter: Plant Line Value: WS
  misc_feature: MA Experiment 20000173 PARAMETER Experiment Name: At_42deg_Heat_P Parameter: Temperature (deg C) Value: 42 vs. 22
  misc_feature: MA Experiment 20000173 PARAMETER Experiment Name: At_42deg_Heat_P Parameter: Timepoint (hr) Value: 6
  misc_feature: MA Experiment 20000173 PARAMETER Experiment Name: At_42deg_Heat_P Parameter: Tissue Value: Aerial
  misc_feature: MA Experiment ID: 20000180 Result: Up-regulated in Transcription
  misc_feature: MA Experiment 20000180 PARAMETER Experiment Name: At_Germinating_Seeds_P Parameter: Age (hr) Value: 24 vs. 0
  misc_feature: MA Experiment 20000180 PARAMETER Experiment Name: At_Germinating_Seeds_P Parameter: Tissue Value: Germinating Seeds
  misc_feature: MA Experiment ID: 20000182 Result: Up-regulated in Transcription
  misc_feature: MA Experiment 20000182 PARAMETER Experiment Name: At_2mM_SA_P Parameter: Age (day) Value: 14
  misc_feature: MA Experiment 20000182 PARAMETER Experiment Name: At_2mM_SA_P Parameter: Organism Value: A. thaliana
  misc_feature: MA Experiment 20000182 PARAMETER Experiment Name: At_2mM_SA_P Parameter: Plant Line Value: WS
  misc_feature: MA Experiment 20000182 PARAMETER Experiment Name: At_2mM_SA_P Parameter: Timepoint (hr) Value: 6
  misc_feature: MA Experiment 20000182 PARAMETER Experiment Name: At_2mM_SA_P Parameter: Tissue Value: Aerial
  misc_feature: MA Experiment 20000182 PARAMETER Experiment Name: At_2mM_SA_P Parameter: Treatment Value: 2mM SA vs. No Treatment
  misc_feature: MA Experiment ID: 20000184 Result: Down-regulated in Transcription
  misc_feature: MA Experiment 20000184 PARAMETER Experiment Name: At_Shoots__P Parameter: Age (day) Value: 7
  misc_feature: MA Experiment 20000184 PARAMETER Experiment Name: At_Shoots__P Parameter: Tissue Value: Shoots vs. Whole Plant
  misc_feature: MA Experiment ID: 20000185 Result: Up-regulated in Transcription
  misc_feature: MA Experiment 20000185 PARAMETER Experiment Name: At_Roots__P Parameter: Age (day) Value: 7 vs. 21
  misc_feature: MA Experiment 20000185 PARAMETER Experiment Name: At_Roots__P Parameter: Organism Value: A. thaliana
  misc_feature: MA Experiment 20000185 PARAMETER Experiment Name: At_Roots__P Parameter: Tissue Value: Roots vs. Whole Plant
  misc_feature: MA Experiment ID: 20000213 Result: Up-regulated in Transcription
  misc_feature: MA Experiment 20000213 PARAMETER Experiment Name: At_4deg_Cold_P Parameter: Timepoint (hr) Value: 2
  misc_feature: MA Experiment ID: 20000267 Result: Up-regulated in Transcription
  misc_feature: MA Experiment 20000267 PARAMETER Experiment Name: At_Drought_P Parameter: Age (day) Value: 7
  misc_feature: MA Experiment 20000267 PARAMETER Experiment Name: At_Drought_P Parameter: Organism Value: A. thaliana
  misc_feature: MA Experiment 20000267 PARAMETER Experiment Name: At_Drought_P Parameter: Plant Line Value: WS
  misc_feature: MA Experiment 20000267 PARAMETER Experiment Name: At_Drought_P Parameter: Timepoint (hr) Value: 6
  misc_feature: MA Experiment 20000267 PARAMETER Experiment Name: At_Drought_P Parameter: Tissue Value: Whole Plant
  misc_feature: MA Experiment 20000267 PARAMETER Experiment Name: At_Drought_P Parameter: Treatment Value: Drought vs. No Drought
  misc_feature: MA Experiment ID: 20000436 Result: Up-regulated in Transcription
  misc_feature: MA Experiment 20000436 PARAMETER Experiment Name: At_Drought_P Parameter: Age (day) Value: 7
  misc_feature: MA Experiment 20000436 PARAMETER Experiment Name: At_Drought_P Parameter: Organism Value: A. thaliana
  misc_feature: MA Experiment 20000436 PARAMETER Experiment Name: At_Drought_P Parameter: Plant Line Value: WS
  misc_feature: MA Experiment 20000436 PARAMETER Experiment Name: At_Drought_P Parameter: Timepoint (hr) Value: 12
  misc_feature: MA Experiment 20000436 PARAMETER Experiment Name: At_Drought_P Parameter: Tissue Value: Whole Plant
  misc_feature: MA Experiment 20000436 PARAMETER Experiment Name: At_Drought_P Parameter: Treatment Value: Drought vs. No Drought
  misc_feature: MA Experiment ID: 20000437 Result: Up-regulated in Transcription
  misc_feature: MA Experiment 20000437 PARAMETER Experiment Name: At_Drought_P Parameter: Age (day) Value: 8
  misc_feature: MA Experiment 20000437 PARAMETER Experiment Name: At_Drought_P Parameter: Organism Value: A. thaliana
  misc_feature: MA Experiment 20000437 PARAMETER Experiment Name: At_Drought_P Parameter: Plant Line Value: WS
  misc_feature: MA Experiment 20000437 PARAMETER Experiment Name: At_Drought_P Parameter: Timepoint (hr) Value: 24
  misc_feature: MA Experiment 20000437 PARAMETER Experiment Name: At_Drought_P Parameter: Tissue Value: Whole Plant
  misc_feature: MA Experiment 20000437 PARAMETER Experiment Name: At_Drought_P Parameter: Treatment Value: Drought vs. No Drought
  misc_feature: MA Experiment ID: 20000439 Result: Up-regulated in Transcription
  misc_feature: MA Experiment 20000439 PARAMETER Experiment Name: At_Roots__P Parameter: Age (day) Value: 14 vs. 21
  misc_feature: MA Experiment 20000439 PARAMETER Experiment Name: At_Roots__P Parameter: Organism Value: A. thaliana
  misc_feature: MA Experiment 20000439 PARAMETER Experiment Name: At_Roots__P Parameter: Tissue Value: Roots vs. Whole Plant
  misc_feature: MA Experiment ID: 20000453 Result: Up-regulated in Transcription
  misc_feature: MA Experiment 20000453 PARAMETER Experiment Name: At_100uM_ABA_P Parameter: Age (day) Value: 15
  misc_feature: MA Experiment 20000453 PARAMETER Experiment Name: At_100uM_ABA_P Parameter: Organism Value: A. thaliana
  misc_feature: MA Experiment 20000453 PARAMETER Experiment Name: At_100uM_ABA_P Parameter: Plant Line Value: WS
  misc_feature: MA Experiment 20000453 PARAMETER Experiment Name: At_100uM_ABA_P Parameter: Timepoint (hr) Value: 24
  misc_feature: MA Experiment 20000453 PARAMETER Experiment Name: At_100uM_ABA_P Parameter: Tissue Value: Aerial
  misc_feature: MA Experiment 20000453 PARAMETER Experiment Name: At_100uM_ABA_P Parameter: Treatment Value: 100uM ABA vs. No Treatment
  misc_feature: MA Experiment ID: 20000455 Result: Up-regulated in Transcription
  misc_feature: MA Experiment 20000455 PARAMETER Experiment Name: At_100uM_ABA_P Parameter: Age (day) Value: 16
  misc_feature: MA Experiment 20000455 PARAMETER Experiment Name: At_100uM_ABA_P Parameter: Organism Value: A. thaliana
  misc_feature: MA Experiment 20000455 PARAMETER Experiment Name: At_100uM_ABA_P Parameter: Plant Line Value: WS
  misc_feature: MA Experiment 20000455 PARAMETER Experiment Name: At_100uM_ABA_P Parameter: Timepoint (hr) Value: 48
  misc_feature: MA Experiment 20000455 PARAMETER Experiment Name: At_100uM_ABA_P Parameter: Tissue Value: Aerial
  misc_feature: MA Experiment 20000455 PARAMETER Experiment Name: At_100uM_ABA_P Parameter: Treatment Value: 100uM ABA vs. No Treatment
  misc_feature: MA Experiment ID: 20000794 Result: Up-regulated in Transcription
  misc_feature: MA Experiment 20000794 PARAMETER Experiment Name: At_Petals_P Parameter: Age (day) Value: 23-25 days
  misc_feature: MA Experiment 20000794 PARAMETER Experiment Name: At_Petals_P Parameter: Plant Line Value: WS
  misc_feature: MA Experiment 20000794 PARAMETER Experiment Name: At_Petals_P Parameter: Tissue Value: Petals vs. Whole plant
  misc_feature: MA Experiment ID: 20001247 Result: Up-regulated in Transcription
  misc_feature: MA Experiment 20001247 PARAMETER Experiment Name: At_Far-red-induction_P Parameter: Age (day) Value: 7
  misc_feature: MA Experiment 20001247 PARAMETER Experiment Name: At_Far-red-induction_P Parameter: Light Value: Far-red vs. White
  misc_feature: MA Experiment 20001247 PARAMETER Experiment Name: At_Far-red-induction_P Parameter: Organism Value: A. thaliana
  misc_feature: MA Experiment 20001247 PARAMETER Experiment Name: At_Far-red-induction_P Parameter: Plant Line Value: Columbia
  misc_feature: MA Experiment 20001247 PARAMETER Experiment Name: At_Far-red-induction_P Parameter: Timepoint (hr) Value: 1
  misc_feature: MA Experiment 20001247 PARAMETER Experiment Name: At_Far-red-induction_P Parameter: Tissue Value: Whole Plant
  misc_feature: MA Experiment ID: 20001451 Result: Up-regulated in Transcription
  misc_feature: MA Experiment 20001451 PARAMETER Experiment Name: At_Far-red-induction_P Parameter: Age (day) Value: 7
  misc_feature: MA Experiment 20001451 PARAMETER Experiment Name: At_Far-red-induction_P Parameter: Light Value: Far-red vs. White
  misc_feature: MA Experiment 20001451 PARAMETER Experiment Name: At_Far-red-induction_P Parameter: Organism Value: A. thaliana
  misc_feature: MA Experiment 20001451 PARAMETER Experiment Name: At_Far-red-induction_P Parameter: Plant Line Value: Columbia
  misc_feature: MA Experiment 20001451 PARAMETER Experiment Name: At_Far-red-induction_P Parameter: Timepoint (hr) Value: 24
  misc_feature: MA Experiment 20001451 PARAMETER Experiment Name: At_Far-red-induction_P Parameter: Tissue Value: Whole Plant
  misc_feature: MA Experiment ID: 20001554 Result: Up-regulated in Transcription
  misc_feature: MA Experiment 20001554 PARAMETER Experiment Name: At_Drought_Soil_Dry_P Parameter: Age (day) Value: 21
  misc_feature: MA Experiment 20001554 PARAMETER Experiment Name: At_Drought_Soil_Dry_P Parameter: Organism Value: A. thaliana
  misc_feature: MA Experiment 20001554 PARAMETER Experiment Name: At_Drought_Soil_Dry_P Parameter: Plant Line Value: WS
  misc_feature: MA Experiment 20001554 PARAMETER Experiment Name: At_Drought_Soil_Dry_P Parameter: Post Timepoint (hr) Value: None
  misc_feature: MA Experiment 20001554 PARAMETER Experiment Name: At_Drought_Soil_Dry_P Parameter: Post-Treatment Value: None
  misc_feature: MA Experiment 20001554 PARAMETER Experiment Name: At_Drought_Soil_Dry_P Parameter: Timepoint (day) Value: 7
  misc_feature: MA Experiment 20001554 PARAMETER Experiment Name: At_Drought_Soil_Dry_P Parameter: Treatment Value: Drought vs. No Drought
  misc_feature: MA Experiment ID: 20001555 Result: Up-regulated in Transcription
  misc_feature: MA Experiment 20001555 PARAMETER Experiment Name: At_Drought_Soil_Dry_P Parameter: Age (day) Value: 24
  misc_feature: MA Experiment 20001555 PARAMETER Experiment Name: At_Drought_Soil_Dry_P Parameter: Organism Value: A. thaliana
  misc_feature: MA Experiment 20001555 PARAMETER Experiment Name: At_Drought_Soil_Dry_P Parameter: Plant Line Value: WS
  misc_feature: MA Experiment 20001555 PARAMETER Experiment Name: At_Drought_Soil_Dry_P Parameter: Post Timepoint (hr) Value: None
  misc_feature: MA Experiment 20001555 PARAMETER Experiment Name: At_Drought_Soil_Dry_P Parameter: Post-Treatment Value: None
  misc_feature: MA Experiment 20001555 PARAMETER Experiment Name: At_Drought_Soil_Dry_P Parameter: Timepoint (day) Value: 10
  misc_feature: MA Experiment 20001555 PARAMETER Experiment Name: At_Drought_Soil_Dry_P Parameter: Treatment Value: Drought vs. No Drought
  misc_feature: MA Experiment ID: 20001905 Result: Up-regulated in Transcription
  misc_feature: MA Experiment 20001905 PARAMETER Experiment Name: At_Drought_Reproduction_P Parameter: Age (day) Value: 40
  misc_feature: MA Experiment 20001905 PARAMETER Experiment Name: At_Drought_Reproduction_P Parameter: Organism Value: A. thaliana
  misc_feature: MA Experiment 20001905 PARAMETER Experiment Name: At_Drought_Reproduction_P Parameter: Plant Line Value: WS
  misc_feature: MA Experiment 20001905 PARAMETER Experiment Name: At_Drought_Reproduction_P Parameter: Timepoint (day) Value: 10
  misc_feature: MA Experiment 20001905 PARAMETER Experiment Name: At_Drought_Reproduction_P Parameter: Tissue Value: Rosettes
  misc_feature: MA Experiment 20001905 PARAMETER Experiment Name: At_Drought_Reproduction_P Parameter: Treatment Value: Drought vs. No Drought
  misc_feature: MA Experiment ID: 20001906 Result: Up-regulated in Transcription
  misc_feature: MA Experiment 20001906 PARAMETER Experiment Name: At_Drought_Reproduction_P Parameter: Age (day) Value: 35
  misc_feature: MA Experiment 20001906 PARAMETER Experiment Name: At_Drought_Reproduction_P Parameter: Organism Value: A. thaliana
  misc_feature: MA Experiment 20001906 PARAMETER Experiment Name: At_Drought_Reproduction_P Parameter: Plant Line Value: WS
  misc_feature: MA Experiment 20001906 PARAMETER Experiment Name: At_Drought_Reproduction_P Parameter: Timepoint (day) Value: 5
  misc_feature: MA Experiment 20001906 PARAMETER Experiment Name: At_Drought_Reproduction_P Parameter: Tissue Value: Siliques
  misc_feature: MA Experiment 20001906 PARAMETER Experiment Name: At_Drought_Reproduction_P Parameter: Treatment Value: Drought vs. No Drought

SEQ ID NO: 34294 - protein, 505 aa, Arabidopsis thaliana; identical to SEQ ID NO: 30704
  peptide (1)..(505): Ceres Seq. ID no. 12639122
  misc_feature (224)..(478): Pfam Name: Protein of unknown function, DUF604 Pfam Description: Protein of unknown function, DUF604
  misc_feature (224)..(478): Pfam Name: Protein of unknown function, DUF604 Pfam Description: Protein of unknown function, DUF604
  misc_feature (91)..(503): Homolog of NCBI NO: 25336194 NR Description: F22L4.11 protein - Arabidopsis thaliana
  misc_feature (91)..(503): Homolog of NCBI NO: 15223433 NR Description: hypothetical protein; protein id: At1g01570.1
  misc_feature (73)..(483): Homolog of NCBI NO: 15238082 NR Description: putative protein; protein id: At5g41460.1
  misc_feature (91)..(503): Homolog of NCBI NO: 18416156 NR Description: Expressed protein
  misc_feature (91)..(503): Homolog of NCBI NO: 15529153 NR Description: AT4g23490/F16G20_190 [Arabidopsis thaliana]
  misc_feature (91)..(503): Homolog of NCBI NO: 25336194 NR Description: F22L4.11 protein - Arabidopsis thaliana
  misc_feature (73)..(483): Homolog of NCBI NO: 15238082 NR Description: putative protein; protein id: At5g41460.1
  misc_feature (91)..(503): Homolog of NCBI NO: 15529153 NR Description: AT4g23490/F16G20_190 [Arabidopsis thaliana]
  misc_feature (1)..(505): Homolog of NCBI NO: 15229746 NR Description: unknown protein; protein id: At3g11420.1
  misc_feature (27)..(505): Homolog of NCBI NO: 18404516 NR Description: putative zinc finger protein; protein id:
  misc_feature (74)..(292): Homolog of NCBI NO: 34902078 NR Description: unknown protein [Oryza sativa (japonica
  misc_feature (282)..(499): Homolog of NCBI NO: 34902078 NR Description: unknown protein [Oryza sativa (japonica
  misc_feature (85)..(503): Homolog of NCBI NO: 37536418 NR Description: hypothetical protein [Oryza sativa (japonica
  misc_feature (91)..(503): Homolog of NCBI NO: 18416156 NR Description: Expressed protein
  misc_feature (91)..(503): Homolog of NCBI NO: 15223433 NR Description: hypothetical protein; protein id: At1g01570.1
  misc_feature (85)..(503): Homolog of NCBI NO: 37536418 NR Description: hypothetical protein [Oryza sativa (japonica
  misc_feature (282)..(499): Homolog of NCBI NO: 34902078 NR Description: unknown protein [Oryza sativa (japonica
  misc_feature (74)..(292): Homolog of NCBI NO: 34902078 NR Description: unknown protein [Oryza sativa (japonica
  misc_feature (27)..(505): Homolog of NCBI NO: 18404516 NR Description: putative zinc finger protein; protein id:
  misc_feature (1)..(505): Homolog of NCBI NO: 15229746 NR Description: unknown protein; protein id: At3g11420.1

SEQ ID NO: 34295 - protein, 482 aa, Arabidopsis thaliana; identical to SEQ ID NO: 30705
  peptide (1)..(482): Ceres Seq. ID no. 12639123
  misc_feature (201)..(455): Pfam Name: Protein of unknown function, DUF604 Pfam Description: Protein of unknown function, DUF604
  misc_feature (201)..(455): Pfam Name: Protein of unknown function, DUF604 Pfam Description: Protein of unknown function, DUF604
  misc_feature (68)..(480): Homolog of NCBI NO: 25336194 NR Description: F22L4.11 protein - Arabidopsis thaliana
  misc_feature (68)..(480): Homolog of NCBI NO: 15223433 NR Description: hypothetical protein; protein id: At1g01570.1
  misc_feature (50)..(460): Homolog of NCBI NO: 15238082 NR Description: putative protein; protein id: At5g41460.1
  misc_feature (68)..(480): Homolog of NCBI NO: 18416156 NR Description: Expressed protein
  misc_feature (68)..(480): Homolog of NCBI NO: 15529153 NR Description: AT4g23490/F16G20_190 [Arabidopsis thaliana]
  misc_feature (68)..(480): Homolog of NCBI NO: 25336194 NR Description: F22L4.11 protein - Arabidopsis thaliana
  misc_feature (50)..(460): Homolog of NCBI NO: 15238082 NR Description: putative protein; protein id: At5g41460.1
  misc_feature (68)..(480): Homolog of NCBI NO: 15529153 NR Description: AT4g23490/F16G20_190 [Arabidopsis thaliana]
  misc_feature (1)..(482): Homolog of NCBI NO: 15229746 NR Description: unknown protein; protein id: At3g11420.1
  misc_feature (4)..(482): Homolog of NCBI NO: 18404516 NR Description: putative zinc finger protein; protein id:
  misc_feature (51)..(269): Homolog of NCBI NO: 34902078 NR Description: unknown protein [Oryza sativa (japonica
  misc_feature (259)..(476): Homolog of NCBI NO: 34902078 NR Description: unknown protein [Oryza sativa (japonica
  misc_feature (62)..(480): Homolog of NCBI NO: 37536418 NR Description: hypothetical protein [Oryza sativa (japonica
  misc_feature (68)..(480): Homolog of NCBI NO: 18416156 NR Description: Expressed protein
  misc_feature (68)..(480): Homolog of NCBI NO: 15223433 NR Description: hypothetical protein; protein id: At1g01570.1
  misc_feature (62)..(480): Homolog of NCBI NO: 37536418 NR Description: hypothetical protein [Oryza sativa (japonica
  misc_feature (259)..(476): Homolog of NCBI NO: 34902078 NR Description: unknown protein [Oryza sativa (japonica
  misc_feature (51)..(269): Homolog of NCBI NO: 34902078 NR Description: unknown protein [Oryza sativa (japonica
  misc_feature (4)..(482): Homolog of NCBI NO: 18404516 NR Description: putative zinc finger protein; protein id:
  misc_feature (1)..(482): Homolog of NCBI NO: 15229746 NR Description: unknown protein; protein id: At3g11420.1

SEQ ID NO: 34296 - protein, 318 aa, Arabidopsis thaliana; identical to SEQ ID NO: 30706
  peptide (1)..(318): Ceres Seq. ID no. 12639124
  misc_feature (37)..(291): Pfam Name: Protein of unknown function, DUF604 Pfam Description: Protein of unknown function, DUF604
  misc_feature (37)..(291): Pfam Name: Protein of unknown function, DUF604 Pfam Description: Protein of unknown function, DUF604
  misc_feature (1)..(316): Homolog of NCBI NO: 25336194 NR Description: F22L4.11 protein - Arabidopsis thaliana
  misc_feature (1)..(316): Homolog of NCBI NO: 15223433 NR Description: hypothetical protein; protein id: At1g01570.1
  misc_feature (1)..(296): Homolog of NCBI NO: 15238082 NR Description: putative protein; protein id: At5g41460.1
  misc_feature (1)..(316): Homolog of NCBI NO: 18416156 NR Description: Expressed protein
  misc_feature (1)..(316): Homolog of NCBI NO: 15529153 NR Description: AT4g23490/F16G20_190 [Arabidopsis thaliana]
  misc_feature (1)..(316): Homolog of NCBI NO: 25336194 NR Description: F22L4.11 protein - Arabidopsis thaliana
  misc_feature (1)..(296): Homolog of NCBI NO: 15238082 NR Description: putative protein; protein id: At5g41460.1
  misc_feature (1)..(316): Homolog of NCBI NO: 15529153 NR Description: AT4g23490/F16G20_190 [Arabidopsis thaliana]
  misc_feature (1)..(318): Homolog of NCBI NO: 15229746 NR Description: unknown protein; protein id: At3g11420.1
  misc_feature (1)..(318): Homolog of NCBI NO: 18404516 NR Description: putative zinc finger protein; protein id:
  misc_feature (1)..(105): Homolog of NCBI NO: 34902078 NR Description: unknown protein [Oryza sativa (japonica
  misc_feature (95)..(312): Homolog of NCBI NO: 34902078 NR Description: unknown protein [Oryza sativa (japonica
  misc_feature (1)..(316): Homolog of NCBI NO: 37536418 NR Description: hypothetical protein [Oryza sativa (japonica
  misc_feature (1)..(316): Homolog of NCBI NO: 18416156 NR Description: Expressed protein
  misc_feature (1)..(316): Homolog of NCBI NO: 15223433 NR Description: hypothetical protein; protein id: At1g01570.1
  misc_feature (1)..(316): Homolog of NCBI NO: 37536418 NR Description: hypothetical protein [Oryza sativa (japonica
  misc_feature (95)..(312): Homolog of NCBI NO: 34902078 NR Description: unknown protein [Oryza sativa (japonica
  misc_feature (1)..(105): Homolog of NCBI NO: 34902078 NR Description: unknown protein [Oryza sativa (japonica
  misc_feature (1)..(318): Homolog of NCBI NO: 18404516 NR Description: putative zinc finger protein; protein id:
  misc_feature (1)..(318): Homolog of NCBI NO: 15229746 NR Description: unknown protein; protein id: At3g11420.1

SEQ ID NO: 34297 - DNA, 1833 bp, Arabidopsis thaliana; identical to SEQ ID NO: 30707
  misc_feature (1)..(1833): Ceres Seq. ID no. 13509854
  misc_feature: MA Experiment ID: 108434 Result: Down-regulated in Transcription
  misc_feature: MA Experiment 108434 PARAMETER Experiment Name: At_Root_Tips_cDNA_P Parameter: Tissue Value: Root Tips
  misc_feature: MA Experiment ID: 108462 Result: Down-regulated in Transcription
  misc_feature: MA Experiment 108462 PARAMETER Experiment Name: At_Germinating_Seeds_cDNA_P Parameter: Age (day) Value: 2 vs. 0
  misc_feature: MA Experiment 108462 PARAMETER Experiment Name: At_Germinating_Seeds_cDNA_P Parameter: Tissue Value: Germinating Seeds
  misc_feature: MA Experiment ID: 108463 Result: Down-regulated in Transcription
  misc_feature: MA Experiment 108463 PARAMETER Experiment Name: At_Germinating_Seeds_cDNA_P Parameter: Age (day) Value: 3 vs. 0
  misc_feature: MA Experiment 108463 PARAMETER Experiment Name: At_Germinating_Seeds_cDNA_P Parameter: Tissue Value: Germinating Seeds
  misc_feature: MA Experiment ID: 108464 Result: Down-regulated in Transcription
  misc_feature: MA Experiment 108464 PARAMETER Experiment Name: At_Germinating_Seeds_cDNA_P Parameter: Age (day) Value: 4 vs. 0
  misc_feature: MA Experiment 108464 PARAMETER Experiment Name: At_Germinating_Seeds_cDNA_P Parameter: Tissue Value: Germinating Seeds
  misc_feature: MA Experiment ID: 108488 Result: Down-regulated in Transcription
  misc_feature: MA Experiment ID: 108501 Result: Down-regulated in Transcription
  misc_feature: MA Experiment 108501 PARAMETER Experiment Name: At_ap2_floral_buds_cDNA_P Parameter: Plant Line Value: ap2 (Ler.)
  misc_feature: MA Experiment 108501 PARAMETER Experiment Name: At_ap2_floral_buds_cDNA_P Parameter: Tissue Value: Closed Flower
  misc_feature: MA Experiment ID: 108573 Result: Up-regulated in Transcription
  misc_feature: MA Experiment 108573 PARAMETER Experiment Name: At_Drought_cDNA_P Parameter: Timepoint (hr) Value: 6
  misc_feature: MA Experiment 108573 PARAMETER Experiment Name: At_Drought_cDNA_P Parameter: Tissue Value: Aerial
  misc_feature: MA Experiment 108573 PARAMETER Experiment Name: At_Drought_cDNA_P Parameter: Treatment Value: Drought vs. No Drought
  misc_feature: MA Experiment ID: 108605 Result: Up-regulated in Transcription
  misc_feature: MA Experiment 108605 PARAMETER Experiment Name: At_100uM_ABA_cDNA_P Parameter: Timepoint (hr) Value: 6
  misc_feature: MA Experiment 108605 PARAMETER Experiment Name: At_100uM_ABA_cDNA_P Parameter: Tissue Value: Aerial
  misc_feature: MA Experiment 108605 PARAMETER Experiment Name: At_100uM_ABA_cDNA_P Parameter: Treatment Value: 100uM ABA vs. No Treatment
  misc_feature: MA Experiment ID: 20000088 Result: Up-regulated in Transcription
  misc_feature: MA Experiment 20000088 PARAMETER Experiment Name: At_100uM_ABA_Mutants_cDNA_P Parameter: Plant Line Value: Landsberg
  misc_feature: MA Experiment 20000088 PARAMETER Experiment Name: At_100uM_ABA_Mutants_cDNA_P Parameter: Timepoint (hr) Value: 6
  misc_feature: MA Experiment 20000088 PARAMETER Experiment Name: At_100uM_ABA_Mutants_cDNA_P Parameter: Tissue Value: Aerial
  misc_feature: MA Experiment 20000088 PARAMETER Experiment Name: At_100uM_ABA_Mutants_cDNA_P Parameter: Treatment Value: 100uM ABA vs. No Treatment
  misc_feature: MA Experiment ID: 20000184 Result: Down-regulated in Transcription
  misc_feature: MA Experiment 20000184 PARAMETER Experiment Name: At_Shoots__P Parameter: Age (day) Value: 7
  misc_feature: MA Experiment 20000184 PARAMETER Experiment Name: At_Shoots__P Parameter: Tissue Value: Shoots vs. Whole Plant
  misc_feature: MA Experiment ID: 20000264 Result: Up-regulated in Transcription
  misc_feature: MA Experiment 20000264 PARAMETER Experiment Name: At_Open_Flower_P Parameter: Age (day) Value: 21
  misc_feature: MA Experiment 20000264 PARAMETER Experiment Name: At_Open_Flower_P Parameter: Plant Line Value: WS
  misc_feature: MA Experiment 20000264 PARAMETER Experiment Name: At_Open_Flower_P Parameter: Tissue Value: Open Flower vs. Whole Plant
  misc_feature: MA Experiment ID: 20000265 Result: Up-regulated in Transcription
  misc_feature: MA Experiment 20000265 PARAMETER Experiment Name: At_Open_Flower_P Parameter: Age (day) Value: 21
  misc_feature: MA Experiment 20000265 PARAMETER Experiment Name: At_Open_Flower_P Parameter: Plant Line Value: WS
  misc_feature: MA Experiment 20000265 PARAMETER Experiment Name: At_Open_Flower_P Parameter: Tissue Value: Closed Flower vs. Whole Plant
  misc_feature: MA Experiment ID: 20000286 Result: Up-regulated in Transcription
  misc_feature: MA Experiment 20000286 PARAMETER Experiment Name: At_Open_Flower_P Parameter: Age (day) Value: 21
  misc_feature: MA Experiment 20000286 PARAMETER Experiment Name: At_Open_Flower_P Parameter: Plant Line Value: WS
  misc_feature: MA Experiment 20000286 PARAMETER Experiment Name: At_Open_Flower_P Parameter: Tissue Value: Half Open vs. Whole Plant
  misc_feature: MA Experiment ID: 20000438 Result: Down-regulated in Transcription
  misc_feature: MA Experiment 20000438 PARAMETER Experiment Name: At_Shoots__P Parameter: Age (day) Value: 14
  misc_feature: MA Experiment 20000438 PARAMETER Experiment Name: At_Shoots__P Parameter: Tissue Value: Shoots vs. Whole Plant
  misc_feature: MA Experiment ID: 20000794 Result: Up-regulated in Transcription
  misc_feature: MA Experiment 20000794 PARAMETER Experiment Name: At_Petals_P Parameter: Age (day) Value: 23-25 days
  misc_feature: MA Experiment 20000794 PARAMETER Experiment Name: At_Petals_P Parameter: Plant Line Value: WS
  misc_feature: MA Experiment 20000794 PARAMETER Experiment Name: At_Petals_P Parameter: Tissue Value: Petals vs. Whole plant
  misc_feature: MA Experiment ID: 20001248 Result: Down-regulated in Transcription
  misc_feature: MA Experiment 20001248 PARAMETER Experiment Name: At_Far-red-induction_P Parameter: Age (day) Value: 7
  misc_feature: MA Experiment 20001248 PARAMETER Experiment Name: At_Far-red-induction_P Parameter: Light Value: Far-red vs. White
  misc_feature: MA Experiment 20001248 PARAMETER Experiment Name: At_Far-red-induction_P Parameter: Organism Value: A. thaliana
  misc_feature: MA Experiment 20001248 PARAMETER Experiment Name: At_Far-red-induction_P Parameter: Plant Line Value: Columbia
  misc_feature: MA Experiment 20001248 PARAMETER Experiment Name: At_Far-red-induction_P Parameter: Timepoint (hr) Value: 4
  misc_feature: MA Experiment 20001248 PARAMETER Experiment Name: At_Far-red-induction_P Parameter: Tissue Value: Whole Plant
  misc_feature: MA Experiment ID: 20001559 Result: Up-regulated in Transcription
  misc_feature: MA Experiment 20001559 PARAMETER Experiment Name: At_Drought_Soil_Dry_P Parameter: Age (day) Value: 28
  misc_feature: MA Experiment 20001559 PARAMETER Experiment Name: At_Drought_Soil_Dry_P Parameter: Organism Value: A. thaliana
  misc_feature: MA Experiment 20001559 PARAMETER Experiment Name: At_Drought_Soil_Dry_P Parameter: Plant Line Value: WS
  misc_feature: MA Experiment 20001559 PARAMETER Experiment Name: At_Drought_Soil_Dry_P Parameter: Post Timepoint (hr) Value: 29
  misc_feature: MA Experiment 20001559 PARAMETER Experiment Name: At_Drought_Soil_Dry_P Parameter: Post-Treatment Value: Re-Water vs. No Drought
  misc_feature: MA Experiment 20001559 PARAMETER Experiment Name: At_Drought_Soil_Dry_P Parameter: Timepoint (day) Value: 14
  misc_feature: MA Experiment 20001559 PARAMETER Experiment Name: At_Drought_Soil_Dry_P Parameter: Treatment Value: Drought vs. No Drought
  misc_feature: MA Experiment ID: 20001904 Result: Up-regulated in Transcription
  misc_feature: MA Experiment 20001904 PARAMETER Experiment Name: At_Drought_Reproduction_P Parameter: Age (day) Value: 37
  misc_feature: MA Experiment 20001904 PARAMETER Experiment Name: At_Drought_Reproduction_P Parameter: Organism Value: A. thaliana
  misc_feature: MA Experiment 20001904 PARAMETER Experiment Name: At_Drought_Reproduction_P Parameter: Plant Line Value: WS
  misc_feature: MA Experiment 20001904 PARAMETER Experiment Name: At_Drought_Reproduction_P Parameter: Timepoint (day) Value: 7
  misc_feature: MA Experiment 20001904 PARAMETER Experiment Name: At_Drought_Reproduction_P Parameter: Tissue Value: Rosettes
  misc_feature: MA Experiment 20001904 PARAMETER Experiment Name: At_Drought_Reproduction_P Parameter: Treatment Value: Drought vs. No Drought
  misc_feature: MA Experiment ID: 20001905 Result: Up-regulated in Transcription
  misc_feature: MA Experiment 20001905 PARAMETER Experiment Name: At_Drought_Reproduction_P Parameter: Age (day) Value: 40
  misc_feature: MA Experiment 20001905 PARAMETER Experiment Name: At_Drought_Reproduction_P Parameter: Organism Value: A. thaliana
  misc_feature: MA Experiment 20001905 PARAMETER Experiment Name: At_Drought_Reproduction_P Parameter: Plant Line Value: WS
  misc_feature: MA Experiment 20001905 PARAMETER Experiment Name: At_Drought_Reproduction_P Parameter: Timepoint (day) Value: 10
  misc_feature: MA Experiment 20001905 PARAMETER Experiment Name: At_Drought_Reproduction_P Parameter: Tissue Value: Rosettes
  misc_feature: MA Experiment 20001905 PARAMETER Experiment Name: At_Drought_Reproduction_P Parameter: Treatment Value: Drought vs. No Drought
  misc_feature: MA Experiment ID: 20001906 Result: Up-regulated in Transcription
  misc_feature: MA Experiment 20001906 PARAMETER Experiment Name: At_Drought_Reproduction_P Parameter: Age (day) Value: 35
  misc_feature: MA Experiment 20001906 PARAMETER Experiment Name: At_Drought_Reproduction_P Parameter: Organism Value: A. thaliana
  misc_feature: MA Experiment 20001906 PARAMETER Experiment Name: At_Drought_Reproduction_P Parameter: Plant Line Value: WS
  misc_feature: MA Experiment 20001906 PARAMETER Experiment Name: At_Drought_Reproduction_P Parameter: Timepoint (day) Value: 5
  misc_feature: MA Experiment 20001906 PARAMETER Experiment Name: At_Drought_Reproduction_P Parameter: Tissue Value: Siliques
  misc_feature: MA Experiment 20001906 PARAMETER Experiment Name: At_Drought_Reproduction_P Parameter: Treatment Value: Drought vs. No Drought
  misc_feature: MA Experiment ID: 20001908 Result: Up-regulated in Transcription
  misc_feature: MA Experiment 20001908 PARAMETER Experiment Name: At_Drought_Reproduction_P Parameter: Age (day) Value: 40
  misc_feature: MA Experiment 20001908 PARAMETER Experiment Name: At_Drought_Reproduction_P Parameter: Organism Value: A. thaliana
  misc_feature: MA Experiment 20001908 PARAMETER Experiment Name: At_Drought_Reproduction_P Parameter: Plant Line Value: WS
  misc_feature: MA Experiment 20001908 PARAMETER Experiment Name: At_Drought_Reproduction_P Parameter: Timepoint (day) Value: 10
  misc_feature: MA Experiment 20001908 PARAMETER Experiment Name: At_Drought_Reproduction_P Parameter: Tissue Value: Siliques
  misc_feature: MA Experiment 20001908 PARAMETER Experiment Name: At_Drought_Reproduction_P Parameter: Treatment Value: Drought vs. No Drought

SEQ ID NO: 34298 - protein, 510 aa, Arabidopsis thaliana; identical to SEQ ID NO: 30708
  peptide (1)..(510): Ceres Seq. ID no. 13509855
  misc_feature (33)..(500): Homolog of NCBI NO: 115874 NR Description: Serine carboxypeptidase III precursor (CP-WIII)
  misc_feature (33)..(500): Homolog of NCBI NO: 82620 NR Description: carboxypeptidase C (EC 3.4.16.5) precursor - wheat
  misc_feature (25)..(505): Homolog of NCBI NO: 6960455 NR Description: serine carboxypeptidase precursor [Matricaria
  misc_feature (14)..(501): Homolog of NCBI NO: 21901929 NR Description: carboxypeptidase type III [Theobroma cacao]
  misc_feature (4)..(500): Homolog of NCBI NO: 15228281 NR Description: serine carboxypeptidase III, putative
  misc_feature (4)..(500): Homolog of NCBI NO: 166674 NR Description: carboxypeptidase Y-like protein
  misc_feature (11)..(501): Homolog of NCBI NO: 18447763 NR Description: putative serine carboxypeptidase precursor
  misc_feature (1)..(502): Homolog of NCBI NO: 15237178 NR Description: serine carboxypeptidase III, putative
  misc_feature (1)..(510): Homolog of NCBI NO: 16323071 NR Description: AT3g45010/F14D17_80 [Arabidopsis thaliana]
  misc_feature (1)..(510): Homolog of NCBI NO: 15230577 NR Description: serine carboxypeptidase III, putative
  misc_feature (33)..(500): Homolog of NCBI NO: 115874 NR Description: Serine carboxypeptidase III precursor (CP-WIII)
  misc_feature (33)..(500): Homolog of NCBI NO: 82620 NR Description: carboxypeptidase C (EC 3.4.16.5) precursor - wheat
  misc_feature (25)..(505): Homolog of NCBI NO: 6960455 NR Description: serine carboxypeptidase precursor [Matricaria
  misc_feature (14)..(501): Homolog of NCBI NO: 21901929 NR Description: carboxypeptidase type III [Theobroma cacao]
  misc_feature (4)..(500): Homolog of NCBI NO: 15228281 NR Description: serine carboxypeptidase III, putative
  misc_feature (4)..(500): Homolog of NCBI NO: 166674 NR Description: carboxypeptidase Y-like protein
  misc_feature (11)..(501): Homolog of NCBI NO: 18447763 NR Description: putative serine carboxypeptidase precursor
  misc_feature (1)..(502): Homolog of NCBI NO: 15237178 NR Description: serine carboxypeptidase III, putative
  misc_feature (1)..(510): Homolog of NCBI NO: 16323071 NR Description: AT3g45010/F14D17_80 [Arabidopsis thaliana]
  misc_feature (1)..(510): Homolog of NCBI NO: 15230577 NR Description: serine carboxypeptidase III, putative
  misc_feature (33)..(500): Homolog of NCBI NO: 115874 NR Description: Serine carboxypeptidase III precursor (CP-WIII)
  misc_feature (33)..(500): Homolog of NCBI NO: 82620 NR Description: carboxypeptidase C (EC 3.4.16.5) precursor - wheat
  misc_feature (25)..(505): Homolog of NCBI NO: 6960455 NR Description: serine carboxypeptidase precursor [Matricaria
  misc_feature (14)..(501): Homolog of NCBI NO: 21901929 NR Description: carboxypeptidase type III [Theobroma cacao]
  misc_feature (4)..(500): Homolog of NCBI NO: 15228281 NR Description: serine carboxypeptidase III, putative
  misc_feature (4)..(500): Homolog of NCBI NO: 166674 NR Description: carboxypeptidase Y-like protein
  misc_feature (11)..(501): Homolog of NCBI NO: 18447763 NR Description: putative serine carboxypeptidase precursor
  misc_feature (1)..(502): Homolog of NCBI NO: 15237178 NR Description: serine carboxypeptidase III, putative
  misc_feature (1)..(510): Homolog of NCBI NO: 16323071 NR Description: AT3g45010/F14D17_80 [Arabidopsis thaliana]
  misc_feature (1)..(510): Homolog of NCBI NO: 15230577 NR Description: serine carboxypeptidase III, putative

SEQ ID NO: 34299 - protein, 455 aa, Arabidopsis thaliana; identical to SEQ ID NO: 30709
  peptide (1)..(455): Ceres Seq. ID no. 13509856
  misc_feature (1)..(445): Homolog of NCBI NO: 115874 NR Description: Serine carboxypeptidase III precursor (CP-WIII)
  misc_feature (1)..(445): Homolog of NCBI NO: 82620 NR Description: carboxypeptidase C (EC 3.4.16.5) precursor - wheat
  misc_feature (1)..(450): Homolog of NCBI NO: 6960455 NR Description: serine carboxypeptidase precursor [Matricaria
  misc_feature (1)..(446): Homolog of NCBI NO: 21901929 NR Description: carboxypeptidase type III [Theobroma cacao]
  misc_feature (1)..(445): Homolog of NCBI NO: 15228281 NR Description: serine carboxypeptidase III, putative
  misc_feature (1)..(445): Homolog of NCBI NO: 166674 NR Description: carboxypeptidase Y-like protein
  misc_feature (1)..(446): Homolog of NCBI NO: 18447763 NR Description: putative serine carboxypeptidase precursor
  misc_feature (1)..(447): Homolog of NCBI NO: 15237178 NR Description: serine carboxypeptidase III, putative
  misc_feature (1)..(455): Homolog of NCBI NO: 16323071 NR Description: AT3g45010/F14D17_80 [Arabidopsis thaliana]
  misc_feature (1)..(455): Homolog of NCBI NO: 15230577 NR Description: serine carboxypeptidase III, putative
  misc_feature (1)..(445): Homolog of NCBI NO: 115874 NR Description: Serine carboxypeptidase III precursor (CP-WIII)
  misc_feature (1)..(445): Homolog of NCBI NO: 82620 NR Description: carboxypeptidase C (EC 3.4.16.5) precursor - wheat
  misc_feature (1)..(450): Homolog of NCBI NO: 6960455 NR Description: serine carboxypeptidase precursor [Matricaria
  misc_feature (1)..(446): Homolog of NCBI NO: 21901929 NR Description: carboxypeptidase type III [Theobroma cacao]
  misc_feature (1)..(445): Homolog of NCBI NO: 15228281 NR Description: serine carboxypeptidase III, putative
  misc_feature (1)..(445): Homolog of NCBI NO: 166674 NR Description: carboxypeptidase Y-like protein
  misc_feature (1)..(446): Homolog of NCBI NO: 18447763 NR Description: putative serine carboxypeptidase precursor
  misc_feature (1)..(447): Homolog of NCBI NO: 15237178 NR Description: serine carboxypeptidase III, putative
  misc_feature (1)..(455): Homolog of NCBI NO: 16323071 NR Description: AT3g45010/F14D17_80 [Arabidopsis thaliana]
  misc_feature (1)..(455): Homolog of NCBI NO: 15230577 NR Description: serine carboxypeptidase III, putative
  misc_feature (1)..(445): Homolog of NCBI NO: 115874 NR Description: Serine carboxypeptidase III precursor (CP-WIII)
  misc_feature (1)..(445): Homolog of NCBI NO: 82620 NR Description: carboxypeptidase C (EC 3.4.16.5) precursor - wheat
  misc_feature (1)..(450): Homolog of NCBI NO: 6960455 NR Description: serine carboxypeptidase precursor [Matricaria
  misc_feature (1)..(446): Homolog of NCBI NO: 21901929 NR Description: carboxypeptidase type III [Theobroma cacao]
  misc_feature (1)..(445): Homolog of NCBI NO: 15228281 NR Description: serine carboxypeptidase III, putative
  misc_feature (1)..(445): Homolog of NCBI NO: 166674 NR Description: carboxypeptidase Y-like protein
  misc_feature (1)..(446): Homolog of NCBI NO: 18447763 NR Description: putative serine carboxypeptidase precursor
  misc_feature (1)..(447): Homolog of NCBI NO: 15237178 NR Description: serine carboxypeptidase III, putative
  misc_feature (1)..(455): Homolog of NCBI NO: 16323071 NR Description: AT3g45010/F14D17_80 [Arabidopsis thaliana]
  misc_feature (1)..(455): Homolog of NCBI NO: 15230577 NR Description: serine carboxypeptidase III, putative

SEQ ID NO: 34300 - protein, 395 aa, Arabidopsis thaliana; identical to SEQ ID NO: 30710
  peptide (1)..(395): Ceres Seq. ID no. 13509857
  misc_feature (1)..(385): Homolog of NCBI NO: 115874 NR Description: Serine carboxypeptidase III precursor (CP-WIII)
  misc_feature (1)..(385): Homolog of NCBI NO: 82620 NR Description: carboxypeptidase C (EC 3.4.16.5) precursor - wheat
  misc_feature (1)..(390): Homolog of NCBI NO: 6960455 NR Description: serine carboxypeptidase precursor [Matricaria
  misc_feature (1)..(386): Homolog of NCBI NO: 21901929 NR Description: carboxypeptidase type III [Theobroma cacao]
  misc_feature (1)..(385): Homolog of NCBI NO: 15228281 NR Description: serine carboxypeptidase III, putative
  misc_feature (1)..(385): Homolog of NCBI NO: 166674 NR Description: carboxypeptidase Y-like protein
  misc_feature (1)..(386): Homolog of NCBI NO: 18447763 NR Description: putative serine carboxypeptidase precursor
  misc_feature (1)..(387): Homolog of NCBI NO: 15237178 NR Description: serine carboxypeptidase III, putative
  misc_feature (1)..(395): Homolog of NCBI NO: 16323071 NR Description: AT3g45010/F14D17_80 [Arabidopsis thaliana]
  misc_feature (1)..(395): Homolog of NCBI NO: 15230577 NR Description: serine carboxypeptidase III, putative
  misc_feature (1)..(385): Homolog of NCBI NO: 115874 NR Description: Serine carboxypeptidase III precursor (CP-WIII)
  misc_feature (1)..(385): Homolog of NCBI NO: 82620 NR Description: carboxypeptidase C (EC 3.4.16.5) precursor - wheat
  misc_feature (1)..(390): Homolog of NCBI NO: 6960455 NR Description: serine carboxypeptidase precursor [Matricaria
  misc_feature (1)..(386): Homolog of NCBI NO: 21901929 NR Description: carboxypeptidase type III [Theobroma cacao]
  misc_feature (1)..(385): Homolog of NCBI NO: 15228281 NR Description: serine carboxypeptidase III, putative
  misc_feature (1)..(385): Homolog of NCBI NO: 166674 NR Description: carboxypeptidase Y-like protein
  misc_feature (1)..(386): Homolog of NCBI NO: 18447763 NR Description: putative serine carboxypeptidase precursor
  misc_feature (1)..(387): Homolog of NCBI NO: 15237178 NR Description: serine carboxypeptidase III, putative
  misc_feature (1)..(395): Homolog of NCBI NO: 16323071 NR Description: AT3g45010/F14D17_80 [Arabidopsis thaliana]
  misc_feature (1)..(395): Homolog of NCBI NO: 15230577 NR Description: serine carboxypeptidase III, putative
  misc_feature (1)..(385): Homolog of NCBI NO: 115874 NR Description: Serine carboxypeptidase III precursor (CP-WIII)
  misc_feature (1)..(385): Homolog of NCBI NO: 82620 NR Description: carboxypeptidase C (EC 3.4.16.5) precursor - wheat
  misc_feature (1)..(390): Homolog of NCBI NO: 6960455 NR Description: serine carboxypeptidase precursor [Matricaria
  misc_feature (1)..(386): Homolog of NCBI NO: 21901929 NR Description: carboxypeptidase type III [Theobroma cacao]
  misc_feature (1)..(385): Homolog of NCBI NO: 15228281 NR Description: serine carboxypeptidase III, putative
  misc_feature (1)..(385): Homolog of NCBI NO: 166674 NR Description: carboxypeptidase Y-like protein
  misc_feature (1)..(386): Homolog of NCBI NO: 18447763 NR Description: putative serine carboxypeptidase precursor
  misc_feature (1)..(387): Homolog of NCBI NO: 15237178 NR Description: serine carboxypeptidase III, putative
  misc_feature (1)..(395): Homolog of NCBI NO: 16323071 NR Description: AT3g45010/F14D17_80 [Arabidopsis thaliana]
  misc_feature (1)..(395): Homolog of NCBI NO: 15230577 NR Description: serine carboxypeptidase III, putative

SEQ ID NO: 34301 - DNA, 1221 bp, Arabidopsis thaliana; identical to SEQ ID NO: 30711
  misc_feature (1)..(1221): Ceres Seq. ID no. 13490421
  misc_feature: MA Experiment ID: 108488 Result: Down-regulated in Transcription
  misc_feature: MA Experiment ID: 108573 Result: Up-regulated in Transcription
  misc_feature: MA Experiment 108573 PARAMETER Experiment Name: At_Drought_cDNA_P Parameter: Timepoint (hr) Value: 6
  misc_feature: MA Experiment 108573 PARAMETER Experiment Name: At_Drought_cDNA_P Parameter: Tissue Value: Aerial
  misc_feature: MA Experiment 108573 PARAMETER Experiment Name: At_Drought_cDNA_P Parameter: Treatment Value: Drought vs. No Drought
  misc_feature: MA Experiment ID: 108585 Result: Up-regulated in Transcription
  misc_feature: MA Experiment 108585 PARAMETER Experiment Name: At_5mM_NaNP_cDNA_P Parameter: Timepoint (hr) Value: 6
  misc_feature: MA Experiment 108585 PARAMETER Experiment Name: At_5mM_NaNP_cDNA_P Parameter: Tissue Value: Aerial
  misc_feature: MA Experiment 108585 PARAMETER Experiment Name: At_5mM_NaNP_cDNA_P Parameter: Treatment Value: null
  misc_feature: MA Experiment ID: 108668 Result: Up-regulated in Transcription
  misc_feature: MA Experiment 108668 PARAMETER Experiment Name: At_2mM_SA_cDNA_P Parameter: Plant Line Value: WS
  misc_feature: MA Experiment 108668 PARAMETER Experiment Name: At_2mM_SA_cDNA_P Parameter: Timepoint (hr) Value: 6
  misc_feature: MA Experiment 108668 PARAMETER Experiment Name: At_2mM_SA_cDNA_P Parameter: Treatment Value: 2mM SA vs. No Treatment
  misc_feature: MA Experiment ID: 20000113 Result: Down-regulated in Transcription
  misc_feature: MA Experiment 20000113 PARAMETER Experiment Name: At_42deg_Heat_cDNA_P Parameter: Temperature (deg C) Value: 42 vs. 22
  misc_feature: MA Experiment 20000113 PARAMETER Experiment Name: At_42deg_Heat_cDNA_P Parameter: Timepoint (hr) Value: 8
  misc_feature: MA Experiment 20000113 PARAMETER Experiment Name: At_42deg_Heat_cDNA_P Parameter: Tissue Value: Aerial
  misc_feature: MA Experiment ID: 20000182 Result: Up-regulated in Transcription
  misc_feature: MA Experiment 20000182 PARAMETER Experiment Name: At_2mM_SA_P Parameter: Age (day) Value: 14
  misc_feature: MA Experiment 20000182 PARAMETER Experiment Name: At_2mM_SA_P Parameter: Organism Value: A. thaliana
  misc_feature: MA Experiment 20000182 PARAMETER Experiment Name: At_2mM_SA_P Parameter: Plant Line Value: WS
  misc_feature: MA Experiment 20000182 PARAMETER Experiment Name: At_2mM_SA_P Parameter: Timepoint (hr) Value: 6
  misc_feature: MA Experiment 20000182 PARAMETER Experiment Name: At_2mM_SA_P Parameter: Tissue Value: Aerial
  misc_feature: MA Experiment 20000182 PARAMETER Experiment Name: At_2mM_SA_P Parameter: Treatment Value: 2mM SA vs. No Treatment
  misc_feature: MA Experiment ID: 20000227 Result: Down-regulated in Transcription
  misc_feature: MA Experiment 20000227 PARAMETER Experiment Name: At_Root-Tips-vs-Tops_P Parameter: Tissue Value: Root Tips vs. Root Tops
  misc_feature: MA Experiment ID: 20000437 Result: Up-regulated in Transcription
  misc_feature: MA Experiment 20000437 PARAMETER Experiment Name: At_Drought_P Parameter: Age (day) Value: 8
  misc_feature: MA Experiment 20000437 PARAMETER Experiment Name: At_Drought_P Parameter: Organism Value: A. thaliana
  misc_feature: MA Experiment 20000437 PARAMETER Experiment Name: At_Drought_P Parameter: Plant Line Value: WS
  misc_feature: MA Experiment 20000437 PARAMETER Experiment Name: At_Drought_P Parameter: Timepoint (hr) Value: 24
  misc_feature: MA Experiment 20000437 PARAMETER Experiment Name: At_Drought_P Parameter: Tissue Value: Whole Plant
  misc_feature: MA Experiment 20000437 PARAMETER Experiment Name: At_Drought_P Parameter: Treatment Value: Drought vs. No Drought

SEQ ID NO: 34302 - protein, 209 aa, Arabidopsis thaliana; identical to SEQ ID NO: 30712
  peptide (1)..(209): Ceres Seq. ID no. 13490422
  misc_feature (1)..(175): Homolog of NCBI NO: 34908286 NR Description: P0005H10.15 [Oryza sativa (japonica
  misc_feature (1)..(209): Homolog of NCBI NO: 22330987 NR Description: CHP-rich zinc finger protein -related
  misc_feature (1)..(209): Homolog of NCBI NO: 18087519 NR Description: At3g11395 [Arabidopsis thaliana]
  misc_feature (1)..(209): Homolog of NCBI NO: 30681215 NR Description: prenylated rab acceptor (PRA1) family
  misc_feature (1)..(161): Homolog of NCBI NO: 15810043 NR Description: AT5g02040/T7H20_90 [Arabidopsis thaliana]
  misc_feature (1)..(209): Homolog of NCBI NO: 21553976 NR Description: unknown [Arabidopsis thaliana]
  misc_feature (1)..(209): Homolog of NCBI NO: 15241668 NR Description: expressed protein [Arabidopsis thaliana]

SEQ ID NO: 34303 - protein, 149 aa, Arabidopsis thaliana; identical to SEQ ID NO: 30713
  peptide (1)..(149): Ceres Seq. ID no. 13490423
  misc_feature (1)..(115): Homolog of NCBI NO: 34908286 NR Description: P0005H10.15 [Oryza sativa (japonica
  misc_feature (1)..(149): Homolog of NCBI NO: 22330987 NR Description: CHP-rich zinc finger protein -related
  misc_feature (1)..(149): Homolog of NCBI NO: 18087519 NR Description: At3g11395 [Arabidopsis thaliana]
  misc_feature (1)..(149): Homolog of NCBI NO: 30681215 NR Description: prenylated rab acceptor (PRA1) family
  misc_feature (1)..(101): Homolog of NCBI NO: 15810043 NR Description: AT5g02040/T7H20_90 [Arabidopsis thaliana]
  misc_feature (1)..(149): Homolog of NCBI NO: 21553976 NR Description: unknown [Arabidopsis thaliana]
  misc_feature (1)..(149): Homolog of NCBI NO: 15241668 NR Description: expressed protein [Arabidopsis thaliana]

SEQ ID NO: 34304 - DNA, 679 bp, Arabidopsis thaliana; identical to SEQ ID NO: 30714
  misc_feature (1)..(679): Ceres Seq. ID no. 12321380
  misc_feature: MA Experiment ID: 108434 Result: Up-regulated in Transcription
  misc_feature: MA Experiment 108434 PARAMETER Experiment Name: At_Root_Tips_cDNA_P Parameter: Tissue Value: Root Tips
  misc_feature: MA Experiment ID: 108462 Result: Down-regulated in Transcription
  misc_feature: MA Experiment 108462 PARAMETER Experiment Name: At_Germinating_Seeds_cDNA_P Parameter: Age (day) Value: 2 vs. 0
  misc_feature: MA Experiment 108462 PARAMETER Experiment Name: At_Germinating_Seeds_cDNA_P Parameter: Tissue Value: Germinating Seeds
  misc_feature: MA Experiment ID: 108463 Result: Down-regulated in Transcription
  misc_feature: MA Experiment 108463 PARAMETER Experiment Name: At_Germinating_Seeds_cDNA_P Parameter: Age (day) Value: 3 vs. 0
  misc_feature: MA Experiment 108463 PARAMETER Experiment Name: At_Germinating_Seeds_cDNA_P Parameter: Tissue Value: Germinating Seeds
  misc_feature: MA Experiment ID: 108464 Result: Down-regulated in Transcription
  misc_feature: MA Experiment 108464 PARAMETER Experiment Name: At_Germinating_Seeds_cDNA_P Parameter: Age (day) Value: 4 vs. 0
  misc_feature: MA Experiment 108464 PARAMETER Experiment Name: At_Germinating_Seeds_cDNA_P Parameter: Tissue Value: Germinating Seeds
  misc_feature: MA Experiment ID: 20000496 Result: Up-regulated in Transcription
  misc_feature: MA Experiment 20000496 PARAMETER Experiment Name: At_Guard_Cells_P Parameter: Harvest Date Value: 7/19/2002
  misc_feature: MA Experiment 20000496 PARAMETER Experiment Name: At_Guard_Cells_P Parameter: Organism Value: Canola
  misc_feature: MA Experiment 20000496 PARAMETER Experiment Name: At_Guard_Cells_P Parameter: Tissue Value: Guard Cells vs. Leaves
  misc_feature: MA Experiment ID: 20000794 Result: Down-regulated in Transcription
  misc_feature: MA Experiment 20000794 PARAMETER Experiment Name: At_Petals_P Parameter: Age (day) Value: 23-25 days
  misc_feature: MA Experiment 20000794 PARAMETER Experiment Name: At_Petals_P Parameter: Plant Line Value: WS
  misc_feature: MA Experiment 20000794 PARAMETER Experiment Name: At_Petals_P Parameter: Tissue Value: Petals vs. Whole plant
  misc_feature: MA Experiment ID: 20001557 Result: Up-regulated in Transcription
  misc_feature: MA Experiment 20001557 PARAMETER Experiment Name: At_Drought_Soil_Dry_P Parameter: Age (day) Value: 27
  misc_feature: MA Experiment 20001557 PARAMETER Experiment Name: At_Drought_Soil_Dry_P Parameter: Organism Value: A. thaliana
  misc_feature: MA Experiment 20001557 PARAMETER Experiment Name: At_Drought_Soil_Dry_P Parameter: Plant Line Value: WS
  misc_feature: MA Experiment 20001557 PARAMETER Experiment Name: At_Drought_Soil_Dry_P Parameter: Post Timepoint (hr) Value: 3
  misc_feature: MA Experiment 20001557 PARAMETER Experiment Name: At_Drought_Soil_Dry_P Parameter: Post-Treatment Value: Re-Water vs. No Drought
  misc_feature: MA Experiment 20001557 PARAMETER Experiment Name: At_Drought_Soil_Dry_P Parameter: Timepoint (day) Value: 13
  misc_feature: MA Experiment 20001557 PARAMETER Experiment Name: At_Drought_Soil_Dry_P Parameter: Treatment Value: Drought vs. No Drought
  misc_feature: MA Experiment ID: 20001558 Result: Up-regulated in Transcription
  misc_feature: MA Experiment 20001558 PARAMETER Experiment Name: At_Drought_Soil_Dry_P Parameter: Age (day) Value: 27
  misc_feature: MA Experiment 20001558 PARAMETER Experiment Name: At_Drought_Soil_Dry_P Parameter: Organism Value: A. thaliana
  misc_feature: MA Experiment 20001558 PARAMETER Experiment Name: At_Drought_Soil_Dry_P Parameter: Plant Line Value: WS
  misc_feature: MA Experiment 20001558 PARAMETER Experiment Name: At_Drought_Soil_Dry_P Parameter: Post Timepoint (hr) Value: 6
  misc_feature: MA Experiment 20001558 PARAMETER Experiment Name: At_Drought_Soil_Dry_P Parameter: Post-Treatment Value: Re-Water vs. No Drought
  misc_feature: MA Experiment 20001558 PARAMETER Experiment Name: At_Drought_Soil_Dry_P Parameter: Timepoint (day) Value: 13
  misc_feature: MA Experiment 20001558 PARAMETER Experiment Name: At_Drought_Soil_Dry_P Parameter: Treatment Value: Drought vs. No Drought

SEQ ID NO: 34305 - protein, 146 aa, Arabidopsis thaliana; identical to SEQ ID NO: 30715
  peptide (1)..(146): Ceres Seq. ID no. 12321381
  misc_feature (14)..(146): Pfam Name: Ribosomal protein S9/S16 Pfam Description: Ribosomal protein S9/S16
  misc_feature (5)..(146): Homolog of NCBI NO: 15294045 NR Description: 40S ribosomal protein S16 [Ictalurus punctatus]
  misc_feature (1)..(146): Homolog of NCBI NO: 4506691 NR Description: ribosomal protein S16; 40S ribosomal protein S16
  misc_feature (1)..(146): Homolog of NCBI NO: 39850096 NR Description: Unknown (protein for IMAGE:6887619) [Rattus
  misc_feature (6)..(146): Homolog of NCBI NO: 17369864 NR Description: 40S ribosomal protein S16
  misc_feature (4)..(146): Homolog of NCBI NO: 1173209 NR Description: 40S RIBOSOMAL PROTEIN S16
  misc_feature (2)..(146): Homolog of NCBI NO: 6984222 NR Description: 40S ribosomal protein S16 [Euphorbia esula]
  misc_feature (1)..(146): Homolog of NCBI NO: 3122800 NR Description: 40S RIBOSOMAL PROTEIN S16
  misc_feature (1)..(146): Homolog of NCBI NO: 15226676 NR Description: 40S ribosomal protein S16
  misc_feature (1)..(146): Homolog of NCBI NO: 15238809 NR Description: 40S RIBOSOMAL PROTEIN S16
  misc_feature (1)..(146): Homolog of NCBI NO: 15229252 NR Description: putative 40S ribosomal protein S16; protein id:

SEQ ID NO: 34306 - protein, 116 aa, Arabidopsis thaliana; identical to SEQ ID NO: 30716
  peptide (1)..(116): Ceres Seq. ID no. 12321382
  misc_feature (1)..(116): Pfam Name: Ribosomal protein S9/S16 Pfam Description: Ribosomal protein S9/S16
  misc_feature (1)..(116): Homolog of NCBI NO: 15294045 NR Description: 40S ribosomal protein S16 [Ictalurus punctatus]
  misc_feature (1)..(116): Homolog of NCBI NO: 4506691 NR Description: ribosomal protein S16; 40S ribosomal protein S16
  misc_feature (1)..(116): Homolog of NCBI NO: 39850096 NR Description: Unknown (protein for IMAGE:6887619) [Rattus
  misc_feature (1)..(116): Homolog of NCBI NO: 17369864 NR Description: 40S ribosomal protein S16
  misc_feature (1)..(116): Homolog of NCBI NO: 1173209 NR Description: 40S RIBOSOMAL PROTEIN S16
  misc_feature (1)..(116): Homolog of NCBI NO: 6984222 NR Description: 40S ribosomal protein S16 [Euphorbia esula]
  misc_feature (1)..(116): Homolog of NCBI NO: 3122800 NR Description: 40S RIBOSOMAL PROTEIN S16
  misc_feature (1)..(116): Homolog of NCBI NO: 15226676 NR Description: 40S ribosomal protein S16
  misc_feature (1)..(116): Homolog of NCBI NO: 15238809 NR Description: 40S RIBOSOMAL PROTEIN S16
  misc_feature (1)..(116): Homolog of NCBI NO: 15229252 NR Description: putative 40S ribosomal protein S16; protein id:

SEQ ID NO: 34307 - protein, 79 aa, Arabidopsis thaliana; identical to SEQ ID NO: 30717
  peptide (1)..(79): Ceres Seq. ID no. 12321383
  misc_feature (1)..(79): Pfam Name: Ribosomal protein S9/S16 Pfam Description: Ribosomal protein S9/S16
  misc_feature (1)..(79): Homolog of NCBI NO: 15294045 NR Description: 40S ribosomal protein S16 [Ictalurus punctatus]
  misc_feature (1)..(79): Homolog of NCBI NO: 4506691 NR Description: ribosomal protein S16; 40S ribosomal protein S16
  misc_feature (1)..(79): Homolog of NCBI NO: 39850096 NR Description: Unknown (protein for IMAGE:6887619) [Rattus
  misc_feature (1)..(79): Homolog of NCBI NO: 17369864 NR Description: 40S ribosomal protein S16
  misc_feature (1)..(79): Homolog of NCBI NO: 1173209 NR Description: 40S RIBOSOMAL PROTEIN S16
  misc_feature (1)..(79): Homolog of NCBI NO: 6984222 NR Description: 40S ribosomal protein S16 [Euphorbia esula]
  misc_feature (1)..(79): Homolog of NCBI NO: 3122800 NR Description: 40S RIBOSOMAL PROTEIN S16
  misc_feature (1)..(79): Homolog of NCBI NO: 15226676 NR Description: 40S ribosomal protein S16
  misc_feature (1)..(79): Homolog of NCBI NO: 15238809 NR Description: 40S RIBOSOMAL PROTEIN S16
  misc_feature (1)..(79): Homolog of NCBI NO: 15229252 NR Description: putative 40S ribosomal protein S16; protein id:

SEQ ID NO: 34308 - DNA, 738 bp, Arabidopsis thaliana; identical to SEQ ID NO: 30718
  misc_feature (1)..(738): Ceres Seq. ID no. 12326890
  misc_feature: MA Experiment ID: 108434 Result: Down-regulated in Transcription
  misc_feature: MA Experiment 108434 PARAMETER Experiment Name: At_Root_Tips_cDNA_P Parameter: Tissue Value: Root Tips
  misc_feature: MA Experiment ID: 108461 Result: Up-regulated in Transcription
  misc_feature: MA Experiment 108461 PARAMETER Experiment Name: At_Germinating_Seeds_cDNA_P Parameter: Age (day) Value: 1 vs. 0
  misc_feature: MA Experiment 108461 PARAMETER Experiment Name: At_Germinating_Seeds_cDNA_P Parameter: Tissue Value: Germinating Seeds
  misc_feature: MA Experiment ID: 108462 Result: Up-regulated in Transcription
  misc_feature: MA Experiment 108462 PARAMETER Experiment Name: At_Germinating_Seeds_cDNA_P Parameter: Age (day) Value: 2 vs. 0
  misc_feature: MA Experiment 108462 PARAMETER Experiment Name: At_Germinating_Seeds_cDNA_P Parameter: Tissue Value: Germinating Seeds
  misc_feature: MA Experiment ID: 20000117 Result: Down-regulated in Transcription
  misc_feature: MA Experiment 20000117 PARAMETER Experiment Name: At_100uM_ABA_Mutants_cDNA_P Parameter: Plant Line Value: Columbia
  misc_feature: MA Experiment 20000117 PARAMETER Experiment Name: At_100uM_ABA_Mutants_cDNA_P Parameter: Timepoint (hr) Value: 6
  misc_feature: MA Experiment 20000117 PARAMETER Experiment Name: At_100uM_ABA_Mutants_cDNA_P Parameter: Tissue Value: Aerial
  misc_feature: MA Experiment 20000117 PARAMETER Experiment Name: At_100uM_ABA_Mutants_cDNA_P Parameter: Treatment Value: 100uM ABA vs. No Treatment
  misc_feature: MA Experiment ID: 20000179 Result: Up-regulated in Transcription
  misc_feature: MA Experiment 20000179 PARAMETER Experiment Name: At_Germinating_Seeds_P Parameter: Age (hr) Value: 6 vs. 0
  misc_feature: MA Experiment 20000179 PARAMETER Experiment Name: At_Germinating_Seeds_P Parameter: Tissue Value: Germinating Seeds
  misc_feature: MA Experiment ID: 20000180 Result: Up-regulated in Transcription
  misc_feature: MA Experiment 20000180 PARAMETER Experiment Name: At_Germinating_Seeds_P Parameter: Age (hr) Value: 24 vs. 0
  misc_feature: MA Experiment 20000180 PARAMETER Experiment Name: At_Germinating_Seeds_P Parameter: Tissue Value: Germinating Seeds
  misc_feature: MA Experiment ID: 20000185 Result: Up-regulated in Transcription
  misc_feature: MA Experiment 20000185 PARAMETER Experiment Name: At_Roots__P Parameter: Age (day) Value: 7 vs. 21
  misc_feature: MA Experiment 20000185 PARAMETER Experiment Name: At_Roots__P Parameter: Organism Value: A. thaliana
  misc_feature: MA Experiment 20000185 PARAMETER Experiment Name: At_Roots__P Parameter: Tissue Value: Roots vs. Whole Plant
  misc_feature: MA Experiment ID: 20000224 Result: Down-regulated in Transcription
  misc_feature: MA Experiment ID: 20000234 Result: Up-regulated in Transcription
  misc_feature: MA Experiment 20000234 PARAMETER Experiment Name: At_Siliques_P Parameter: Age (day) Value: 21
  misc_feature: MA Experiment 20000234 PARAMETER Experiment Name: At_Siliques_P Parameter: Organism Value: A. thaliana
  misc_feature: MA Experiment 20000234 PARAMETER Experiment Name: At_Siliques_P Parameter: Plant Line Value: WS
  misc_feature: MA Experiment 20000234 PARAMETER Experiment Name: At_Siliques_P Parameter: Tissue Value: Less Than 5mm Siliques vs. Whole Plant
  misc_feature: MA Experiment ID: 20000235 Result: Up-regulated in Transcription
  misc_feature: MA Experiment 20000235 PARAMETER Experiment Name: At_Siliques_P Parameter: Age (day) Value: 21
  misc_feature: MA Experiment 20000235 PARAMETER Experiment Name: At_Siliques_P Parameter: Organism Value: A. thaliana
  misc_feature: MA Experiment 20000235 PARAMETER Experiment Name: At_Siliques_P Parameter: Plant Line Value: WS
  misc_feature: MA Experiment 20000235 PARAMETER Experiment Name: At_Siliques_P Parameter: Tissue Value: 5-10mm Siliques vs. Whole Plant
  misc_feature: MA Experiment ID: 20000439 Result: Up-regulated in Transcription
  misc_feature: MA Experiment 20000439 PARAMETER Experiment Name: At_Roots__P Parameter: Age (day) Value: 14 vs. 21
  misc_feature: MA Experiment 20000439 PARAMETER Experiment Name: At_Roots__P Parameter: Organism Value: A. thaliana
  misc_feature: MA Experiment 20000439 PARAMETER Experiment Name: At_Roots__P Parameter: Tissue Value: Roots vs. Whole Plant
  misc_feature: MA Experiment ID: 20001555 Result: Down-regulated in Transcription
  misc_feature: MA Experiment 20001555 PARAMETER Experiment Name: At_Drought_Soil_Dry_P Parameter: Age (day) Value: 24
  misc_feature: MA Experiment 20001555 PARAMETER Experiment Name: At_Drought_Soil_Dry_P Parameter: Organism Value: A. thaliana
  misc_feature: MA Experiment 20001555 PARAMETER Experiment Name: At_Drought_Soil_Dry_P Parameter: Plant Line Value: WS
  misc_feature: MA Experiment 20001555 PARAMETER Experiment Name: At_Drought_Soil_Dry_P Parameter: Post Timepoint (hr) Value: None
  misc_feature: MA Experiment 20001555 PARAMETER Experiment Name: At_Drought_Soil_Dry_P Parameter: Post-Treatment Value: None
  misc_feature: MA Experiment 20001555 PARAMETER Experiment Name: At_Drought_Soil_Dry_P Parameter: Timepoint (day) Value: 10
  misc_feature: MA Experiment 20001555 PARAMETER Experiment Name: At_Drought_Soil_Dry_P Parameter: Treatment Value: Drought vs. No Drought
  misc_feature: MA Experiment ID: 20001556 Result: Down-regulated in Transcription
  misc_feature: MA Experiment 20001556 PARAMETER Experiment Name: At_Drought_Soil_Dry_P Parameter: Age (day) Value: 26
  misc_feature: MA Experiment 20001556 PARAMETER Experiment Name: At_Drought_Soil_Dry_P Parameter: Organism Value: A. thaliana
  misc_feature: MA Experiment 20001556 PARAMETER Experiment Name: At_Drought_Soil_Dry_P Parameter: Plant Line Value: WS
  misc_feature: MA Experiment 20001556 PARAMETER Experiment Name: At_Drought_Soil_Dry_P Parameter: Post Timepoint (hr) Value: None
  misc_feature: MA Experiment 20001556 PARAMETER Experiment Name: At_Drought_Soil_Dry_P Parameter: Post-Treatment Value: None
  misc_feature: MA Experiment 20001556 PARAMETER Experiment Name: At_Drought_Soil_Dry_P Parameter: Timepoint (day) Value: 12
  misc_feature: MA Experiment 20001556 PARAMETER Experiment Name: At_Drought_Soil_Dry_P Parameter: Treatment Value: Drought vs. No Drought
  misc_feature: MA Experiment ID: 20001560 Result: Up-regulated in Transcription
  misc_feature: MA Experiment 20001560 PARAMETER Experiment Name: At_Drought_Soil_Dry_P Parameter: Age (day) Value: 28
  misc_feature: MA Experiment 20001560 PARAMETER Experiment Name: At_Drought_Soil_Dry_P Parameter: Organism Value: A. thaliana
  misc_feature: MA Experiment 20001560 PARAMETER Experiment Name: At_Drought_Soil_Dry_P Parameter: Plant Line Value: WS
  misc_feature: MA Experiment 20001560 PARAMETER Experiment Name: At_Drought_Soil_Dry_P Parameter: Post Timepoint (hr) Value: None
  misc_feature: MA Experiment 20001560 PARAMETER Experiment Name: At_Drought_Soil_Dry_P Parameter: Post-Treatment Value: None
  misc_feature: MA Experiment 20001560 PARAMETER Experiment Name: At_Drought_Soil_Dry_P Parameter: Timepoint (day) Value: 14
  misc_feature: MA Experiment 20001560 PARAMETER Experiment Name: At_Drought_Soil_Dry_P Parameter: Treatment Value: Drought vs. No Drought

SEQ ID NO: 34309 - protein, 147 aa, Arabidopsis thaliana; identical to SEQ ID NO: 30719
  peptide (1)..(147): Ceres Seq. ID no. 12326891
  misc_feature (6)..(87): Pfam Name: C2 domain Pfam Description: C2 domain
  misc_feature (4)..(143): Homolog of NCBI NO: 21998841 NR Description: RPP17-1 [Oryza sativa (japonica cultivar-group)]
  misc_feature (4)..(143): Homolog of NCBI NO: 7489474 NR Description: FIERG2 protein - rice
  misc_feature (1)..(144): Homolog of NCBI NO: 15233278 NR Description: elicitor responsive/phloem -like protein; protein
  misc_feature (1)..(147): Homolog of NCBI NO: 3860331 NR Description: hypothetical protein [Cicer arietinum]
  misc_feature (1)..(128): Homolog of NCBI NO: 5565983 NR Description: unknown [Zea mays]
  misc_feature (1)..(140): Homolog of NCBI NO: 7489756 NR Description: hypothetical protein - maize
  misc_feature (1)..(140): Homolog of NCBI NO: 38345558 NR Description: OSJNBa0032F06.15 [Oryza sativa (japonica
  misc_feature (1)..(143): Homolog of NCBI NO: 11358958 NR Description: elicitor-responsive gene 3 [imported] - rice
  misc_feature (1)..(147): Homolog of NCBI NO: 21553977 NR Description: putative elicitor-responsive gene [Arabidopsis
  misc_feature (1)..(147): Homolog of NCBI NO: 15221718 NR Description: putative elicitor-responsive gene

SEQ ID NO: 34310 - protein, 123 aa, Arabidopsis thaliana; identical to SEQ ID NO: 30720
  peptide (1)..(123): Ceres Seq. ID no. 12326892
  misc_feature (1)..(63): Pfam Name: C2 domain Pfam Description: C2 domain
  misc_feature (1)..(119): Homolog of NCBI NO: 21998841 NR Description: RPP17-1 [Oryza sativa (japonica cultivar-group)]
  misc_feature (1)..(119): Homolog of NCBI NO: 7489474 NR Description: FIERG2 protein - rice
  misc_feature (1)..(120): Homolog of NCBI NO: 15233278 NR Description: elicitor responsive/phloem -like protein; protein
  misc_feature (1)..(123): Homolog of NCBI NO: 3860331 NR Description: hypothetical protein [Cicer arietinum]
  misc_feature (1)..(104): Homolog of NCBI NO: 5565983 NR Description: unknown [Zea mays]
  misc_feature (1)..(116): Homolog of NCBI NO: 7489756 NR Description: hypothetical protein - maize
  misc_feature (1)..(116): Homolog of NCBI NO: 38345558 NR Description: OSJNBa0032F06.15 [Oryza sativa (japonica
  misc_feature (1)..(119): Homolog of NCBI NO: 11358958 NR Description: elicitor-responsive gene 3 [imported] - rice
  misc_feature (1)..(123): Homolog of NCBI NO: 21553977 NR Description: putative elicitor-responsive gene [Arabidopsis
  misc_feature (1)..(123): Homolog of NCBI NO: 15221718 NR Description: putative elicitor-responsive gene

SEQ ID NO: 34311 - protein, 102 aa, Arabidopsis thaliana; identical to SEQ ID NO: 29920
  peptide (1)..(102): Ceres Seq. ID no. 12326893
  misc_feature (1)..(98): Homolog of NCBI NO: 21998841 NR Description: RPP17-1 [Oryza sativa (japonica cultivar-group)]
  misc_feature (1)..(98): Homolog of NCBI NO: 7489474 NR Description: FIERG2 protein - rice
  misc_feature (1)..(99): Homolog of NCBI NO: 15233278 NR Description: elicitor responsive/phloem -like protein; protein
  misc_feature (1)..(102): Homolog of NCBI NO: 3860331 NR Description: hypothetical protein [Cicer arietinum]
  misc_feature (1)..(83): Homolog of NCBI NO: 5565983 NR Description: unknown [Zea mays]
  misc_feature (1)..(95): Homolog of NCBI NO: 7489756 NR Description: hypothetical protein - maize
  misc_feature (1)..(95): Homolog of NCBI NO: 38345558 NR Description: OSJNBa0032F06.15 [Oryza sativa (japonica
  misc_feature (1)..(98): Homolog of NCBI NO: 11358958 NR Description: elicitor-responsive gene 3 [imported] - rice
  misc_feature (1)..(102): Homolog of NCBI NO: 21553977 NR Description: putative elicitor-responsive gene [Arabidopsis
  misc_feature (1)..(102): Homolog of NCBI NO: 15221718 NR Description: putative elicitor-responsive gene

SEQ ID NO: 34312 - DNA, 1680 bp, Arabidopsis thaliana; identical to SEQ ID NO: 30722
  misc_feature (1)..(1680): Ceres Seq. ID no. 12343531
  misc_feature: MA Experiment ID: 108434 Result: Down-regulated in Transcription
  misc_feature: MA Experiment 108434 PARAMETER Experiment Name: At_Root_Tips_cDNA_P Parameter: Tissue Value: Root Tips
  misc_feature: MA Experiment ID: 108464 Result: Up-regulated in Transcription
  misc_feature: MA Experiment 108464 PARAMETER Experiment Name: At_Germinating_Seeds_cDNA_P Parameter: Age (day) Value: 4 vs. 0
  misc_feature: MA Experiment 108464 PARAMETER Experiment Name: At_Germinating_Seeds_cDNA_P Parameter: Tissue Value: Germinating Seeds
  misc_feature: MA Experiment ID: 108501 Result: Down-regulated in Transcription
  misc_feature: MA Experiment 108501 PARAMETER Experiment Name: At_ap2_floral_buds_cDNA_P Parameter: Plant Line Value: ap2 (Ler.)
  misc_feature: MA Experiment 108501 PARAMETER Experiment Name: At_ap2_floral_buds_cDNA_P Parameter: Tissue Value: Closed Flower
  misc_feature: MA Experiment ID: 20000070 Result: Down-regulated in Transcription
  misc_feature: MA Experiment 20000070 PARAMETER Experiment Name: At_100uM_ABA_Mutants_cDNA_P Parameter: Plant Line Value: CS24
  misc_feature: MA Experiment 20000070 PARAMETER Experiment Name: At_100uM_ABA_Mutants_cDNA_P Parameter: Timepoint (hr) Value: 6
  misc_feature: MA Experiment 20000070 PARAMETER Experiment Name: At_100uM_ABA_Mutants_cDNA_P Parameter: Tissue Value: Aerial
  misc_feature: MA Experiment 20000070 PARAMETER Experiment Name: At_100uM_ABA_Mutants_cDNA_P Parameter: Treatment Value: 100uM ABA vs. No Treatment
  misc_feature: MA Experiment ID: 20000071 Result: Down-regulated in Transcription
  misc_feature: MA Experiment 20000071 PARAMETER Experiment Name: At_100uM_ABA_Mutants_cDNA_P Parameter: Plant Line Value: CS8104
  misc_feature: MA Experiment 20000071 PARAMETER Experiment Name: At_100uM_ABA_Mutants_cDNA_P Parameter: Timepoint (hr) Value: 6
  misc_feature: MA Experiment 20000071 PARAMETER Experiment Name: At_100uM_ABA_Mutants_cDNA_P Parameter: Tissue Value: Aerial
  misc_feature: MA Experiment 20000071 PARAMETER Experiment Name: At_100uM_ABA_Mutants_cDNA_P Parameter: Treatment Value: 100uM ABA vs. No Treatment
  misc_feature: MA Experiment ID: 20000087 Result: Down-regulated in Transcription
  misc_feature: MA Experiment 20000087 PARAMETER Experiment Name: At_100uM_ABA_Mutants_cDNA_P Parameter: Plant Line Value: WS
  misc_feature: MA Experiment 20000087 PARAMETER Experiment Name: At_100uM_ABA_Mutants_cDNA_P Parameter: Timepoint (hr) Value: 6
  misc_feature: MA Experiment 20000087 PARAMETER Experiment Name: At_100uM_ABA_Mutants_cDNA_P Parameter: Tissue Value: Aerial
  misc_feature: MA Experiment 20000087 PARAMETER Experiment Name: At_100uM_ABA_Mutants_cDNA_P Parameter: Treatment Value: 100uM ABA vs. No Treatment
  misc_feature: MA Experiment ID: 20000089 Result: Down-regulated in Transcription
  misc_feature: MA Experiment ID: 20000090 Result: Down-regulated in Transcription
  misc_feature: MA Experiment ID: 20000117 Result: Down-regulated in Transcription
  misc_feature: MA Experiment 20000117 PARAMETER Experiment Name: At_100uM_ABA_Mutants_cDNA_P Parameter: Plant Line Value: Columbia
  misc_feature: MA Experiment 20000117 PARAMETER Experiment Name: At_100uM_ABA_Mutants_cDNA_P Parameter: Timepoint (hr) Value: 6
  misc_feature: MA Experiment 20000117 PARAMETER Experiment Name: At_100uM_ABA_Mutants_cDNA_P Parameter: Tissue Value: Aerial
  misc_feature: MA Experiment 20000117 PARAMETER Experiment Name: At_100uM_ABA_Mutants_cDNA_P Parameter: Treatment Value: 100uM ABA vs. No Treatment
  misc_feature: MA Experiment ID: 20000180 Result: Up-regulated in Transcription
  misc_feature: MA Experiment 20000180 PARAMETER Experiment Name: At_Germinating_Seeds_P Parameter: Age (hr) Value: 24 vs. 0
  misc_feature: MA Experiment 20000180 PARAMETER Experiment Name: At_Germinating_Seeds_P Parameter: Tissue Value: Germinating Seeds
  misc_feature: MA Experiment ID: 20000184 Result: Down-regulated in Transcription
  misc_feature: MA Experiment 20000184 PARAMETER Experiment Name: At_Shoots__P Parameter: Age (day) Value: 7
  misc_feature: MA Experiment 20000184 PARAMETER Experiment Name: At_Shoots__P Parameter: Tissue Value: Shoots vs. Whole Plant
  misc_feature: MA Experiment ID: 20000227 Result: Down-regulated in Transcription
  misc_feature: MA Experiment 20000227 PARAMETER Experiment Name: At_Root-Tips-vs-Tops_P Parameter: Tissue Value: Root Tips vs. Root Tops
  misc_feature: MA Experiment ID: 20000234 Result: Down-regulated in Transcription
  misc_feature: MA Experiment 20000234 PARAMETER Experiment Name: At_Siliques_P Parameter: Age (day) Value: 21
  misc_feature: MA Experiment 20000234 PARAMETER Experiment Name: At_Siliques_P Parameter: Organism Value: A. thaliana
  misc_feature: MA Experiment 20000234 PARAMETER Experiment Name: At_Siliques_P Parameter: Plant Line Value: WS
  misc_feature: MA Experiment 20000234 PARAMETER Experiment Name: At_Siliques_P Parameter: Tissue Value: Less Than 5mm Siliques vs. Whole Plant
  misc_feature: MA Experiment ID: 20000437 Result: Down-regulated in Transcription
  misc_feature: MA Experiment 20000437 PARAMETER Experiment Name: At_Drought_P Parameter: Age (day) Value: 8
  misc_feature: MA Experiment 20000437 PARAMETER Experiment Name: At_Drought_P Parameter: Organism Value: A. thaliana
  misc_feature: MA Experiment 20000437 PARAMETER Experiment Name: At_Drought_P Parameter: Plant Line Value: WS
  misc_feature: MA Experiment 20000437 PARAMETER Experiment Name: At_Drought_P Parameter: Timepoint (hr) Value: 24
  misc_feature: MA Experiment 20000437 PARAMETER Experiment Name: At_Drought_P Parameter: Tissue Value: Whole Plant
  misc_feature: MA Experiment 20000437 PARAMETER Experiment Name: At_Drought_P Parameter: Treatment Value: Drought vs. No Drought
  misc_feature: MA Experiment ID: 20000452 Result: Up-regulated in Transcription
  misc_feature: MA Experiment 20000452 PARAMETER Experiment Name: At_CS6879_Shoots-Roots_P Parameter: Age (day) Value: 14
  misc_feature: MA Experiment 20000452 PARAMETER Experiment Name: At_CS6879_Shoots-Roots_P Parameter: Organism Value: A. thaliana
  misc_feature: MA Experiment 20000452 PARAMETER Experiment Name: At_CS6879_Shoots-Roots_P Parameter: Plant Line Value: CS6879 vs. WS
  misc_feature: MA Experiment 20000452 PARAMETER Experiment Name: At_CS6879_Shoots-Roots_P Parameter: Tissue Value: Shoots
  misc_feature: MA Experiment ID: 20000496 Result: Down-regulated in Transcription
  misc_feature: MA Experiment 20000496 PARAMETER Experiment Name: At_Guard_Cells_P Parameter: Harvest Date Value: 7/19/2002
  misc_feature: MA Experiment 20000496 PARAMETER Experiment Name: At_Guard_Cells_P Parameter: Organism Value: Canola
  misc_feature: MA Experiment 20000496 PARAMETER Experiment Name: At_Guard_Cells_P Parameter: Tissue Value: Guard Cells vs. Leaves
  misc_feature: MA Experiment ID: 20001247 Result: Up-regulated in Transcription
  misc_feature: MA Experiment 20001247 PARAMETER Experiment Name: At_Far-red-induction_P Parameter: Age (day) Value: 7
  misc_feature: MA Experiment 20001247 PARAMETER Experiment Name: At_Far-red-induction_P Parameter: Light Value: Far-red vs. White
  misc_feature: MA Experiment 20001247 PARAMETER Experiment Name: At_Far-red-induction_P Parameter: Organism Value: A. thaliana
  misc_feature: MA Experiment 20001247 PARAMETER Experiment Name: At_Far-red-induction_P Parameter: Plant Line Value: Columbia
  misc_feature: MA Experiment 20001247 PARAMETER Experiment Name: At_Far-red-induction_P Parameter: Timepoint (hr) Value: 1
  misc_feature: MA Experiment 20001247 PARAMETER Experiment Name: At_Far-red-induction_P Parameter: Tissue Value: Whole Plant
  misc_feature: MA Experiment ID: 20001459 Result: Up-regulated in Transcription
  misc_feature: MA Experiment 20001459 PARAMETER Experiment Name: At_50mM_NH4NO3_L-to-H_P Parameter: Age (day) Value: Undefined
  misc_feature: MA Experiment 20001459 PARAMETER Experiment Name: At_50mM_NH4NO3_L-to-H_P Parameter: Organism Value: Undefined
  misc_feature: MA Experiment 20001459 PARAMETER Experiment Name: At_50mM_NH4NO3_L-to-H_P Parameter: Plant Line Value: Undefined
  misc_feature: MA Experiment 20001459 PARAMETER Experiment Name: At_50mM_NH4NO3_L-to-H_P Parameter: Timepoint (hr) Value: 4
  misc_feature: MA Experiment 20001459 PARAMETER Experiment Name: At_50mM_NH4NO3_L-to-H_P Parameter: Tissue Value: Siliques
  misc_feature: MA Experiment 20001459 PARAMETER Experiment Name: At_50mM_NH4NO3_L-to-H_P Parameter: Treatment Value: 50mM NH4NO3 vs. 100mM Manitol
  misc_feature: MA Experiment ID: 20001556 Result: Down-regulated in Transcription
  misc_feature: MA Experiment 20001556 PARAMETER Experiment Name: At_Drought_Soil_Dry_P Parameter: Age (day) Value: 26
  misc_feature: MA Experiment 20001556 PARAMETER Experiment Name: At_Drought_Soil_Dry_P Parameter: Organism Value: A. thaliana
  misc_feature: MA Experiment 20001556 PARAMETER Experiment Name: At_Drought_Soil_Dry_P Parameter: Plant Line Value: WS
  misc_feature: MA Experiment 20001556 PARAMETER Experiment Name: At_Drought_Soil_Dry_P Parameter: Post Timepoint (hr) Value: None
  misc_feature: MA Experiment 20001556 PARAMETER Experiment Name: At_Drought_Soil_Dry_P Parameter: Post-Treatment Value: None
  misc_feature: MA Experiment 20001556 PARAMETER Experiment Name: At_Drought_Soil_Dry_P Parameter: Timepoint (day) Value: 12
  misc_feature: MA Experiment 20001556 PARAMETER Experiment Name: At_Drought_Soil_Dry_P Parameter: Treatment Value: Drought vs. No Drought
  misc_feature: MA Experiment ID: 20001557 Result: Down-regulated in Transcription
  misc_feature: MA Experiment 20001557 PARAMETER Experiment Name: At_Drought_Soil_Dry_P Parameter: Age (day) Value: 27
  misc_feature: MA Experiment 20001557 PARAMETER Experiment Name: At_Drought_Soil_Dry_P Parameter: Organism Value: A. thaliana
  misc_feature: MA Experiment 20001557 PARAMETER Experiment Name: At_Drought_Soil_Dry_P Parameter: Plant Line Value: WS
  misc_feature: MA Experiment 20001557 PARAMETER Experiment Name: At_Drought_Soil_Dry_P Parameter: Post Timepoint (hr) Value: 3
  misc_feature: MA Experiment 20001557 PARAMETER Experiment Name: At_Drought_Soil_Dry_P Parameter: Post-Treatment Value: Re-Water vs. No Drought
  misc_feature: MA Experiment 20001557 PARAMETER Experiment Name: At_Drought_Soil_Dry_P Parameter: Timepoint (day) Value: 13
  misc_feature: MA Experiment 20001557 PARAMETER Experiment Name: At_Drought_Soil_Dry_P Parameter: Treatment Value: Drought vs. No Drought
  misc_feature: MA Experiment ID: 20001558 Result: Down-regulated in Transcription
  misc_feature: MA Experiment 20001558 PARAMETER Experiment Name: At_Drought_Soil_Dry_P Parameter: Age (day) Value: 27
  misc_feature: MA Experiment 20001558 PARAMETER Experiment Name: At_Drought_Soil_Dry_P Parameter: Organism Value: A. thaliana
  misc_feature: MA Experiment 20001558 PARAMETER Experiment Name: At_Drought_Soil_Dry_P Parameter: Plant Line Value: WS
  misc_feature: MA Experiment 20001558 PARAMETER Experiment Name: At_Drought_Soil_Dry_P Parameter: Post Timepoint (hr) Value: 6
  misc_feature: MA Experiment 20001558 PARAMETER Experiment Name: At_Drought_Soil_Dry_P Parameter: Post-Treatment Value: Re-Water vs. No Drought
  misc_feature: MA Experiment 20001558 PARAMETER Experiment Name: At_Drought_Soil_Dry_P Parameter: Timepoint (day) Value: 13
  misc_feature: MA Experiment 20001558 PARAMETER Experiment Name: At_Drought_Soil_Dry_P Parameter: Treatment Value: Drought vs. No Drought
  misc_feature: MA Experiment ID: 20001560 Result: Down-regulated in Transcription
  misc_feature: MA Experiment 20001560 PARAMETER Experiment Name: At_Drought_Soil_Dry_P Parameter: Age (day) Value: 28
  misc_feature: MA Experiment 20001560 PARAMETER Experiment Name: At_Drought_Soil_Dry_P Parameter: Organism Value: A. thaliana
  misc_feature: MA Experiment 20001560 PARAMETER Experiment Name: At_Drought_Soil_Dry_P Parameter: Plant Line Value: WS
  misc_feature: MA Experiment 20001560 PARAMETER Experiment Name: At_Drought_Soil_Dry_P Parameter: Post Timepoint (hr) Value: None
  misc_feature: MA Experiment 20001560 PARAMETER Experiment Name: At_Drought_Soil_Dry_P Parameter: Post-Treatment Value: None
  misc_feature: MA Experiment 20001560 PARAMETER Experiment Name: At_Drought_Soil_Dry_P Parameter: Timepoint (day) Value: 14
  misc_feature: MA Experiment 20001560 PARAMETER Experiment Name: At_Drought_Soil_Dry_P Parameter: Treatment Value: Drought vs. No Drought

SEQ ID NO: 34313 - protein, 364 aa, Arabidopsis thaliana; identical to SEQ ID NO: 30723
  peptide (1)..(364): Ceres Seq. ID no. 12343532
  misc_feature (17)..(145): Pfam Name: No apical meristem (NAM) protein Pfam Description: No apical meristem (NAM) protein
  misc_feature (13)..(182): Homolog of NCBI NO: 6223651 NR Description: NAM-like protein (no apical meristem)
  misc_feature (13)..(182): Homolog of NCBI NO: 30679026 NR Description: No apical meristem (NAM) protein family
  misc_feature (1)..(214): Homolog of NCBI NO: 34899790 NR Description: OJ1773_H01.21 [Oryza sativa (japonica
  misc_feature (5)..(230): Homolog of NCBI NO: 25352286 NR Description: hypothetical protein F11P17.16 [imported] -
  misc_feature (1)..(230): Homolog of NCBI NO: 18407026 NR Description: NAM protein, putative
  misc_feature (1)..(230): Homolog of NCBI NO: 21593425 NR Description: NAM protein, putative [Arabidopsis thaliana]
  misc_feature (1)..(262): Homolog of NCBI NO: 21554226 NR Description: NAM-like protein [Arabidopsis thaliana]
  misc_feature (1)..(262): Homolog of NCBI NO: 20466640 NR Description: NAM-like protein [Arabidopsis thaliana]
  misc_feature (1)..(262): Homolog of NCBI NO: 15219110 NR Description: NAM-like protein
  misc_feature (1)..(364): Homolog of NCBI NO: 15232606 NR Description: putative jasmonic acid regulatory protein

SEQ ID NO: 34314 - protein, 226 aa, Arabidopsis thaliana; identical to SEQ ID NO: 30724
  peptide (1)..(226): Ceres Seq. ID no. 12343533
  misc_feature (1)..(44): Homolog of NCBI NO: 6223651 NR Description: NAM-like protein (no apical meristem)
  misc_feature (1)..(44): Homolog of NCBI NO: 30679026 NR Description: No apical meristem (NAM) protein family
  misc_feature (1)..(76): Homolog of NCBI NO: 34899790 NR Description: OJ1773_H01.21 [Oryza sativa (japonica
  misc_feature (1)..(92): Homolog of NCBI NO: 25352286 NR Description: hypothetical protein F11P17.16 [imported] -
  misc_feature (1)..(92): Homolog of NCBI NO: 18407026 NR Description: NAM protein, putative
  misc_feature (1)..(92): Homolog of NCBI NO: 21593425 NR Description: NAM protein, putative [Arabidopsis thaliana]
  misc_feature (1)..(124): Homolog of NCBI NO: 21554226 NR Description: NAM-like protein [Arabidopsis thaliana]
  misc_feature (1)..(124): Homolog of NCBI NO: 20466640 NR Description: NAM-like protein [Arabidopsis thaliana]
  misc_feature (1)..(124): Homolog of NCBI NO: 15219110 NR Description: NAM-like protein
  misc_feature (1)..(226): Homolog of NCBI NO: 15232606 NR Description: putative jasmonic acid regulatory protein

SEQ ID NO: 34315 - DNA, 931 bp, Arabidopsis thaliana; identical to SEQ ID NO: 30725
  misc_feature (1)..(931): Ceres Seq. ID no. 13490184
  misc_feature: MA Experiment ID: 108434 Result: Up-regulated in Transcription
  misc_feature: MA Experiment 108434 PARAMETER Experiment Name: At_Root_Tips_cDNA_P Parameter: Tissue Value: Root Tips
  misc_feature: MA Experiment ID: 108573 Result: Down-regulated in Transcription
  misc_feature: MA Experiment 108573 PARAMETER Experiment Name: At_Drought_cDNA_P Parameter: Timepoint (hr) Value: 6
  misc_feature: MA Experiment 108573 PARAMETER Experiment Name: At_Drought_cDNA_P Parameter: Tissue Value: Aerial
  misc_feature: MA Experiment 108573 PARAMETER Experiment Name: At_Drought_cDNA_P Parameter: Treatment Value: Drought vs. No Drought
  misc_feature: MA Experiment ID: 20000090 Result: Up-regulated in Transcription
  misc_feature: MA Experiment ID: 20000113 Result: Down-regulated in Transcription
  misc_feature: MA Experiment 20000113 PARAMETER Experiment Name: At_42deg_Heat_cDNA_P Parameter: Temperature (deg C) Value: 42 vs. 22
  misc_feature: MA Experiment 20000113 PARAMETER Experiment Name: At_42deg_Heat_cDNA_P Parameter: Timepoint (hr) Value: 8
  misc_feature: MA Experiment 20000113 PARAMETER Experiment Name: At_42deg_Heat_cDNA_P Parameter: Tissue Value: Aerial
  misc_feature: MA Experiment ID: 20000180 Result: Up-regulated in Transcription
  misc_feature: MA Experiment 20000180 PARAMETER Experiment Name: At_Germinating_Seeds_P Parameter: Age (hr) Value: 24 vs. 0
  misc_feature: MA Experiment 20000180 PARAMETER Experiment Name: At_Germinating_Seeds_P Parameter: Tissue Value: Germinating Seeds
  misc_feature: MA Experiment ID: 20000184 Result: Down-regulated in Transcription
  misc_feature: MA Experiment 20000184 PARAMETER Experiment Name: At_Shoots__P Parameter: Age (day) Value: 7
  misc_feature: MA Experiment 20000184 PARAMETER Experiment Name: At_Shoots__P Parameter: Tissue Value: Shoots vs. Whole Plant
  misc_feature: MA Experiment ID: 20000495 Result: Up-regulated in Transcription
  misc_feature: MA Experiment 20000495 PARAMETER Experiment Name: At_Guard_Cells_P Parameter: Harvest Date Value: 8/2/2002
  misc_feature: MA Experiment 20000495 PARAMETER Experiment Name: At_Guard_Cells_P Parameter: Organism Value: A. thaliana
  misc_feature: MA Experiment 20000495 PARAMETER Experiment Name: At_Guard_Cells_P Parameter: Tissue Value: Guard Cells vs. Leaves

SEQ ID NO: 34316 - protein, 226 aa, Arabidopsis thaliana; identical to SEQ ID NO: 30726
  peptide (1)..(226): Ceres Seq. ID no. 13490185
  misc_feature (34)..(167): Homolog of NCBI NO: 15888985 NR Description: AGR_C_3088p [Agrobacterium tumefaciens]
  misc_feature (34)..(195): Homolog of NCBI NO: 17987170 NR Description: PEPTIDYL-PROLYL CIS-TRANS ISOMERASE [Brucella
  misc_feature (7)..(188): Homolog of NCBI NO: 22982921 NR Description: hypothetical protein [Burkholderia fungorum]
  misc_feature (34)..(172): Homolog of NCBI NO: 15965337 NR Description: PUTATIVE PEPTIDYL-PROLYL CIS-TRANS ISOMERASE B
  misc_feature (34)..(167): Homolog of NCBI NO: 23501971 NR Description: peptidyl-prolyl cis-trans isomerase,
  misc_feature (34)..(167): Homolog of NCBI NO: 17987171 NR Description: PEPTIDYL-PROLYL CIS-TRANS ISOMERASE A [Brucella
  misc_feature (11)..(195): Homolog of NCBI NO: 23501972 NR Description: peptidyl-prolyl cis-trans isomerase,
  misc_feature (1)..(203): Homolog of NCBI NO: 18310549 NR Description: probable peptidyl-prolyl cis-trans isomerase B
  misc_feature (34)..(220): Homolog of NCBI NO: 25518514 NR Description: hypothetical protein T2P11.13 - Arabidopsis
  misc_feature (1)..(226): Homolog of NCBI NO: 18396122 NR Description: expressed protein [Arabidopsis thaliana]

SEQ ID NO: 34317 - protein, 132 aa, Arabidopsis thaliana; identical to SEQ ID NO: 30727
  peptide (1)..(132): Ceres Seq. ID no. 13490186
  misc_feature (1)..(73): Homolog of NCBI NO: 15888985 NR Description: AGR_C_3088p [Agrobacterium tumefaciens]
  misc_feature (1)..(101): Homolog of NCBI NO: 17987170 NR Description: PEPTIDYL-PROLYL CIS-TRANS ISOMERASE [Brucella
  misc_feature (1)..(94): Homolog of NCBI NO: 22982921 NR Description: hypothetical protein [Burkholderia fungorum]
  misc_feature (1)..(78): Homolog of NCBI NO: 15965337 NR Description: PUTATIVE PEPTIDYL-PROLYL CIS-TRANS ISOMERASE B
  misc_feature (1)..(73): Homolog of NCBI NO: 23501971 NR Description: peptidyl-prolyl cis-trans isomerase,
  misc_feature (1)..(73): Homolog of NCBI NO: 17987171 NR Description: PEPTIDYL-PROLYL CIS-TRANS ISOMERASE A [Brucella
  misc_feature (1)..(101): Homolog of NCBI NO: 23501972 NR Description: peptidyl-prolyl cis-trans isomerase,
  misc_feature (1)..(109): Homolog of NCBI NO: 18310549 NR Description: probable peptidyl-prolyl cis-trans isomerase B
  misc_feature (1)..(126): Homolog of NCBI NO: 25518514 NR Description: hypothetical protein T2P11.13 - Arabidopsis
  misc_feature (1)..(132): Homolog of NCBI NO: 18396122 NR Description: expressed protein [Arabidopsis thaliana]

SEQ ID NO: 34318 - DNA, 1235 bp, Arabidopsis thaliana; identical to SEQ ID NO: 22288
  misc_feature (1)..(1235): Ceres Seq. ID no. 12324896
  misc_feature: MA Experiment ID: 108434 Result: Down-regulated in Transcription
  misc_feature: MA Experiment 108434 PARAMETER Experiment Name: At_Root_Tips_cDNA_P Parameter: Tissue Value: Root Tips
  misc_feature: MA Experiment ID: 108464 Result: Up-regulated in Transcription
  misc_feature: MA Experiment 108464 PARAMETER Experiment Name: At_Germinating_Seeds_cDNA_P Parameter: Age (day) Value: 4 vs. 0
  misc_feature: MA Experiment 108464 PARAMETER Experiment Name: At_Germinating_Seeds_cDNA_P Parameter: Tissue Value: Germinating Seeds
  misc_feature: MA Experiment ID: 108594 Result: Down-regulated in Transcription
  misc_feature: MA Experiment 108594 PARAMETER Experiment Name: At_Ler-rhl_Root_cDNA_P Parameter: Plant Line Value: null
  misc_feature: MA Experiment ID: 20000184 Result: Up-regulated in Transcription
  misc_feature: MA Experiment 20000184 PARAMETER Experiment Name: At_Shoots__P Parameter: Age (day) Value: 7
  misc_feature: MA Experiment 20000184 PARAMETER Experiment Name: At_Shoots__P Parameter: Tissue Value: Shoots vs. Whole Plant
  misc_feature: MA Experiment ID: 20000185 Result: Up-regulated in Transcription
  misc_feature: MA Experiment 20000185 PARAMETER Experiment Name: At_Roots__P Parameter: Age (day) Value: 7 vs. 21
  misc_feature: MA Experiment 20000185 PARAMETER Experiment Name: At_Roots__P Parameter: Organism Value: A. thaliana
  misc_feature: MA Experiment 20000185 PARAMETER Experiment Name: At_Roots__P Parameter: Tissue Value: Roots vs. Whole Plant
  misc_feature: MA Experiment ID: 20000227 Result: Down-regulated in Transcription
  misc_feature: MA Experiment 20000227 PARAMETER Experiment Name: At_Root-Tips-vs-Tops_P Parameter: Tissue Value: Root Tips vs. Root Tops
  misc_feature: MA Experiment ID: 20000267 Result: Down-regulated in Transcription
  misc_feature: MA Experiment 20000267 PARAMETER Experiment Name: At_Drought_P Parameter: Age (day) Value: 7
  misc_feature: MA Experiment 20000267 PARAMETER Experiment Name: At_Drought_P Parameter: Organism Value: A. thaliana
  misc_feature: MA Experiment 20000267 PARAMETER Experiment Name: At_Drought_P Parameter: Plant Line Value: WS
  misc_feature: MA Experiment 20000267 PARAMETER Experiment Name: At_Drought_P Parameter: Timepoint (hr) Value: 6
  misc_feature: MA Experiment 20000267 PARAMETER Experiment Name: At_Drought_P Parameter: Tissue Value: Whole Plant
  misc_feature: MA Experiment 20000267 PARAMETER Experiment Name: At_Drought_P Parameter: Treatment Value: Drought vs. No Drought
  misc_feature: MA Experiment ID: 20000436 Result: Down-regulated in Transcription
  misc_feature: MA Experiment 20000436 PARAMETER Experiment Name: At_Drought_P Parameter: Age (day) Value: 7
  misc_feature: MA Experiment 20000436 PARAMETER Experiment Name: At_Drought_P Parameter: Organism Value: A. thaliana
  misc_feature: MA Experiment 20000436 PARAMETER Experiment Name: At_Drought_P Parameter: Plant Line Value: WS
  misc_feature: MA Experiment 20000436 PARAMETER Experiment Name: At_Drought_P Parameter: Timepoint (hr) Value: 12
  misc_feature: MA Experiment 20000436 PARAMETER Experiment Name: At_Drought_P Parameter: Tissue Value: Whole Plant
  misc_feature: MA Experiment 20000436 PARAMETER Experiment Name: At_Drought_P Parameter: Treatment Value: Drought vs. No Drought
  misc_feature: MA Experiment ID: 20000437 Result: Down-regulated in Transcription
  misc_feature: MA Experiment 20000437 PARAMETER Experiment Name: At_Drought_P Parameter: Age (day) Value: 8
  misc_feature: MA Experiment 20000437 PARAMETER Experiment Name: At_Drought_P Parameter: Organism Value: A. thaliana
  misc_feature: MA Experiment 20000437 PARAMETER Experiment Name: At_Drought_P Parameter: Plant Line Value: WS
  misc_feature: MA Experiment 20000437 PARAMETER Experiment Name: At_Drought_P Parameter: Timepoint (hr) Value: 24
  misc_feature: MA Experiment 20000437 PARAMETER Experiment Name: At_Drought_P Parameter: Tissue Value: Whole Plant
  misc_feature: MA Experiment 20000437 PARAMETER Experiment Name: At_Drought_P Parameter: Treatment Value: Drought vs. No Drought
  misc_feature: MA Experiment ID: 20000438 Result: Up-regulated in Transcription
  misc_feature: MA Experiment 20000438 PARAMETER Experiment Name: At_Shoots__P Parameter: Age (day) Value: 14
  misc_feature: MA Experiment 20000438 PARAMETER Experiment Name: At_Shoots__P Parameter: Tissue Value: Shoots vs. Whole Plant
  misc_feature: MA Experiment ID: 20000439 Result: Up-regulated in Transcription
  misc_feature: MA Experiment 20000439 PARAMETER Experiment Name: At_Roots__P Parameter: Age (day) Value: 14 vs. 21
  misc_feature: MA Experiment 20000439 PARAMETER Experiment Name: At_Roots__P Parameter: Organism Value: A. thaliana
  misc_feature: MA Experiment 20000439 PARAMETER Experiment Name: At_Roots__P Parameter: Tissue Value: Roots vs. Whole Plant
  misc_feature: MA Experiment ID: 20000451 Result: Up-regulated in Transcription
  misc_feature: MA Experiment 20000451 PARAMETER Experiment Name: At_CS6879_Shoots-Roots_P Parameter: Age (day) Value: 14
  misc_feature: MA Experiment 20000451 PARAMETER Experiment Name: At_CS6879_Shoots-Roots_P Parameter: Organism Value: A. thaliana
  misc_feature: MA Experiment 20000451 PARAMETER Experiment Name: At_CS6879_Shoots-Roots_P Parameter: Plant Line Value: CS6879 vs. WS
  misc_feature: MA Experiment 20000451 PARAMETER Experiment Name: At_CS6879_Shoots-Roots_P Parameter: Tissue Value: Roots

SEQ ID NO: 34319 - protein, 329 aa, Arabidopsis thaliana; identical to SEQ ID NO: 22289
  peptide (1)..(329): Ceres Seq. ID no. 12324897
  misc_feature (185)..(284): Pfam Name: 2OG-Fe(II) oxygenase superfamily Pfam Description: 2OG-Fe(II) oxygenase superfamily
  misc_feature (185)..(284): Pfam Name: 2OG-Fe(II) oxygenase superfamily Pfam Description: 2OG-Fe(II) oxygenase superfamily
  misc_feature (3)..(318): Homolog of NCBI NO: 14916565 NR Description: Flavonol synthase (FLS)
  misc_feature (20)..(318): Homolog of NCBI NO: 1706822 NR Description: Flavonol synthase (FLS)
  misc_feature (20)..(313): Homolog of NCBI NO: 14916564 NR Description: Flavonol synthase (FLS)
  misc_feature (23)..(313): Homolog of NCBI NO: 14916566 NR Description: Flavonol synthase (FLS) (CitFLS)
  misc_feature (37)..(318): Homolog of NCBI NO: 6015164 NR Description: Flavonol synthase (FLS)
  misc_feature (3)..(318): Homolog of NCBI NO: 14916565 NR Description: Flavonol synthase (FLS)
  misc_feature (20)..(313): Homolog of NCBI NO: 14916564 NR Description: Flavonol synthase (FLS)
  misc_feature (37)..(318): Homolog of NCBI NO: 6015164 NR Description: Flavonol synthase (FLS)
  misc_feature (5)..(329): Homolog of NCBI NO: 15242828 NR Description: 1-aminocyclopropane-1-carboxylic acid
  misc_feature (33)..(324): Homolog of NCBI NO: 21554244 NR Description: flavonol synthase [Arabidopsis thaliana]
  misc_feature (33)..(324): Homolog of NCBI NO: 15242827 NR Description: flavonol synthase
  misc_feature (5)..(324): Homolog of NCBI NO: 15242339 NR Description: flavonol synthase (FLS) (sp Q96330)
  misc_feature (34)..(313): Homolog of NCBI NO: 10177039 NR Description: flavonol synthase [Arabidopsis thaliana]
  misc_feature (23)..(313): Homolog of NCBI NO: 14916566 NR Description: Flavonol synthase (FLS) (CitFLS)
  misc_feature (20)..(318): Homolog of NCBI NO: 1706822 NR Description: Flavonol synthase (FLS)
  misc_feature (34)..(313): Homolog of NCBI NO: 10177039 NR Description: flavonol synthase [Arabidopsis thaliana]
  misc_feature (5)..(324): Homolog of NCBI NO: 15242339 NR Description: flavonol synthase (FLS) (sp Q96330)
  misc_feature (33)..(324): Homolog of NCBI NO: 15242827 NR Description: flavonol synthase
  misc_feature (33)..(324): Homolog of NCBI NO: 21554244 NR Description: flavonol synthase [Arabidopsis thaliana]
  misc_feature (5)..(329): Homolog of NCBI NO: 15242828 NR Description: 1-aminocyclopropane-1-carboxylic acid

SEQ ID NO: 34320 - protein, 325 aa, Arabidopsis thaliana; identical to SEQ ID NO: 22290
  peptide (1)..(325): Ceres Seq. ID no. 12324898
  misc_feature (181)..(280): Pfam Name: 2OG-Fe(II) oxygenase superfamily Pfam Description: 2OG-Fe(II) oxygenase superfamily
  misc_feature (181)..(280): Pfam Name: 2OG-Fe(II) oxygenase superfamily Pfam Description: 2OG-Fe(II) oxygenase superfamily
  misc_feature (1)..(314): Homolog of NCBI NO: 14916565 NR Description: Flavonol synthase (FLS)
  misc_feature (16)..(314): Homolog of NCBI NO: 1706822 NR Description: Flavonol synthase (FLS)
  misc_feature (16)..(309): Homolog of NCBI NO: 14916564 NR Description: Flavonol synthase (FLS)
  misc_feature (19)..(309): Homolog of NCBI NO: 14916566 NR Description: Flavonol synthase (FLS) (CitFLS)
  misc_feature (33)..(314): Homolog of NCBI NO: 6015164 NR Description: Flavonol synthase (FLS)
  misc_feature (1)..(314): Homolog of NCBI NO: 14916565 NR Description: Flavonol synthase (FLS)
  misc_feature (16)..(309): Homolog of NCBI NO: 14916564 NR Description: Flavonol synthase (FLS)
  misc_feature (33)..(314): Homolog of NCBI NO: 6015164 NR Description: Flavonol synthase (FLS)
  misc_feature (1)..(325): Homolog of NCBI NO: 15242828 NR Description: 1-aminocyclopropane-1-carboxylic acid
  misc_feature (29)..(320): Homolog of NCBI NO: 21554244 NR Description: flavonol synthase [Arabidopsis thaliana]
  misc_feature (29)..(320): Homolog of NCBI NO: 15242827 NR Description: flavonol synthase
  misc_feature (1)..(320): Homolog of NCBI NO: 15242339 NR Description: flavonol synthase (FLS) (sp Q96330)
  misc_feature (30)..(309): Homolog of NCBI NO: 10177039 NR Description: flavonol synthase [Arabidopsis thaliana]
  misc_feature (19)..(309): Homolog of NCBI NO: 14916566 NR Description: Flavonol synthase (FLS) (CitFLS)
  misc_feature (16)..(314): Homolog of NCBI NO: 1706822 NR Description: Flavonol synthase (FLS)
  misc_feature (30)..(309): Homolog of NCBI NO: 10177039 NR Description: flavonol synthase [Arabidopsis thaliana]
  misc_feature (1)..(320): Homolog of NCBI NO: 15242339 NR Description: flavonol synthase (FLS) (sp Q96330)
  misc_feature (29)..(320): Homolog of NCBI NO: 15242827 NR Description: flavonol synthase
  misc_feature (29)..(320): Homolog of NCBI NO: 21554244 NR Description: flavonol synthase [Arabidopsis thaliana]
  misc_feature (1)..(325): Homolog of NCBI NO: 15242828 NR Description: 1-aminocyclopropane-1-carboxylic acid

SEQ ID NO: 34321 - protein, 254 aa, Arabidopsis thaliana; identical to SEQ ID NO: 22291
  peptide (1)..(254): Ceres Seq. ID no. 12324899
  misc_feature (110)..(209): Pfam Name: 2OG-Fe(II) oxygenase superfamily Pfam Description: 2OG-Fe(II) oxygenase superfamily
  misc_feature (110)..(209): Pfam Name: 2OG-Fe(II) oxygenase superfamily Pfam Description: 2OG-Fe(II) oxygenase superfamily
  misc_feature (1)..(243): Homolog of NCBI NO: 14916565 NR Description: Flavonol synthase (FLS)
  misc_feature (1)..(243): Homolog of NCBI NO: 1706822 NR Description: Flavonol synthase (FLS)
  misc_feature (1)..(238): Homolog of NCBI NO: 14916564 NR Description: Flavonol synthase (FLS)
  misc_feature (1)..(238): Homolog of NCBI NO: 14916566 NR Description: Flavonol synthase (FLS) (CitFLS)
  misc_feature (1)..(243): Homolog of NCBI NO: 6015164 NR Description: Flavonol synthase (FLS)
  misc_feature (1)..(243): Homolog of NCBI NO: 14916565 NR Description: Flavonol synthase (FLS)
  misc_feature (1)..(238): Homolog of NCBI NO: 14916564 NR Description: Flavonol synthase (FLS)
  misc_feature (1)..(243): Homolog of NCBI NO: 6015164 NR Description: Flavonol synthase (FLS)
  misc_feature (1)..(254): Homolog of NCBI NO: 15242828 NR Description: 1-aminocyclopropane-1-carboxylic acid
  misc_feature (1)..(249): Homolog of NCBI NO: 21554244 NR Description: flavonol synthase [Arabidopsis thaliana]
  misc_feature (1)..(249): Homolog of NCBI NO: 15242827 NR Description: flavonol synthase
  misc_feature (1)..(249): Homolog of NCBI NO: 15242339 NR Description: flavonol synthase (FLS) (sp Q96330)
  misc_feature (1)..(238): Homolog of NCBI NO: 10177039 NR Description: flavonol synthase [Arabidopsis thaliana]
  misc_feature (1)..(238): Homolog of NCBI NO: 14916566 NR Description: Flavonol synthase (FLS) (CitFLS)
  misc_feature (1)..(243): Homolog of NCBI NO: 1706822 NR Description: Flavonol synthase (FLS)
  misc_feature (1)..(238): Homolog of NCBI NO: 10177039 NR Description: flavonol synthase [Arabidopsis thaliana]
  misc_feature (1)..(249): Homolog of NCBI NO: 15242339 NR Description: flavonol synthase (FLS) (sp Q96330)
  misc_feature (1)..(249): Homolog of NCBI NO: 15242827 NR Description: flavonol synthase
  misc_feature (1)..(249): Homolog of NCBI NO: 21554244 NR Description: flavonol synthase [Arabidopsis thaliana]
  misc_feature (1)..(254): Homolog of NCBI NO: 15242828 NR Description: 1-aminocyclopropane-1-carboxylic acid

SEQ ID NO: 34322 - DNA, 1389 bp, Arabidopsis thaliana; identical to SEQ ID NO: 22445
  misc_feature (1)..(1389): Ceres Seq. ID no. 12394789
  misc_feature: MA Experiment ID: 108434 Result: Down-regulated in Transcription
  misc_feature: MA Experiment 108434 PARAMETER Experiment Name: At_Root_Tips_cDNA_P Parameter: Tissue Value: Root Tips
  misc_feature: MA Experiment ID: 108461 Result: Up-regulated in Transcription
  misc_feature: MA Experiment 108461 PARAMETER Experiment Name: At_Germinating_Seeds_cDNA_P Parameter: Age (day) Value: 1 vs. 0
  misc_feature: MA Experiment 108461 PARAMETER Experiment Name: At_Germinating_Seeds_cDNA_P Parameter: Tissue Value: Germinating Seeds
  misc_feature: MA Experiment ID: 108462 Result: Up-regulated in Transcription
  misc_feature: MA Experiment 108462 PARAMETER Experiment Name: At_Germinating_Seeds_cDNA_P Parameter: Age (day) Value: 2 vs. 0
  misc_feature: MA Experiment 108462 PARAMETER Experiment Name: At_Germinating_Seeds_cDNA_P Parameter: Tissue Value: Germinating Seeds
  misc_feature: MA Experiment ID: 108463 Result: Up-regulated in Transcription
  misc_feature: MA Experiment 108463 PARAMETER Experiment Name: At_Germinating_Seeds_cDNA_P Parameter: Age (day) Value: 3 vs. 0
  misc_feature: MA Experiment 108463 PARAMETER Experiment Name: At_Germinating_Seeds_cDNA_P Parameter: Tissue Value: Germinating Seeds
  misc_feature: MA Experiment ID: 108464 Result: Up-regulated in Transcription
  misc_feature: MA Experiment 108464 PARAMETER Experiment Name: At_Germinating_Seeds_cDNA_P Parameter: Age (day) Value: 4 vs. 0
  misc_feature: MA Experiment 108464 PARAMETER Experiment Name: At_Germinating_Seeds_cDNA_P Parameter: Tissue Value: Germinating Seeds
  misc_feature: MA Experiment ID: 108577 Result: Down-regulated in Transcription
  misc_feature: MA Experiment 108577 PARAMETER Experiment Name: At_42deg_Heat_cDNA_P Parameter: Temperature (deg C) Value: 42 vs. 22
  misc_feature: MA Experiment 108577 PARAMETER Experiment Name: At_42deg_Heat_cDNA_P Parameter: Timepoint (hr) Value: 6
  misc_feature: MA Experiment 108577 PARAMETER Experiment Name: At_42deg_Heat_cDNA_P Parameter: Tissue Value: Aerial
  misc_feature: MA Experiment ID: 108579 Result: Down-regulated in Transcription
  misc_feature: MA Experiment 108579 PARAMETER Experiment Name: At_4deg_Cold_cDNA_P Parameter: Temperature (deg C) Value: 4 vs. 22
  misc_feature: MA Experiment 108579 PARAMETER Experiment Name: At_4deg_Cold_cDNA_P Parameter: Timepoint (hr) Value: 6
  misc_feature: MA Experiment 108579 PARAMETER Experiment Name: At_4deg_Cold_cDNA_P Parameter: Tissue Value: Aerial
  misc_feature: MA Experiment ID: 108594 Result: Down-regulated in Transcription
  misc_feature: MA Experiment 108594 PARAMETER Experiment Name: At_Ler-rhl_Root_cDNA_P Parameter: Plant Line Value: null
  misc_feature: MA Experiment ID: 20000069 Result: Up-regulated in Transcription
  misc_feature: MA Experiment 20000069 PARAMETER Experiment Name: At_100uM_ABA_Mutants_cDNA_P Parameter: Plant Line Value: CS23
  misc_feature: MA Experiment 20000069 PARAMETER Experiment Name: At_100uM_ABA_Mutants_cDNA_P Parameter: Timepoint (hr) Value: 6
  misc_feature: MA Experiment 20000069 PARAMETER Experiment Name: At_100uM_ABA_Mutants_cDNA_P Parameter: Tissue Value: Aerial
  misc_feature: MA Experiment 20000069 PARAMETER Experiment Name: At_100uM_ABA_Mutants_cDNA_P Parameter: Treatment Value: 100uM ABA vs. No Treatment
  misc_feature: MA Experiment ID: 20000071 Result: Up-regulated in Transcription
  misc_feature: MA Experiment 20000071 PARAMETER Experiment Name: At_100uM_ABA_Mutants_cDNA_P Parameter: Plant Line Value: CS8104
  misc_feature: MA Experiment 20000071 PARAMETER Experiment Name: At_100uM_ABA_Mutants_cDNA_P Parameter: Timepoint (hr) Value: 6
  misc_feature: MA Experiment 20000071 PARAMETER Experiment Name: At_100uM_ABA_Mutants_cDNA_P Parameter: Tissue Value: Aerial
  misc_feature: MA Experiment 20000071 PARAMETER Experiment Name: At_100uM_ABA_Mutants_cDNA_P Parameter: Treatment Value: 100uM ABA vs. No Treatment
  misc_feature: MA Experiment ID: 20000072 Result: Up-regulated in Transcription
  misc_feature: MA Experiment 20000072 PARAMETER Experiment Name: At_100uM_ABA_Mutants_cDNA_P Parameter: Plant Line Value: CS8105
  misc_feature: MA Experiment 20000072 PARAMETER Experiment Name: At_100uM_ABA_Mutants_cDNA_P Parameter: Timepoint (hr) Value: 6
  misc_feature: MA Experiment 20000072 PARAMETER Experiment Name: At_100uM_ABA_Mutants_cDNA_P Parameter: Tissue Value: Aerial
  misc_feature: MA Experiment 20000072 PARAMETER Experiment Name: At_100uM_ABA_Mutants_cDNA_P Parameter: Treatment Value: 100uM ABA vs. No Treatment
  misc_feature: MA Experiment ID: 20000088 Result: Up-regulated in Transcription
  misc_feature: MA Experiment 20000088 PARAMETER Experiment Name: At_100uM_ABA_Mutants_cDNA_P Parameter: Plant Line Value: Landsberg
  misc_feature: MA Experiment 20000088 PARAMETER Experiment Name: At_100uM_ABA_Mutants_cDNA_P Parameter: Timepoint (hr) Value: 6
  misc_feature: MA Experiment 20000088 PARAMETER Experiment Name: At_100uM_ABA_Mutants_cDNA_P Parameter: Tissue Value: Aerial
  misc_feature: MA Experiment 20000088 PARAMETER Experiment Name: At_100uM_ABA_Mutants_cDNA_P Parameter: Treatment Value: 100uM ABA vs. No Treatment
  misc_feature: MA Experiment ID: 20000089 Result: Up-regulated in Transcription
  misc_feature: MA Experiment ID: 20000180 Result: Up-regulated in Transcription
  misc_feature: MA Experiment 20000180 PARAMETER Experiment Name: At_Germinating_Seeds_P Parameter: Age (hr) Value: 24 vs. 0
  misc_feature: MA Experiment 20000180 PARAMETER Experiment Name: At_Germinating_Seeds_P Parameter: Tissue Value: Germinating Seeds
  misc_feature: MA Experiment ID: 20000227 Result: Down-regulated in Transcription
  misc_feature: MA Experiment 20000227 PARAMETER Experiment Name: At_Root-Tips-vs-Tops_P Parameter: Tissue Value: Root Tips vs. Root Tops
  misc_feature: MA Experiment ID: 20000234 Result: Down-regulated in Transcription
  misc_feature: MA Experiment 20000234 PARAMETER Experiment Name: At_Siliques_P Parameter: Age (day) Value: 21
  misc_feature: MA Experiment 20000234 PARAMETER Experiment Name: At_Siliques_P Parameter: Organism Value: A. thaliana
  misc_feature: MA Experiment 20000234 PARAMETER Experiment Name: At_Siliques_P Parameter: Plant Line Value: WS
  misc_feature: MA Experiment 20000234 PARAMETER Experiment Name: At_Siliques_P Parameter: Tissue Value: Less Than 5mm Siliques vs. Whole Plant
  misc_feature: MA Experiment ID: 20000437 Result: Up-regulated in Transcription
  misc_feature: MA Experiment 20000437 PARAMETER Experiment Name: At_Drought_P Parameter: Age (day) Value: 8
  misc_feature: MA Experiment 20000437 PARAMETER Experiment Name: At_Drought_P Parameter: Organism Value: A. thaliana
  misc_feature: MA Experiment 20000437 PARAMETER Experiment Name: At_Drought_P Parameter: Plant Line Value: WS
  misc_feature: MA Experiment 20000437 PARAMETER Experiment Name: At_Drought_P Parameter: Timepoint (hr) Value: 24
  misc_feature: MA Experiment 20000437 PARAMETER Experiment Name: At_Drought_P Parameter: Tissue Value: Whole Plant
  misc_feature: MA Experiment 20000437 PARAMETER Experiment Name: At_Drought_P Parameter: Treatment Value: Drought vs. No Drought
  misc_feature: MA Experiment ID: 20000438 Result: Down-regulated in Transcription
  misc_feature: MA Experiment 20000438 PARAMETER Experiment Name: At_Shoots__P Parameter: Age (day) Value: 14
  misc_feature: MA Experiment 20000438 PARAMETER Experiment Name: At_Shoots__P Parameter: Tissue Value: Shoots vs. Whole Plant
  misc_feature: MA Experiment ID: 20000451 Result: Down-regulated in Transcription
  misc_feature: MA Experiment 20000451 PARAMETER Experiment Name: At_CS6879_Shoots-Roots_P Parameter: Age (day) Value: 14
  misc_feature: MA Experiment 20000451 PARAMETER Experiment Name: At_CS6879_Shoots-Roots_P Parameter: Organism Value: A. thaliana
  misc_feature: MA Experiment 20000451 PARAMETER Experiment Name: At_CS6879_Shoots-Roots_P Parameter: Plant Line Value: CS6879 vs. WS
  misc_feature: MA Experiment 20000451 PARAMETER Experiment Name: At_CS6879_Shoots-Roots_P Parameter: Tissue Value: Roots
  misc_feature: MA Experiment ID: 20000574 Result: Down-regulated in Transcription
  misc_feature: MA Experiment 20000574 PARAMETER Experiment Name: At_100uM_ABA_Mutants__P Parameter: Organism Value: A. thaliana
  misc_feature: MA Experiment 20000574 PARAMETER Experiment Name: At_100uM_ABA_Mutants__P Parameter: Plant Line Value: CS23 vs. Ler wt
  misc_feature: MA Experiment 20000574 PARAMETER Experiment Name: At_100uM_ABA_Mutants__P Parameter: Timepoint (hr) Value: N/A
  misc_feature: MA Experiment 20000574 PARAMETER Experiment Name: At_100uM_ABA_Mutants__P Parameter: Tissue Value: Whole Plant
  misc_feature: MA Experiment 20000574 PARAMETER Experiment Name: At_100uM_ABA_Mutants__P Parameter: Treatment Value: None
  misc_feature: MA Experiment ID: 20001558 Result: Down-regulated in Transcription
  misc_feature: MA Experiment 20001558 PARAMETER Experiment Name: At_Drought_Soil_Dry_P Parameter: Age (day) Value: 27
  misc_feature: MA Experiment 20001558 PARAMETER Experiment Name: At_Drought_Soil_Dry_P Parameter: Organism Value: A. thaliana
  misc_feature: MA Experiment 20001558 PARAMETER Experiment Name: At_Drought_Soil_Dry_P Parameter: Plant Line Value: WS
  misc_feature: MA Experiment 20001558 PARAMETER Experiment Name: At_Drought_Soil_Dry_P Parameter: Post Timepoint (hr) Value: 6
  misc_feature: MA Experiment 20001558 PARAMETER Experiment Name: At_Drought_Soil_Dry_P Parameter: Post-Treatment Value: Re-Water vs. No Drought
  misc_feature: MA Experiment 20001558 PARAMETER Experiment Name: At_Drought_Soil_Dry_P Parameter: Timepoint (day) Value: 13
  misc_feature: MA Experiment 20001558 PARAMETER Experiment Name: At_Drought_Soil_Dry_P Parameter: Treatment Value: Drought vs. No Drought
  misc_feature: MA Experiment ID: 20001560 Result: Down-regulated in Transcription
  misc_feature: MA Experiment 20001560 PARAMETER Experiment Name: At_Drought_Soil_Dry_P Parameter: Age (day) Value: 28
  misc_feature: MA Experiment 20001560 PARAMETER Experiment Name: At_Drought_Soil_Dry_P Parameter: Organism Value: A. thaliana
  misc_feature: MA Experiment 20001560 PARAMETER Experiment Name: At_Drought_Soil_Dry_P Parameter: Plant Line Value: WS
  misc_feature: MA Experiment 20001560 PARAMETER Experiment Name: At_Drought_Soil_Dry_P Parameter: Post Timepoint (hr) Value: None
  misc_feature: MA Experiment 20001560 PARAMETER Experiment Name: At_Drought_Soil_Dry_P Parameter: Post-Treatment Value: None
  misc_feature: MA Experiment 20001560 PARAMETER Experiment Name: At_Drought_Soil_Dry_P Parameter: Timepoint (day) Value: 14
  misc_feature: MA Experiment 20001560 PARAMETER Experiment Name: At_Drought_Soil_Dry_P Parameter: Treatment Value: Drought vs. No Drought

SEQ ID NO: 34323 - protein, 387 aa, Arabidopsis thaliana; identical to SEQ ID NO: 22446
  peptide (1)..(387): Ceres Seq. ID no. 12394790
  misc_feature (154)..(380): Pfam Name: Papain family cysteine protease Pfam Description: Papain family cysteine protease
  misc_feature (154)..(380): Pfam Name: Papain family cysteine protease Pfam Description: Papain family cysteine protease
  misc_feature (15)..(385): Homolog of NCBI NO: 7435793 NR Description: probable cysteine proteinase (EC 3.4.22.-)
  misc_feature (20)..(385): Homolog of NCBI NO: 13491752 NR Description: cysteine protease [Ipomoea batatas]
  misc_feature (23)..(385): Homolog of NCBI NO: 5051468 NR Description: putative preprocysteine proteinase [Nicotiana
  misc_feature (15)..(385): Homolog of NCBI NO: 4757570 NR Description: cysteine proteinase precursor [Solanum melongena]
  misc_feature (20)..(385): Homolog of NCBI NO: 7381221 NR Description: papain-like cysteine proteinase isoform II
  misc_feature (15)..(385): Homolog of NCBI NO: 7435793 NR Description: probable cysteine proteinase (EC 3.4.22.-)
  misc_feature (23)..(385): Homolog of NCBI NO: 5051468 NR Description: putative preprocysteine proteinase [Nicotiana
  misc_feature (20)..(385): Homolog of NCBI NO: 7381221 NR Description: papain-like cysteine proteinase isoform II
  misc_feature (15)..(387): Homolog of NCBI NO: 18414611 NR Description: cysteine proteinase
  misc_feature (20)..(385): Homolog of NCBI NO: 7211741 NR Description: papain-like cysteine proteinase isoform I
  misc_feature (20)..(385): Homolog of NCBI NO: 7381219 NR Description: papain-like cysteine proteinase isoform I
  misc_feature (20)..(385): Homolog of NCBI NO: 7211743 NR Description: papain-like cysteine proteinase isoform II
  misc_feature (23)..(385): Homolog of NCBI NO: 7211745 NR Description: papain-like cysteine proteinase isoform III
  misc_feature (15)..(385): Homolog of NCBI NO: 4757570 NR Description: cysteine proteinase precursor [Solanum melongena]
  misc_feature (20)..(385): Homolog of NCBI NO: 13491752 NR Description: cysteine protease [Ipomoea batatas]
  misc_feature (23)..(385): Homolog of NCBI NO: 7211745 NR Description: papain-like cysteine proteinase isoform III
  misc_feature (20)..(385): Homolog of NCBI NO: 7211743 NR Description: papain-like cysteine proteinase isoform II
  misc_feature (20)..(385): Homolog of NCBI NO: 7381219 NR Description: papain-like cysteine proteinase isoform I
  misc_feature (20)..(385): Homolog of NCBI NO: 7211741 NR Description: papain-like cysteine proteinase isoform I
  misc_feature (15)..(387): Homolog of NCBI NO: 18414611 NR Description: cysteine proteinase

SEQ ID NO: 34324 - protein, 373 aa, Arabidopsis thaliana; identical to SEQ ID NO: 22447
  peptide (1)..(373): Ceres Seq. ID no. 12394791
  misc_feature (140)..(366): Pfam Name: Papain family cysteine protease Pfam Description: Papain family cysteine protease
  misc_feature (140)..(366): Pfam Name: Papain family cysteine protease Pfam Description: Papain family cysteine protease
  misc_feature (1)..(371): Homolog of NCBI NO: 7435793 NR Description: probable cysteine proteinase (EC 3.4.22.-)
  misc_feature (6)..(371): Homolog of NCBI NO: 13491752 NR Description: cysteine protease [Ipomoea batatas]
  misc_feature (9)..(371): Homolog of NCBI NO: 5051468 NR Description: putative preprocysteine proteinase [Nicotiana
  misc_feature (1)..(371): Homolog of NCBI NO: 4757570 NR Description: cysteine proteinase precursor [Solanum melongena]
  misc_feature (6)..(371): Homolog of NCBI NO: 7381221 NR Description: papain-like cysteine proteinase isoform II
  misc_feature (1)..(371): Homolog of NCBI NO: 7435793 NR Description: probable cysteine proteinase (EC 3.4.22.-)
  misc_feature (9)..(371): Homolog of NCBI NO: 5051468 NR Description: putative preprocysteine proteinase [Nicotiana
  misc_feature (6)..(371): Homolog of NCBI NO: 7381221 NR Description: papain-like cysteine proteinase isoform II
  misc_feature (1)..(373): Homolog of NCBI NO: 18414611 NR Description: cysteine proteinase
  misc_feature (6)..(371): Homolog of NCBI NO: 7211741 NR Description: papain-like cysteine proteinase isoform I
  misc_feature (6)..(371): Homolog of NCBI NO: 7381219 NR Description: papain-like cysteine proteinase isoform I
  misc_feature (6)..(371): Homolog of NCBI NO: 7211743 NR Description: papain-like cysteine proteinase isoform II
  misc_feature (9)..(371): Homolog of NCBI NO: 7211745 NR Description: papain-like cysteine proteinase isoform III
  misc_feature (1)..(371): Homolog of NCBI NO: 4757570 NR Description: cysteine proteinase precursor [Solanum melongena]
  misc_feature (6)..(371): Homolog of NCBI NO: 13491752 NR Description: cysteine protease [Ipomoea batatas]
  misc_feature (9)..(371): Homolog of NCBI NO: 7211745 NR Description: papain-like cysteine proteinase isoform III
  misc_feature (6)..(371): Homolog of NCBI NO: 7211743 NR Description: papain-like cysteine proteinase isoform II
  misc_feature (6)..(371): Homolog of NCBI NO: 7381219 NR Description: papain-like cysteine proteinase isoform I
  misc_feature (6)..(371): Homolog of NCBI NO: 7211741 NR Description: papain-like cysteine proteinase isoform I
  misc_feature (1)..(373): Homolog of NCBI NO: 18414611 NR Description: cysteine proteinase

SEQ ID NO: 34325 - protein, 214 aa, Arabidopsis thaliana; identical to SEQ ID NO: 22448
  peptide (1)..(214): Ceres Seq. ID no. 12394792
  misc_feature (1)..(207): Pfam Name: Papain family cysteine protease Pfam Description: Papain family cysteine protease
  misc_feature (1)..(207): Pfam Name: Papain family cysteine protease Pfam Description: Papain family cysteine protease
  misc_feature (1)..(212): Homolog of NCBI NO: 7435793 NR Description: probable cysteine proteinase (EC 3.4.22.-)
  misc_feature (1)..(212): Homolog of NCBI NO: 13491752 NR Description: cysteine protease [Ipomoea batatas]
  misc_feature (1)..(212): Homolog of NCBI NO: 5051468 NR Description: putative preprocysteine proteinase [Nicotiana
  misc_feature (1)..(212): Homolog of NCBI NO: 4757570 NR Description: cysteine proteinase precursor [Solanum melongena]
  misc_feature (1)..(212): Homolog of NCBI NO: 7381221 NR Description: papain-like cysteine proteinase isoform II
  misc_feature (1)..(212): Homolog of NCBI NO: 7211743 NR Description: papain-like cysteine proteinase isoform II
  misc_feature (1)..(212): Homolog of NCBI NO: 7211741 NR Description: papain-like cysteine proteinase isoform I
  misc_feature (1)..(212): Homolog of NCBI NO: 7211745 NR Description: papain-like cysteine proteinase isoform III
  misc_feature (1)..(212): Homolog of NCBI NO: 7381221 NR Description: papain-like cysteine proteinase isoform II
  misc_feature (1)..(212): Homolog of NCBI NO: 4757570 NR Description: cysteine proteinase precursor [Solanum melongena]
  misc_feature (1)..(212): Homolog of NCBI NO: 5051468 NR Description: putative preprocysteine proteinase [Nicotiana
  misc_feature (1)..(212): Homolog of NCBI NO: 13491752 NR Description: cysteine protease [Ipomoea batatas]
  misc_feature (1)..(212): Homolog of NCBI NO: 7435793 NR Description: probable cysteine proteinase (EC 3.4.22.-)
  misc_feature (1)..(214): Homolog of NCBI NO: 18414611 NR Description: cysteine proteinase
  misc_feature (1)..(212): Homolog of NCBI NO: 7381219 NR Description: papain-like cysteine proteinase isoform I
  misc_feature (1)..(212): Homolog of NCBI NO: 7211745 NR Description: papain-like cysteine proteinase isoform III
  misc_feature (1)..(212): Homolog of NCBI NO: 7211743 NR Description: papain-like cysteine proteinase isoform II
  misc_feature (1)..(212): Homolog of NCBI NO: 7381219 NR Description: papain-like cysteine proteinase isoform I
  misc_feature (1)..(212): Homolog of NCBI NO: 7211741 NR Description: papain-like cysteine proteinase isoform I
  misc_feature (1)..(214): Homolog of NCBI NO: 18414611 NR Description: cysteine proteinase

SEQ ID NO: 34326 - DNA, 722 bp, Arabidopsis thaliana; identical to SEQ ID NO: 30736
  misc_feature (1)..(722): Ceres Seq. ID no. 12332196
  misc_feature: MA Experiment ID: 108434 Result: Up-regulated in Transcription
  misc_feature: MA Experiment 108434 PARAMETER Experiment Name: At_Root_Tips_cDNA_P Parameter: Tissue Value: Root Tips
  misc_feature: MA Experiment ID: 108461 Result: Up-regulated in Transcription
  misc_feature: MA Experiment 108461 PARAMETER Experiment Name: At_Germinating_Seeds_cDNA_P Parameter: Age (day) Value: 1 vs. 0
  misc_feature: MA Experiment 108461 PARAMETER Experiment Name: At_Germinating_Seeds_cDNA_P Parameter: Tissue Value: Germinating Seeds
  misc_feature: MA Experiment ID: 108573 Result: Down-regulated in Transcription
  misc_feature: MA Experiment 108573 PARAMETER Experiment Name: At_Drought_cDNA_P Parameter: Timepoint (hr) Value: 6
  misc_feature: MA Experiment 108573 PARAMETER Experiment Name: At_Drought_cDNA_P Parameter: Tissue Value: Aerial
  misc_feature: MA Experiment 108573 PARAMETER Experiment Name: At_Drought_cDNA_P Parameter: Treatment Value: Drought vs. No Drought
  misc_feature: MA Experiment ID: 108585 Result: Down-regulated in Transcription
  misc_feature: MA Experiment 108585 PARAMETER Experiment Name: At_5mM_NaNP_cDNA_P Parameter: Timepoint (hr) Value: 6
  misc_feature: MA Experiment 108585 PARAMETER Experiment Name: At_5mM_NaNP_cDNA_P Parameter: Tissue Value: Aerial
  misc_feature: MA Experiment 108585 PARAMETER Experiment Name: At_5mM_NaNP_cDNA_P Parameter: Treatment Value: null
  misc_feature: MA Experiment ID: 108595 Result: Down-regulated in Transcription
  misc_feature: MA Experiment 108595 PARAMETER Experiment Name: At_Ler-pi_Ovule_cDNA_P Parameter: Plant Line Value: null
  misc_feature: MA Experiment ID: 20000069 Result: Down-regulated in Transcription
  misc_feature: MA Experiment 20000069 PARAMETER Experiment Name: At_100uM_ABA_Mutants_cDNA_P Parameter: Plant Line Value: CS23
  misc_feature: MA Experiment 20000069 PARAMETER Experiment Name: At_100uM_ABA_Mutants_cDNA_P Parameter: Timepoint (hr) Value: 6
  misc_feature: MA Experiment 20000069 PARAMETER Experiment Name: At_100uM_ABA_Mutants_cDNA_P Parameter: Tissue Value: Aerial
  misc_feature: MA Experiment 20000069 PARAMETER Experiment Name: At_100uM_ABA_Mutants_cDNA_P Parameter: Treatment Value: 100uM ABA vs. No Treatment
  misc_feature: MA Experiment ID: 20000070 Result: Down-regulated in Transcription
  misc_feature: MA Experiment 20000070 PARAMETER Experiment Name: At_100uM_ABA_Mutants_cDNA_P Parameter: Plant Line Value: CS24
  misc_feature: MA Experiment 20000070 PARAMETER Experiment Name: At_100uM_ABA_Mutants_cDNA_P Parameter: Timepoint (hr) Value: 6
  misc_feature: MA Experiment 20000070 PARAMETER Experiment Name: At_100uM_ABA_Mutants_cDNA_P Parameter: Tissue Value: Aerial
  misc_feature: MA Experiment 20000070 PARAMETER Experiment Name: At_100uM_ABA_Mutants_cDNA_P Parameter: Treatment Value: 100uM ABA vs. No Treatment
  misc_feature: MA Experiment ID: 20000071 Result: Down-regulated in Transcription
  misc_feature: MA Experiment 20000071 PARAMETER Experiment Name: At_100uM_ABA_Mutants_cDNA_P Parameter: Plant Line Value: CS8104
  misc_feature: MA Experiment 20000071 PARAMETER Experiment Name: At_100uM_ABA_Mutants_cDNA_P Parameter: Timepoint (hr) Value: 6
  misc_feature: MA Experiment 20000071 PARAMETER Experiment Name: At_100uM_ABA_Mutants_cDNA_P Parameter: Tissue Value: Aerial
  misc_feature: MA Experiment 20000071 PARAMETER Experiment Name: At_100uM_ABA_Mutants_cDNA_P Parameter: Treatment Value: 100uM ABA vs. No Treatment
  misc_feature: MA Experiment ID: 20000072 Result: Down-regulated in Transcription
  misc_feature: MA Experiment 20000072 PARAMETER Experiment Name: At_100uM_ABA_Mutants_cDNA_P Parameter: Plant Line Value: CS8105
  misc_feature: MA Experiment 20000072 PARAMETER Experiment Name: At_100uM_ABA_Mutants_cDNA_P Parameter: Timepoint (hr) Value: 6
  misc_feature: MA Experiment 20000072 PARAMETER Experiment Name: At_100uM_ABA_Mutants_cDNA_P Parameter: Tissue Value: Aerial
  misc_feature: MA Experiment 20000072 PARAMETER Experiment Name: At_100uM_ABA_Mutants_cDNA_P Parameter: Treatment Value: 100uM ABA vs. No Treatment
  misc_feature: MA Experiment ID: 20000180 Result: Up-regulated in Transcription
  misc_feature: MA Experiment 20000180 PARAMETER Experiment Name: At_Germinating_Seeds_P Parameter: Age (hr) Value: 24 vs. 0
  misc_feature: MA Experiment 20000180 PARAMETER Experiment Name: At_Germinating_Seeds_P Parameter: Tissue Value: Germinating Seeds
  misc_feature: MA Experiment ID: 20000184 Result: Up-regulated in Transcription
  misc_feature: MA Experiment 20000184 PARAMETER Experiment Name: At_Shoots__P Parameter: Age (day) Value: 7
  misc_feature: MA Experiment 20000184 PARAMETER Experiment Name: At_Shoots__P Parameter: Tissue Value: Shoots vs. Whole Plant
  misc_feature: MA Experiment ID: 20000185 Result: Down-regulated in Transcription
  misc_feature: MA Experiment 20000185 PARAMETER Experiment Name: At_Roots__P Parameter: Age (day) Value: 7 vs. 21
  misc_feature: MA Experiment 20000185 PARAMETER Experiment Name: At_Roots__P Parameter: Organism Value: A. thaliana
  misc_feature: MA Experiment 20000185 PARAMETER Experiment Name: At_Roots__P Parameter: Tissue Value: Roots vs. Whole Plant
  misc_feature: MA Experiment ID: 20000234 Result: Up-regulated in Transcription
  misc_feature: MA Experiment 20000234 PARAMETER Experiment Name: At_Siliques_P Parameter: Age (day) Value: 21
  misc_feature: MA Experiment 20000234 PARAMETER Experiment Name: At_Siliques_P Parameter: Organism Value: A. thaliana
  misc_feature: MA Experiment 20000234 PARAMETER Experiment Name: At_Siliques_P Parameter: Plant Line Value: WS
  misc_feature: MA Experiment 20000234 PARAMETER Experiment Name: At_Siliques_P Parameter: Tissue Value: Less Than 5mm Siliques vs. Whole Plant
  misc_feature: MA Experiment ID: 20000235 Result: Up-regulated in Transcription
  misc_feature: MA Experiment 20000235 PARAMETER Experiment Name: At_Siliques_P Parameter: Age (day) Value: 21
  misc_feature: MA Experiment 20000235 PARAMETER Experiment Name: At_Siliques_P Parameter: Organism Value: A. thaliana
  misc_feature: MA Experiment 20000235 PARAMETER Experiment Name: At_Siliques_P Parameter: Plant Line Value: WS
  misc_feature: MA Experiment 20000235 PARAMETER Experiment Name: At_Siliques_P Parameter: Tissue Value: 5-10mm Siliques vs. Whole Plant
  misc_feature: MA Experiment ID: 20000437 Result: Down-regulated in Transcription
  misc_feature: MA Experiment 20000437 PARAMETER Experiment Name: At_Drought_P Parameter: Age (day) Value: 8
  misc_feature: MA Experiment 20000437 PARAMETER Experiment Name: At_Drought_P Parameter: Organism Value: A. thaliana
  misc_feature: MA Experiment 20000437 PARAMETER Experiment Name: At_Drought_P Parameter: Plant Line Value: WS
  misc_feature: MA Experiment 20000437 PARAMETER Experiment Name: At_Drought_P Parameter: Timepoint (hr) Value: 24
  misc_feature: MA Experiment 20000437 PARAMETER Experiment Name: At_Drought_P Parameter: Tissue Value: Whole Plant
  misc_feature: MA Experiment 20000437 PARAMETER Experiment Name: At_Drought_P Parameter: Treatment Value: Drought vs. No Drought
  misc_feature: MA Experiment ID: 20000438 Result: Up-regulated in Transcription
  misc_feature: MA Experiment 20000438 PARAMETER Experiment Name: At_Shoots__P Parameter: Age (day) Value: 14
  misc_feature: MA Experiment 20000438 PARAMETER Experiment Name: At_Shoots__P Parameter: Tissue Value: Shoots vs. Whole Plant
  misc_feature: MA Experiment ID: 20000439 Result: Down-regulated in Transcription
  misc_feature: MA Experiment 20000439 PARAMETER Experiment Name: At_Roots__P Parameter: Age (day) Value: 14 vs. 21
  misc_feature: MA Experiment 20000439 PARAMETER Experiment Name: At_Roots__P Parameter: Organism Value: A. thaliana
  misc_feature: MA Experiment 20000439 PARAMETER Experiment Name: At_Roots__P Parameter: Tissue Value: Roots vs. Whole Plant
  misc_feature: MA Experiment ID: 20000794 Result: Down-regulated in Transcription
  misc_feature: MA Experiment 20000794 PARAMETER Experiment Name: At_Petals_P Parameter: Age (day) Value: 23-25 days
  misc_feature: MA Experiment 20000794 PARAMETER Experiment Name: At_Petals_P Parameter: Plant Line Value: WS
  misc_feature: MA Experiment 20000794 PARAMETER Experiment Name: At_Petals_P Parameter: Tissue Value: Petals vs. Whole plant
  misc_feature: MA Experiment ID: 20001248 Result: Down-regulated in Transcription
  misc_feature: MA Experiment 20001248 PARAMETER Experiment Name: At_Far-red-induction_P Parameter: Age (day) Value: 7
  misc_feature: MA Experiment 20001248 PARAMETER Experiment Name: At_Far-red-induction_P Parameter: Light Value: Far-red vs. White
  misc_feature: MA Experiment 20001248 PARAMETER Experiment Name: At_Far-red-induction_P Parameter: Organism Value: A. thaliana
  misc_feature: MA Experiment 20001248 PARAMETER Experiment Name: At_Far-red-induction_P Parameter: Plant Line Value: Columbia
  misc_feature: MA Experiment 20001248 PARAMETER Experiment Name: At_Far-red-induction_P Parameter: Timepoint (hr) Value: 4
  misc_feature: MA Experiment 20001248 PARAMETER Experiment Name: At_Far-red-induction_P Parameter: Tissue Value: Whole Plant
  misc_feature: MA Experiment ID: 20001757 Result: Up-regulated in Transcription
  misc_feature: MA Experiment 20001757 PARAMETER Experiment Name: At_50mM_NH4NO3_L-to-H_P Parameter: Timepoint (hr) Value: 6
  misc_feature: MA Experiment 20001757 PARAMETER Experiment Name: At_50mM_NH4NO3_L-to-H_P Parameter: Tissue Value: Leaf
  misc_feature: MA Experiment 20001757 PARAMETER Experiment Name: At_50mM_NH4NO3_L-to-H_P Parameter: Treatment Value: 50mM NH4NO3 vs 100mM Mannitol
  misc_feature: MA Experiment ID: 20001904 Result: Down-regulated in Transcription
  misc_feature: MA Experiment 20001904 PARAMETER Experiment Name: At_Drought_Reproduction_P Parameter: Age (day) Value: 37
  misc_feature: MA Experiment 20001904 PARAMETER Experiment Name: At_Drought_Reproduction_P Parameter: Organism Value: A. thaliana
  misc_feature: MA Experiment 20001904 PARAMETER Experiment Name: At_Drought_Reproduction_P Parameter: Plant Line Value: WS
  misc_feature: MA Experiment 20001904 PARAMETER Experiment Name: At_Drought_Reproduction_P Parameter: Timepoint (day) Value: 7
  misc_feature: MA Experiment 20001904 PARAMETER Experiment Name: At_Drought_Reproduction_P Parameter: Tissue Value: Rosettes
  misc_feature: MA Experiment 20001904 PARAMETER Experiment Name: At_Drought_Reproduction_P Parameter: Treatment Value: Drought vs. No Drought
  misc_feature: MA Experiment ID: 20001906 Result: Down-regulated in Transcription
  misc_feature: MA Experiment 20001906 PARAMETER Experiment Name: At_Drought_Reproduction_P Parameter: Age (day) Value: 35
  misc_feature: MA Experiment 20001906 PARAMETER Experiment Name: At_Drought_Reproduction_P Parameter: Organism Value: A. thaliana
  misc_feature: MA Experiment 20001906 PARAMETER Experiment Name: At_Drought_Reproduction_P Parameter: Plant Line Value: WS
  misc_feature: MA Experiment 20001906 PARAMETER Experiment Name: At_Drought_Reproduction_P Parameter: Timepoint (day) Value: 5
  misc_feature: MA Experiment 20001906 PARAMETER Experiment Name: At_Drought_Reproduction_P Parameter: Tissue Value: Siliques
  misc_feature: MA Experiment 20001906 PARAMETER Experiment Name: At_Drought_Reproduction_P Parameter: Treatment Value: Drought vs. No Drought

SEQ ID NO: 34327 - protein, 175 aa, Arabidopsis thaliana; identical to SEQ ID NO: 30737
  peptide (1)..(175): Ceres Seq. ID no. 12332197
  misc_feature (95)..(175): Homolog of NCBI NO: 33146521 NR Description: unknown protein [Oryza sativa (japonica
  misc_feature (1)..(175): Homolog of NCBI NO: 34901972 NR Description: hypothetical protein~similar to Arabidopsis
  misc_feature (1)..(175): Homolog of NCBI NO: 18403267 NR Description: expressed protein
  misc_feature (1)..(175): Homolog of NCBI NO: 25373264 NR Description: unknown protein [imported] - Arabidopsis thaliana

SEQ ID NO: 34328 - DNA, 780 bp, Arabidopsis thaliana; identical to SEQ ID NO: 30738
  misc_feature (1)..(780): Ceres Seq. ID no. 12334285
  misc_feature: MA Experiment ID: 108595 Result: Down-regulated in Transcription
  misc_feature: MA Experiment 108595 PARAMETER Experiment Name: At_Ler-pi_Ovule_cDNA_P Parameter: Plant Line Value: null
  misc_feature: MA Experiment ID: 20000111 Result: Down-regulated in Transcription
  misc_feature: MA Experiment 20000111 PARAMETER Experiment Name: At_42deg_Heat_cDNA_P Parameter: Temperature (deg C) Value: 42 vs. 22
  misc_feature: MA Experiment 20000111 PARAMETER Experiment Name: At_42deg_Heat_cDNA_P Parameter: Timepoint (hr) Value: 6
  misc_feature: MA Experiment 20000111 PARAMETER Experiment Name: At_42deg_Heat_cDNA_P Parameter: Tissue Value: Aerial
  misc_feature: MA Experiment ID: 20000113 Result: Down-regulated in Transcription
  misc_feature: MA Experiment 20000113 PARAMETER Experiment Name: At_42deg_Heat_cDNA_P Parameter: Temperature (deg C) Value: 42 vs. 22
  misc_feature: MA Experiment 20000113 PARAMETER Experiment Name: At_42deg_Heat_cDNA_P Parameter: Timepoint (hr) Value: 8
  misc_feature: MA Experiment 20000113 PARAMETER Experiment Name: At_42deg_Heat_cDNA_P Parameter: Tissue Value: Aerial

SEQ ID NO: 34329 - protein, 153 aa, Arabidopsis thaliana; identical to SEQ ID NO: 30739
  peptide (1)..(153): Ceres Seq. ID no. 12334286
  misc_feature (4)..(150): Homolog of NCBI NO: 27882519 NR Description: Similar to ubiquitin-conjugating enzyme E2N
  misc_feature (4)..(150): Homolog of NCBI NO: 30583959 NR Description: Homo sapiens ubiquitin-conjugating enzyme E2N
  misc_feature (4)..(150): Homolog of NCBI NO: 28174992 NR Description: similar to ubiquitin-conjugating enzyme E2N [Mus
  misc_feature (4)..(150): Homolog of NCBI NO: 4507793 NR Description: ubiquitin-conjugating enzyme E2N (UBC13 homolog,
  misc_feature (4)..(150): Homolog of NCBI NO: 16758810 NR Description: ubiquitin-conjugating enzyme E2N (homologous to
  misc_feature (1)..(153): Homolog of NCBI NO: 5381319 NR Description: ubiquitin-conjugating enzyme E2 [Catharanthus
  misc_feature (1)..(153): Homolog of NCBI NO: 34911052 NR Description: ubiquitin-conjugating enzyme E2
  misc_feature (1)..(153): Homolog of NCBI NO: 18394416 NR Description: E2, ubiquitin-conjugating enzyme, putative
  misc_feature (1)..(153): Homolog of NCBI NO: 18412149 NR Description: E2, ubiquitin-conjugating enzyme, putative
  misc_feature (1)..(141): Homolog of NCBI NO: 25293666 NR Description: hypothetical protein F9K20.8 [imported] -

SEQ ID NO: 34330 - protein, 120 aa, Arabidopsis thaliana; identical to SEQ ID NO: 30740
  peptide (1)..(120): Ceres Seq. ID no. 12334287
  misc_feature (1)..(117): Homolog of NCBI NO: 27882519 NR Description: Similar to ubiquitin-conjugating enzyme E2N
  misc_feature (1)..(117): Homolog of NCBI NO: 30583959 NR Description: Homo sapiens ubiquitin-conjugating enzyme E2N
  misc_feature (1)..(117): Homolog of NCBI NO: 28174992 NR Description: similar to ubiquitin-conjugating enzyme E2N [Mus
  misc_feature (1)..(117): Homolog of NCBI NO: 4507793 NR Description: ubiquitin-conjugating enzyme E2N (UBC13 homolog,
  misc_feature (1)..(117): Homolog of NCBI NO: 16758810 NR Description: ubiquitin-conjugating enzyme E2N (homologous to
  misc_feature (1)..(120): Homolog of NCBI NO: 5381319 NR Description: ubiquitin-conjugating enzyme E2 [Catharanthus
  misc_feature (1)..(120): Homolog of NCBI NO: 34911052 NR Description: ubiquitin-conjugating enzyme E2
  misc_feature (1)..(120): Homolog of NCBI NO: 18394416 NR Description: E2, ubiquitin-conjugating enzyme, putative
  misc_feature (1)..(120): Homolog of NCBI NO: 18412149 NR Description: E2, ubiquitin-conjugating enzyme, putative
  misc_feature (1)..(108): Homolog of NCBI NO: 25293666 NR Description: hypothetical protein F9K20.8 [imported] -

SEQ ID NO: 34331 - protein, 114 aa, Arabidopsis thaliana; identical to SEQ ID NO: 30741
  peptide (1)..(114): Ceres Seq. ID no. 12334288
  misc_feature (1)..(111): Homolog of NCBI NO: 27882519 NR Description: Similar to ubiquitin-conjugating enzyme E2N
  misc_feature (1)..(111): Homolog of NCBI NO: 30583959 NR Description: Homo sapiens ubiquitin-conjugating enzyme E2N
  misc_feature (1)..(111): Homolog of NCBI NO: 28174992 NR Description: similar to ubiquitin-conjugating enzyme E2N [Mus
  misc_feature (1)..(111): Homolog of NCBI NO: 4507793 NR Description: ubiquitin-conjugating enzyme E2N (UBC13 homolog,
  misc_feature (1)..(111): Homolog of NCBI NO: 16758810 NR Description: ubiquitin-conjugating enzyme E2N (homologous to
  misc_feature (1)..(114): Homolog of NCBI NO: 5381319 NR Description: ubiquitin-conjugating enzyme E2 [Catharanthus
  misc_feature (1)..(114): Homolog of NCBI NO: 34911052 NR Description: ubiquitin-conjugating enzyme E2
  misc_feature (1)..(114): Homolog of NCBI NO: 18394416 NR Description: E2, ubiquitin-conjugating enzyme, putative
  misc_feature (1)..(114): Homolog of NCBI NO: 18412149 NR Description: E2, ubiquitin-conjugating enzyme, putative
  misc_feature (1)..(102): Homolog of NCBI NO: 25293666 NR Description: hypothetical protein F9K20.8 [imported] -

SEQ ID NO: 34332 - DNA, 1235 bp, Arabidopsis thaliana; identical to SEQ ID NO: 30742
  misc_feature (1)..(1235): Ceres Seq. ID no. 13490261
  misc_feature: MA Experiment ID: 108434 Result: Up-regulated in Transcription
  misc_feature: MA Experiment 108434 PARAMETER Experiment Name: At_Root_Tips_cDNA_P Parameter: Tissue Value: Root Tips
  misc_feature: MA Experiment ID: 108488 Result: Up-regulated in Transcription
  misc_feature: MA Experiment ID: 108595 Result: Down-regulated in Transcription
  misc_feature: MA Experiment 108595 PARAMETER Experiment Name: At_Ler-pi_Ovule_cDNA_P Parameter: Plant Line Value: null
  misc_feature: MA Experiment ID: 20000069 Result: Down-regulated in Transcription
  misc_feature: MA Experiment 20000069 PARAMETER Experiment Name: At_100uM_ABA_Mutants_cDNA_P Parameter: Plant Line Value: CS23
  misc_feature: MA Experiment 20000069 PARAMETER Experiment Name: At_100uM_ABA_Mutants_cDNA_P Parameter: Timepoint (hr) Value: 6
  misc_feature: MA Experiment 20000069 PARAMETER Experiment Name: At_100uM_ABA_Mutants_cDNA_P Parameter: Tissue Value: Aerial
  misc_feature: MA Experiment 20000069 PARAMETER Experiment Name: At_100uM_ABA_Mutants_cDNA_P Parameter: Treatment Value: 100uM ABA vs. No Treatment
  misc_feature: MA Experiment ID: 20000070 Result: Down-regulated in Transcription
  misc_feature: MA Experiment 20000070 PARAMETER Experiment Name: At_100uM_ABA_Mutants_cDNA_P Parameter: Plant Line Value: CS24
  misc_feature: MA Experiment 20000070 PARAMETER Experiment Name: At_100uM_ABA_Mutants_cDNA_P Parameter: Timepoint (hr) Value: 6
  misc_feature: MA Experiment 20000070 PARAMETER Experiment Name: At_100uM_ABA_Mutants_cDNA_P Parameter: Tissue Value: Aerial
  misc_feature: MA Experiment 20000070 PARAMETER Experiment Name: At_100uM_ABA_Mutants_cDNA_P Parameter: Treatment Value: 100uM ABA vs. No Treatment
  misc_feature: MA Experiment ID: 20000071 Result: Down-regulated in Transcription
  misc_feature: MA Experiment 20000071 PARAMETER Experiment Name: At_100uM_ABA_Mutants_cDNA_P Parameter: Plant Line Value: CS8104
  misc_feature: MA Experiment 20000071 PARAMETER Experiment Name: At_100uM_ABA_Mutants_cDNA_P Parameter: Timepoint (hr) Value: 6
  misc_feature: MA Experiment 20000071 PARAMETER Experiment Name: At_100uM_ABA_Mutants_cDNA_P Parameter: Tissue Value: Aerial
  misc_feature: MA Experiment 20000071 PARAMETER Experiment Name: At_100uM_ABA_Mutants_cDNA_P Parameter: Treatment Value: 100uM ABA vs. No Treatment
  misc_feature: MA Experiment ID: 20000072 Result: Down-regulated in Transcription
  misc_feature: MA Experiment 20000072 PARAMETER Experiment Name: At_100uM_ABA_Mutants_cDNA_P Parameter: Plant Line Value: CS8105
  misc_feature: MA Experiment 20000072 PARAMETER Experiment Name: At_100uM_ABA_Mutants_cDNA_P Parameter: Timepoint (hr) Value: 6
  misc_feature: MA Experiment 20000072 PARAMETER Experiment Name: At_100uM_ABA_Mutants_cDNA_P Parameter: Tissue Value: Aerial
  misc_feature: MA Experiment 20000072 PARAMETER Experiment Name: At_100uM_ABA_Mutants_cDNA_P Parameter: Treatment Value: 100uM ABA vs. No Treatment
  misc_feature: MA Experiment ID: 20000087 Result: Down-regulated in Transcription
  misc_feature: MA Experiment 20000087 PARAMETER Experiment Name: At_100uM_ABA_Mutants_cDNA_P Parameter: Plant Line Value: WS
  misc_feature: MA Experiment 20000087 PARAMETER Experiment Name: At_100uM_ABA_Mutants_cDNA_P Parameter: Timepoint (hr) Value: 6
  misc_feature: MA Experiment 20000087 PARAMETER Experiment Name: At_100uM_ABA_Mutants_cDNA_P Parameter: Tissue Value: Aerial
  misc_feature: MA Experiment 20000087 PARAMETER Experiment Name: At_100uM_ABA_Mutants_cDNA_P Parameter: Treatment Value: 100uM ABA vs. No Treatment
  misc_feature: MA Experiment ID: 20000117 Result: Down-regulated in Transcription
  misc_feature: MA Experiment 20000117 PARAMETER Experiment Name: At_100uM_ABA_Mutants_cDNA_P Parameter: Plant Line Value: Columbia
  misc_feature: MA Experiment 20000117 PARAMETER Experiment Name: At_100uM_ABA_Mutants_cDNA_P Parameter: Timepoint (hr) Value: 6
  misc_feature: MA Experiment 20000117 PARAMETER Experiment Name: At_100uM_ABA_Mutants_cDNA_P Parameter: Tissue Value: Aerial
  misc_feature: MA Experiment 20000117 PARAMETER Experiment Name: At_100uM_ABA_Mutants_cDNA_P Parameter: Treatment Value: 100uM ABA vs. No Treatment
  misc_feature: MA Experiment ID: 20000185 Result: Down-regulated in Transcription
  misc_feature: MA Experiment 20000185 PARAMETER Experiment Name: At_Roots__P Parameter: Age (day) Value: 7 vs. 21
  misc_feature: MA Experiment 20000185 PARAMETER Experiment Name: At_Roots__P Parameter: Organism Value: A. thaliana
  misc_feature: MA Experiment 20000185 PARAMETER Experiment Name: At_Roots__P Parameter: Tissue Value: Roots vs. Whole Plant
  misc_feature: MA Experiment ID: 20000437 Result: Down-regulated in Transcription
  misc_feature: MA Experiment 20000437 PARAMETER Experiment Name: At_Drought_P Parameter: Age (day) Value: 8
  misc_feature: MA Experiment 20000437 PARAMETER Experiment Name: At_Drought_P Parameter: Organism Value: A. thaliana
  misc_feature: MA Experiment 20000437 PARAMETER Experiment Name: At_Drought_P Parameter: Plant Line Value: WS
  misc_feature: MA Experiment 20000437 PARAMETER Experiment Name: At_Drought_P Parameter: Timepoint (hr) Value: 24
  misc_feature: MA Experiment 20000437 PARAMETER Experiment Name: At_Drought_P Parameter: Tissue Value: Whole Plant
  misc_feature: MA Experiment 20000437 PARAMETER Experiment Name: At_Drought_P Parameter: Treatment Value: Drought vs. No Drought
  misc_feature: MA Experiment ID: 20000439 Result: Down-regulated in Transcription
  misc_feature: MA Experiment 20000439 PARAMETER Experiment Name: At_Roots__P Parameter: Age (day) Value: 14 vs. 21
  misc_feature: MA Experiment 20000439 PARAMETER Experiment Name: At_Roots__P Parameter: Organism Value: A. thaliana
  misc_feature: MA Experiment 20000439 PARAMETER Experiment Name: At_Roots__P Parameter: Tissue Value: Roots vs. Whole Plant
  misc_feature: MA Experiment ID: 20001450 Result: Down-regulated in Transcription
  misc_feature: MA Experiment 20001450 PARAMETER Experiment Name: At_Far-red-induction_P Parameter: Age (day) Value: 7
  misc_feature: MA Experiment 20001450 PARAMETER Experiment Name: At_Far-red-induction_P Parameter: Light Value: Far-red vs. White
  misc_feature: MA Experiment 20001450 PARAMETER Experiment Name: At_Far-red-induction_P Parameter: Organism Value: A. thaliana
  misc_feature: MA Experiment 20001450 PARAMETER Experiment Name: At_Far-red-induction_P Parameter: Plant Line Value: Columbia
  misc_feature: MA Experiment 20001450 PARAMETER Experiment Name: At_Far-red-induction_P Parameter: Timepoint (hr) Value: 8
  misc_feature: MA Experiment 20001450 PARAMETER Experiment Name: At_Far-red-induction_P Parameter: Tissue Value: Whole Plant
  misc_feature: MA Experiment ID: 20001905 Result: Down-regulated in Transcription
  misc_feature: MA Experiment 20001905 PARAMETER Experiment Name: At_Drought_Reproduction_P Parameter: Age (day) Value: 40
  misc_feature: MA Experiment 20001905 PARAMETER Experiment Name: At_Drought_Reproduction_P Parameter: Organism Value: A. thaliana
  misc_feature: MA Experiment 20001905 PARAMETER Experiment Name: At_Drought_Reproduction_P Parameter: Plant Line Value: WS
  misc_feature: MA Experiment 20001905 PARAMETER Experiment Name: At_Drought_Reproduction_P Parameter: Timepoint (day) Value: 10
  misc_feature: MA Experiment 20001905 PARAMETER Experiment Name: At_Drought_Reproduction_P Parameter: Tissue Value: Rosettes
  misc_feature: MA Experiment 20001905 PARAMETER Experiment Name: At_Drought_Reproduction_P Parameter: Treatment Value: Drought vs. No Drought

SEQ ID NO: 34333 - protein, 275 aa, Arabidopsis thaliana; identical to SEQ ID NO: 30743
  peptide (1)..(275): Ceres Seq. ID no. 13490262
  misc_feature (109)..(273): Pfam Name: Ribosome recycling factor Pfam Description: Ribosome recycling factor
  misc_feature (98)..(275): Homolog of NCBI NO: 16331151 NR Description: ribosome releasing factor [Synechocystis sp. PCC
  misc_feature (98)..(275): Homolog of NCBI NO: 22297803 NR Description: ribosome releasing factor [Thermosynechococcus
  misc_feature (95)..(275): Homolog of NCBI NO: 23126085 NR Description: hypothetical protein [Nostoc punctiforme]
  misc_feature (98)..(275): Homolog of NCBI NO: 17228703 NR Description: ribosome recycling factor [Nostoc sp. PCC 7120]
  misc_feature (121)..(275): Homolog of NCBI NO: 629661 NR Description: ribosome releasing factor - carrot
  misc_feature (50)..(275): Homolog of NCBI NO: 34394208 NR Description: putative Ribosome recycling factor, chloroplast
  misc_feature (75)..(275): Homolog of NCBI NO: 7404451 NR Description: RIBOSOME RECYCLING FACTOR, CHLOROPLAST PRECURSOR
  misc_feature (58)..(275): Homolog of NCBI NO: 7388105 NR Description: Ribosome recycling factor, chloroplast precursor
  misc_feature (1)..(275): Homolog of NCBI NO: 11277801 NR Description: hypothetical protein F16M2.40 - Arabidopsis
  misc_feature (1)..(275): Homolog of NCBI NO: 18412657 NR Description: expressed protein [Arabidopsis thaliana]

SEQ ID NO: 34334 - protein, 173 aa, Arabidopsis thaliana; identical to SEQ ID NO: 30744
  peptide (1)..(173): Ceres Seq. ID no. 13490263
  misc_feature (7)..(171): Pfam Name: Ribosome recycling factor Pfam Description: Ribosome recycling factor
  misc_feature (1)..(173): Homolog of NCBI NO: 16331151 NR Description: ribosome releasing factor [Synechocystis sp. PCC
  misc_feature (1)..(173): Homolog of NCBI NO: 22297803 NR Description: ribosome releasing factor [Thermosynechococcus
  misc_feature (1)..(173): Homolog of NCBI NO: 23126085 NR Description: hypothetical protein [Nostoc punctiforme]
  misc_feature (1)..(173): Homolog of NCBI NO: 17228703 NR Description: ribosome recycling factor [Nostoc sp. PCC 7120]
  misc_feature (19)..(173): Homolog of NCBI NO: 629661 NR Description: ribosome releasing factor - carrot
  misc_feature (1)..(173): Homolog of NCBI NO: 34394208 NR Description: putative Ribosome recycling factor, chloroplast
  misc_feature (1)..(173): Homolog of NCBI NO: 7404451 NR Description: RIBOSOME RECYCLING FACTOR, CHLOROPLAST PRECURSOR
  misc_feature (1)..(173): Homolog of NCBI NO: 7388105 NR Description: Ribosome recycling factor, chloroplast precursor
  misc_feature (1)..(173): Homolog of NCBI NO: 11277801 NR Description: hypothetical protein F16M2.40 - Arabidopsis
  misc_feature (1)..(173): Homolog of NCBI NO: 18412657 NR Description: expressed protein [Arabidopsis thaliana]

SEQ ID NO: 34335 - protein, 150 aa, Arabidopsis thaliana; identical to SEQ ID NO: 30745
  peptide (1)..(150): Ceres Seq. ID no. 13490264
  misc_feature (1)..(148): Pfam Name: Ribosome recycling factor Pfam Description: Ribosome recycling factor
  misc_feature (1)..(150): Homolog of NCBI NO: 16331151 NR Description: ribosome releasing factor [Synechocystis sp. PCC
  misc_feature (1)..(150): Homolog of NCBI NO: 22297803 NR Description: ribosome releasing factor [Thermosynechococcus
  misc_feature (1)..(150): Homolog of NCBI NO: 23126085 NR Description: hypothetical protein [Nostoc punctiforme]
  misc_feature (1)..(150): Homolog of NCBI NO: 17228703 NR Description: ribosome recycling factor [Nostoc sp. PCC 7120]
  misc_feature (1)..(150): Homolog of NCBI NO: 629661 NR Description: ribosome releasing factor - carrot
  misc_feature (1)..(150): Homolog of NCBI NO: 34394208 NR Description: putative Ribosome recycling factor, chloroplast
  misc_feature (1)..(150): Homolog of NCBI NO: 7404451 NR Description: RIBOSOME RECYCLING FACTOR, CHLOROPLAST PRECURSOR
  misc_feature (1)..(150): Homolog of NCBI NO: 7388105 NR Description: Ribosome recycling factor, chloroplast precursor
  misc_feature (1)..(150): Homolog of NCBI NO: 11277801 NR Description: hypothetical protein F16M2.40 - Arabidopsis
  misc_feature (1)..(150): Homolog of NCBI NO: 18412657 NR Description: expressed protein [Arabidopsis thaliana]

SEQ ID NO: 34336 - DNA, 1298 bp, Arabidopsis thaliana; identical to SEQ ID NO: 30746
  misc_feature (1)..(1298): Ceres Seq. ID no. 12370642
  misc_feature: MA Experiment ID: 108434 Result: Down-regulated in Transcription
  misc_feature: MA Experiment 108434 PARAMETER Experiment Name: At_Root_Tips_cDNA_P Parameter: Tissue Value: Root Tips
  misc_feature: MA Experiment ID: 108579 Result: Up-regulated in Transcription
  misc_feature: MA Experiment 108579 PARAMETER Experiment Name: At_4deg_Cold_cDNA_P Parameter: Temperature (deg C) Value: 4 vs. 22
  misc_feature: MA Experiment 108579 PARAMETER Experiment Name: At_4deg_Cold_cDNA_P Parameter: Timepoint (hr) Value: 6
  misc_feature: MA Experiment 108579 PARAMETER Experiment Name: At_4deg_Cold_cDNA_P Parameter: Tissue Value: Aerial
  misc_feature: MA Experiment ID: 108595 Result: Down-regulated in Transcription
  misc_feature: MA Experiment 108595 PARAMETER Experiment Name: At_Ler-pi_Ovule_cDNA_P Parameter: Plant Line Value: null
  misc_feature: MA Experiment ID: 108668 Result: Down-regulated in Transcription
  misc_feature: MA Experiment 108668 PARAMETER Experiment Name: At_2mM_SA_cDNA_P Parameter: Plant Line Value: WS
  misc_feature: MA Experiment 108668 PARAMETER Experiment Name: At_2mM_SA_cDNA_P Parameter: Timepoint (hr) Value: 6
  misc_feature: MA Experiment 108668 PARAMETER Experiment Name: At_2mM_SA_cDNA_P Parameter: Treatment Value: 2mM SA vs. No Treatment
  misc_feature: MA Experiment ID: 20000071 Result: Up-regulated in Transcription
  misc_feature: MA Experiment 20000071 PARAMETER Experiment Name: At_100uM_ABA_Mutants_cDNA_P Parameter: Plant Line Value: CS8104
  misc_feature: MA Experiment 20000071 PARAMETER Experiment Name: At_100uM_ABA_Mutants_cDNA_P Parameter: Timepoint (hr) Value: 6
  misc_feature: MA Experiment 20000071 PARAMETER Experiment Name: At_100uM_ABA_Mutants_cDNA_P Parameter: Tissue Value: Aerial
  misc_feature: MA Experiment 20000071 PARAMETER Experiment Name: At_100uM_ABA_Mutants_cDNA_P Parameter: Treatment Value: 100uM ABA vs. No Treatment
  misc_feature: MA Experiment ID: 20000093 Result: Down-regulated in Transcription
  misc_feature: MA Experiment 20000093 PARAMETER Experiment Name: At_42deg_Heat_cDNA_P Parameter: Temperature (deg C) Value: 42 vs. 22
  misc_feature: MA Experiment 20000093 PARAMETER Experiment Name: At_42deg_Heat_cDNA_P Parameter: Timepoint (hr) Value: 0.5
  misc_feature: MA Experiment 20000093 PARAMETER Experiment Name: At_42deg_Heat_cDNA_P Parameter: Tissue Value: Aerial
  misc_feature: MA Experiment ID: 20000111 Result: Down-regulated in Transcription
  misc_feature: MA Experiment 20000111 PARAMETER Experiment Name: At_42deg_Heat_cDNA_P Parameter: Temperature (deg C) Value: 42 vs. 22
  misc_feature: MA Experiment 20000111 PARAMETER Experiment Name: At_42deg_Heat_cDNA_P Parameter: Timepoint (hr) Value: 6
  misc_feature: MA Experiment 20000111 PARAMETER Experiment Name: At_42deg_Heat_cDNA_P Parameter: Tissue Value: Aerial
  misc_feature: MA Experiment ID: 20000112 Result: Down-regulated in Transcription
  misc_feature: MA Experiment 20000112 PARAMETER Experiment Name: At_42deg_Heat_cDNA_P Parameter: Temperature (deg C) Value: 42 vs. 22
  misc_feature: MA Experiment 20000112 PARAMETER Experiment Name: At_42deg_Heat_cDNA_P Parameter: Timepoint (hr) Value: 2
  misc_feature: MA Experiment 20000112 PARAMETER Experiment Name: At_42deg_Heat_cDNA_P Parameter: Tissue Value: Aerial
  misc_feature: MA Experiment ID: 20000144 Result: Down-regulated in Transcription
  misc_feature: MA Experiment 20000144 PARAMETER Experiment Name: At_42deg_Heat_cDNA_P Parameter: Temperature (deg C) Value: 42 vs. 22
  misc_feature: MA Experiment 20000144 PARAMETER Experiment Name: At_42deg_Heat_cDNA_P Parameter: Timepoint (hr) Value: 1
  misc_feature: MA Experiment 20000144 PARAMETER Experiment Name: At_42deg_Heat_cDNA_P Parameter: Tissue Value: Aerial
  misc_feature: MA Experiment ID: 20000171 Result: Down-regulated in Transcription
  misc_feature: MA Experiment 20000171 PARAMETER Experiment Name: At_42deg_Heat_P Parameter: Age (day) Value: 14
  misc_feature: MA Experiment 20000171 PARAMETER Experiment Name: At_42deg_Heat_P Parameter: Organism Value: A. thaliana
  misc_feature: MA Experiment 20000171 PARAMETER Experiment Name: At_42deg_Heat_P Parameter: Plant Line Value: WS
  misc_feature: MA Experiment 20000171 PARAMETER Experiment Name: At_42deg_Heat_P Parameter: Temperature (deg C) Value: 42 vs. 22
  misc_feature: MA Experiment 20000171 PARAMETER Experiment Name: At_42deg_Heat_P Parameter: Timepoint (hr) Value: 1
  misc_feature: MA Experiment 20000171 PARAMETER Experiment Name: At_42deg_Heat_P Parameter: Tissue Value: Aerial
  misc_feature: MA Experiment ID: 20000182 Result: Down-regulated in Transcription
  misc_feature: MA Experiment 20000182 PARAMETER Experiment Name: At_2mM_SA_P Parameter: Age (day) Value: 14
  misc_feature: MA Experiment 20000182 PARAMETER Experiment Name: At_2mM_SA_P Parameter: Organism Value: A. thaliana
  misc_feature: MA Experiment 20000182 PARAMETER Experiment Name: At_2mM_SA_P Parameter: Plant Line Value: WS
  misc_feature: MA Experiment 20000182 PARAMETER Experiment Name: At_2mM_SA_P Parameter: Timepoint (hr) Value: 6
  misc_feature: MA Experiment 20000182 PARAMETER Experiment Name: At_2mM_SA_P Parameter: Tissue Value: Aerial
  misc_feature: MA Experiment 20000182 PARAMETER Experiment Name: At_2mM_SA_P Parameter: Treatment Value: 2mM SA vs. No Treatment
  misc_feature: MA Experiment ID: 20000437 Result: Up-regulated in Transcription
  misc_feature: MA Experiment 20000437 PARAMETER Experiment Name: At_Drought_P Parameter: Age (day) Value: 8
  misc_feature: MA Experiment 20000437 PARAMETER Experiment Name: At_Drought_P Parameter: Organism Value: A. thaliana
  misc_feature: MA Experiment 20000437 PARAMETER Experiment Name: At_Drought_P Parameter: Plant Line Value: WS
  misc_feature: MA Experiment 20000437 PARAMETER Experiment Name: At_Drought_P Parameter: Timepoint (hr) Value: 24
  misc_feature: MA Experiment 20000437 PARAMETER Experiment Name: At_Drought_P Parameter: Tissue Value: Whole Plant
  misc_feature: MA Experiment 20000437 PARAMETER Experiment Name: At_Drought_P Parameter: Treatment Value: Drought vs. No Drought
  misc_feature: MA Experiment ID: 20000794 Result: Down-regulated in Transcription
  misc_feature: MA Experiment 20000794 PARAMETER Experiment Name: At_Petals_P Parameter: Age (day) Value: 23-25 days
  misc_feature: MA Experiment 20000794 PARAMETER Experiment Name: At_Petals_P Parameter: Plant Line Value: WS
  misc_feature: MA Experiment 20000794 PARAMETER Experiment Name: At_Petals_P Parameter: Tissue Value: Petals vs. Whole plant
  misc_feature: MA Experiment ID: 20001556 Result: Up-regulated in Transcription
  misc_feature: MA Experiment 20001556 PARAMETER Experiment Name: At_Drought_Soil_Dry_P Parameter: Age (day) Value: 26
  misc_feature: MA Experiment 20001556 PARAMETER Experiment Name: At_Drought_Soil_Dry_P Parameter: Organism Value: A. thaliana
  misc_feature: MA Experiment 20001556 PARAMETER Experiment Name: At_Drought_Soil_Dry_P Parameter: Plant Line Value: WS
  misc_feature: MA Experiment 20001556 PARAMETER Experiment Name: At_Drought_Soil_Dry_P Parameter: Post Timepoint (hr) Value: None
  misc_feature: MA Experiment 20001556 PARAMETER Experiment Name: At_Drought_Soil_Dry_P Parameter: Post-Treatment Value: None
  misc_feature: MA Experiment 20001556 PARAMETER Experiment Name: At_Drought_Soil_Dry_P Parameter: Timepoint (day) Value: 12
  misc_feature: MA Experiment 20001556 PARAMETER Experiment Name: At_Drought_Soil_Dry_P Parameter: Treatment Value: Drought vs. No Drought
  misc_feature: MA Experiment ID: 20001905 Result: Up-regulated in Transcription
  misc_feature: MA Experiment 20001905 PARAMETER Experiment Name: At_Drought_Reproduction_P Parameter: Age (day) Value: 40
  misc_feature: MA Experiment 20001905 PARAMETER Experiment Name: At_Drought_Reproduction_P Parameter: Organism Value: A. thaliana
  misc_feature: MA Experiment 20001905 PARAMETER Experiment Name: At_Drought_Reproduction_P Parameter: Plant Line Value: WS
  misc_feature: MA Experiment 20001905 PARAMETER Experiment Name: At_Drought_Reproduction_P Parameter: Timepoint (day) Value: 10
  misc_feature: MA Experiment 20001905 PARAMETER Experiment Name: At_Drought_Reproduction_P Parameter: Tissue Value: Rosettes
  misc_feature: MA Experiment 20001905 PARAMETER Experiment Name: At_Drought_Reproduction_P Parameter: Treatment Value: Drought vs. No Drought
  misc_feature: MA Experiment ID: 20001908 Result: Up-regulated in Transcription
  misc_feature: MA Experiment 20001908 PARAMETER Experiment Name: At_Drought_Reproduction_P Parameter: Age (day) Value: 40
  misc_feature: MA Experiment 20001908 PARAMETER Experiment Name: At_Drought_Reproduction_P Parameter: Organism Value: A. thaliana
  misc_feature: MA Experiment 20001908 PARAMETER Experiment Name: At_Drought_Reproduction_P Parameter: Plant Line Value: WS
  misc_feature: MA Experiment 20001908 PARAMETER Experiment Name: At_Drought_Reproduction_P Parameter: Timepoint (day) Value: 10
  misc_feature: MA Experiment 20001908 PARAMETER Experiment Name: At_Drought_Reproduction_P Parameter: Tissue Value: Siliques
  misc_feature: MA Experiment 20001908 PARAMETER Experiment Name: At_Drought_Reproduction_P Parameter: Treatment Value: Drought vs. No Drought
  misc_feature: MA Experiment ID: 20001911 Result: Up-regulated in Transcription
  misc_feature: MA Experiment 20001911 PARAMETER Experiment Name: At_Drought_Reproduction_P Parameter: Age (day) Value: 40
  misc_feature: MA Experiment 20001911 PARAMETER Experiment Name: At_Drought_Reproduction_P Parameter: Organism Value: A. thaliana
  misc_feature: MA Experiment 20001911 PARAMETER Experiment Name: At_Drought_Reproduction_P Parameter: Plant Line Value: WS
  misc_feature: MA Experiment 20001911 PARAMETER Experiment Name: At_Drought_Reproduction_P Parameter: Timepoint (day) Value: 10
  misc_feature: MA Experiment 20001911 PARAMETER Experiment Name: At_Drought_Reproduction_P Parameter: Tissue Value: Flowers
  misc_feature: MA Experiment 20001911 PARAMETER Experiment Name: At_Drought_Reproduction_P Parameter: Treatment Value: Drought vs. No Drought

SEQ ID NO: 34337 - protein, 332 aa, Arabidopsis thaliana; identical to SEQ ID NO: 30747
  peptide (1)..(332): Ceres Seq. ID no. 12370643
  misc_feature (31)..(216): Pfam Name: Glycosyl hydrolases family 16 Pfam Description: Glycosyl hydrolases family 16
  misc_feature (26)..(329): Homolog of NCBI NO: 32470643 NR Description: putative xyloglucan endotransglycosylase-related
  misc_feature (7)..(325): Homolog of NCBI NO: 21618261 NR Description: endoxyloglucan transferase, putative [Arabidopsis
  misc_feature (7)..(325): Homolog of NCBI NO: 15222593 NR Description: xyloglucan endotransglycosylase (XTR4), putative
  misc_feature (7)..(325): Homolog of NCBI NO: 2129774 NR Description: xyloglucan endo-1,4-beta-D-glucanase (EC 3.2.1.-)
  misc_feature (24)..(324): Homolog of NCBI NO: 13560781 NR Description: endoxyloglucan transferase [Daucus carota]
  misc_feature (17)..(331): Homolog of NCBI NO: 6681351 NR Description: ETAG-A3 [Lycopersicon esculentum]
  misc_feature (1)..(332): Homolog of NCBI NO: 21553969 NR Description: putative xyloglucan-specific glucanase
  misc_feature (1)..(332): Homolog of NCBI NO: 15226364 NR Description: xyloglucan endotransglycosylase (EXGT-A3)
  misc_feature (1)..(332): Homolog of NCBI NO: 5533313 NR Description: endoxyloglucan transferase [Arabidopsis thaliana]
  misc_feature (1)..(332): Homolog of NCBI NO: 15223878 NR Description: xyloglucan endotransglycosylase (XTR2)

SEQ ID NO: 34338 - protein, 322 aa, Arabidopsis thaliana; identical to SEQ ID NO: 30748
  peptide (1)..(322): Ceres Seq. ID no. 12370644
  misc_feature (21)..(206): Pfam Name: Glycosyl hydrolases family 16 Pfam Description: Glycosyl hydrolases family 16
  misc_feature (16)..(319): Homolog of NCBI NO: 32470643 NR Description: putative xyloglucan endotransglycosylase-related
  misc_feature (1)..(315): Homolog of NCBI NO: 21618261 NR Description: endoxyloglucan transferase, putative [Arabidopsis
  misc_feature (1)..(315): Homolog of NCBI NO: 15222593 NR Description: xyloglucan endotransglycosylase (XTR4), putative
  misc_feature (1)..(315): Homolog of NCBI NO: 2129774 NR Description: xyloglucan endo-1,4-beta-D-glucanase (EC 3.2.1.-)
  misc_feature (14)..(314): Homolog of NCBI NO: 13560781 NR Description: endoxyloglucan transferase [Daucus carota]
  misc_feature (7)..(321): Homolog of NCBI NO: 6681351 NR Description: ETAG-A3 [Lycopersicon esculentum]
  misc_feature (1)..(322): Homolog of NCBI NO: 21553969 NR Description: putative xyloglucan-specific glucanase
  misc_feature (1)..(322): Homolog of NCBI NO: 15226364 NR Description: xyloglucan endotransglycosylase (EXGT-A3)
  misc_feature (1)..(322): Homolog of NCBI NO: 5533313 NR Description: endoxyloglucan transferase [Arabidopsis thaliana]
  misc_feature (1)..(322): Homolog of NCBI NO: 15223878 NR Description: xyloglucan endotransglycosylase (XTR2)

SEQ ID NO: 34339 - DNA, 1290 bp, Arabidopsis thaliana; identical to SEQ ID NO: 30749
  misc_feature (1)..(1290): Ceres Seq. ID no. 13576771
  misc_feature: MA Experiment ID: 20000072 Result: Down-regulated in Transcription
  misc_feature: MA Experiment 20000072 PARAMETER Experiment Name: At_100uM_ABA_Mutants_cDNA_P Parameter: Plant Line Value: CS8105
  misc_feature: MA Experiment 20000072 PARAMETER Experiment Name: At_100uM_ABA_Mutants_cDNA_P Parameter: Timepoint (hr) Value: 6
  misc_feature: MA Experiment 20000072 PARAMETER Experiment Name: At_100uM_ABA_Mutants_cDNA_P Parameter: Tissue Value: Aerial
  misc_feature: MA Experiment 20000072 PARAMETER Experiment Name: At_100uM_ABA_Mutants_cDNA_P Parameter: Treatment Value: 100uM ABA vs. No Treatment
  misc_feature: MA Experiment ID: 20000086 Result: Down-regulated in Transcription
  misc_feature: MA Experiment 20000086 PARAMETER Experiment Name: At_100uM_ABA_Mutants_cDNA_P Parameter: Plant Line Value: CS22
  misc_feature: MA Experiment 20000086 PARAMETER Experiment Name: At_100uM_ABA_Mutants_cDNA_P Parameter: Timepoint (hr) Value: 6
  misc_feature: MA Experiment 20000086 PARAMETER Experiment Name: At_100uM_ABA_Mutants_cDNA_P Parameter: Tissue Value: Aerial
  misc_feature: MA Experiment 20000086 PARAMETER Experiment Name: At_100uM_ABA_Mutants_cDNA_P Parameter: Treatment Value: 100uM ABA vs. No Treatment
  misc_feature: MA Experiment ID: 20000087 Result: Down-regulated in Transcription
  misc_feature: MA Experiment 20000087 PARAMETER Experiment Name: At_100uM_ABA_Mutants_cDNA_P Parameter: Plant Line Value: WS
  misc_feature: MA Experiment 20000087 PARAMETER Experiment Name: At_100uM_ABA_Mutants_cDNA_P Parameter: Timepoint (hr) Value: 6
  misc_feature: MA Experiment 20000087 PARAMETER Experiment Name: At_100uM_ABA_Mutants_cDNA_P Parameter: Tissue Value: Aerial
  misc_feature: MA Experiment 20000087 PARAMETER Experiment Name: At_100uM_ABA_Mutants_cDNA_P Parameter: Treatment Value: 100uM ABA vs. No Treatment
  misc_feature: MA Experiment ID: 20000437 Result: Down-regulated in Transcription
  misc_feature: MA Experiment 20000437 PARAMETER Experiment Name: At_Drought_P Parameter: Age (day) Value: 8
  misc_feature: MA Experiment 20000437 PARAMETER Experiment Name: At_Drought_P Parameter: Organism Value: A. thaliana
  misc_feature: MA Experiment 20000437 PARAMETER Experiment Name: At_Drought_P Parameter: Plant Line Value: WS
  misc_feature: MA Experiment 20000437 PARAMETER Experiment Name: At_Drought_P Parameter: Timepoint (hr) Value: 24
  misc_feature: MA Experiment 20000437 PARAMETER Experiment Name: At_Drought_P Parameter: Tissue Value: Whole Plant
  misc_feature: MA Experiment 20000437 PARAMETER Experiment Name: At_Drought_P Parameter: Treatment Value: Drought vs. No Drought

SEQ ID NO: 34340 - protein, 265 aa, Arabidopsis thaliana; identical to SEQ ID NO: 30750
  peptide (1)..(265): Ceres Seq. ID no. 13576772
  misc_feature (77)..(215): Pfam Name: Vesicle transport v-SNARE protein Pfam Description: Vesicle transport v-SNARE protein
  misc_feature (77)..(215): Pfam Name: Vesicle transport v-SNARE protein Pfam Description: Vesicle transport v-SNARE protein
  misc_feature (1)..(94): Homolog of NCBI NO: 25370781 NR Description: F11A17.20 [imported] - Arabidopsis thaliana
  misc_feature (7)..(262): Homolog of NCBI NO: 25370780 NR Description: hypothetical protein At2g35190 [imported] -
  misc_feature (7)..(262): Homolog of NCBI NO: 27805643 NR Description: Novel plant SNARE 11 (AtNPSN11)
  misc_feature (7)..(262): Homolog of NCBI NO: 18403771 NR Description: expressed protein [Arabidopsis thaliana]
  misc_feature (17)..(265): Homolog of NCBI NO: 25370781 NR Description: F11A17.20 [imported] - Arabidopsis thaliana
  misc_feature (1)..(94): Homolog of NCBI NO: 25370781 NR Description: F11A17.20 [imported] - Arabidopsis thaliana
  misc_feature (7)..(262): Homolog of NCBI NO: 27805643 NR Description: Novel plant SNARE 11 (AtNPSN11)
  misc_feature (17)..(265): Homolog of NCBI NO: 25370781 NR Description: F11A17.20 [imported] - Arabidopsis thaliana
  misc_feature (1)..(265): Homolog of NCBI NO: 22330102 NR Description: expressed protein [Arabidopsis thaliana]
  misc_feature (1)..(264): Homolog of NCBI NO: 18401508 NR Description: expressed protein [Arabidopsis thaliana]
  misc_feature (1)..(264): Homolog of NCBI NO: 21536876 NR Description: unknown [Arabidopsis thaliana]
  misc_feature (1)..(261): Homolog of NCBI NO: 23237830 NR Description: contains ESTs
  misc_feature (1)..(257): Homolog of NCBI NO: 34896946 NR Description: putative vesicle soluble NSF attachment protein
  misc_feature (7)..(262): Homolog of NCBI NO: 18403771 NR Description: expressed protein [Arabidopsis thaliana]
  misc_feature (7)..(262): Homolog of NCBI NO: 25370780 NR Description: hypothetical protein At2g35190 [imported] -
  misc_feature (1)..(257): Homolog of NCBI NO: 34896946 NR Description: putative vesicle soluble NSF attachment protein
  misc_feature (1)..(261): Homolog of NCBI NO: 23237830 NR Description: contains ESTs
  misc_feature (1)..(264): Homolog of NCBI NO: 21536876 NR Description: unknown [Arabidopsis thaliana]
  misc_feature (1)..(264): Homolog of NCBI NO: 18401508 NR Description: expressed protein [Arabidopsis thaliana]
  misc_feature (1)..(265): Homolog of NCBI NO: 22330102 NR Description: expressed protein [Arabidopsis thaliana]

SEQ ID NO: 34341 - protein, 259 aa, Arabidopsis thaliana; identical to SEQ ID NO: 30751
  peptide (1)..(259): Ceres Seq. ID no. 13576773
  misc_feature (71)..(209): Pfam Name: Vesicle transport v-SNARE protein Pfam Description: Vesicle transport v-SNARE protein
  misc_feature (71)..(209): Pfam Name: Vesicle transport v-SNARE protein Pfam Description: Vesicle transport v-SNARE protein
  misc_feature (1)..(88): Homolog of NCBI NO: 25370781 NR Description: F11A17.20 [imported] - Arabidopsis thaliana
  misc_feature (1)..(256): Homolog of NCBI NO: 25370780 NR Description: hypothetical protein At2g35190 [imported] -
  misc_feature (1)..(256): Homolog of NCBI NO: 27805643 NR Description: Novel plant SNARE 11 (AtNPSN11)
  misc_feature (1)..(256): Homolog of NCBI NO: 18403771 NR Description: expressed protein [Arabidopsis thaliana]
  misc_feature (11)..(259): Homolog of NCBI NO: 25370781 NR Description: F11A17.20 [imported] - Arabidopsis thaliana
  misc_feature (1)..(88): Homolog of NCBI NO: 25370781 NR Description: F11A17.20 [imported] - Arabidopsis thaliana
  misc_feature (1)..(256): Homolog of NCBI NO: 27805643 NR Description: Novel plant SNARE 11 (AtNPSN11)
  misc_feature (11)..(259): Homolog of NCBI NO: 25370781 NR Description: F11A17.20 [imported] - Arabidopsis thaliana
  misc_feature (1)..(259): Homolog of NCBI NO: 22330102 NR Description: expressed protein [Arabidopsis thaliana]
  misc_feature (1)..(258): Homolog of NCBI NO: 18401508 NR Description: expressed protein [Arabidopsis thaliana]
  misc_feature (1)..(258): Homolog of NCBI NO: 21536876 NR Description: unknown [Arabidopsis thaliana]
  misc_feature (1)..(255): Homolog of NCBI NO: 23237830 NR Description: contains ESTs
  misc_feature (1)..(251): Homolog of NCBI NO: 34896946 NR Description: putative vesicle soluble NSF attachment protein
  misc_feature (1)..(256): Homolog of NCBI NO: 18403771 NR Description: expressed protein [Arabidopsis thaliana]
  misc_feature (1)..(256): Homolog of NCBI NO: 25370780 NR Description: hypothetical protein At2g35190 [imported] -
  misc_feature (1)..(251): Homolog of NCBI NO: 34896946 NR Description: putative vesicle soluble NSF attachment protein
  misc_feature (1)..(255): Homolog of NCBI NO: 23237830 NR Description: contains ESTs
  misc_feature (1)..(258): Homolog of NCBI NO: 21536876 NR Description: unknown [Arabidopsis thaliana]
  misc_feature (1)..(258): Homolog of NCBI NO: 18401508 NR Description: expressed protein [Arabidopsis thaliana]
  misc_feature (1)..(259): Homolog of NCBI NO: 22330102 NR Description: expressed protein [Arabidopsis thaliana]

SEQ ID NO: 34342 - protein, 214 aa, Arabidopsis thaliana; identical to SEQ ID NO: 30752
  peptide (1)..(214): Ceres Seq. ID no. 13576774
  misc_feature (26)..(164): Pfam Name: Vesicle transport v-SNARE protein Pfam Description: Vesicle transport v-SNARE protein
  misc_feature (26)..(164): Pfam Name: Vesicle transport v-SNARE protein Pfam Description: Vesicle transport v-SNARE protein
  misc_feature (1)..(43): Homolog of NCBI NO: 25370781 NR Description: F11A17.20 [imported] - Arabidopsis thaliana
  misc_feature (1)..(211): Homolog of NCBI NO: 25370780 NR Description: hypothetical protein At2g35190 [imported] -
  misc_feature (1)..(211): Homolog of NCBI NO: 27805643 NR Description: Novel plant SNARE 11 (AtNPSN11)
  misc_feature (1)..(211): Homolog of NCBI NO: 18403771 NR Description: expressed protein [Arabidopsis thaliana]
  misc_feature (1)..(214): Homolog of NCBI NO: 25370781 NR Description: F11A17.20 [imported] - Arabidopsis thaliana
  misc_feature (1)..(43): Homolog of NCBI NO: 25370781 NR Description: F11A17.20 [imported] - Arabidopsis thaliana
  misc_feature (1)..(211): Homolog of NCBI NO: 27805643 NR Description: Novel plant SNARE 11 (AtNPSN11)
  misc_feature (1)..(214): Homolog of NCBI NO: 25370781 NR Description: F11A17.20 [imported] - Arabidopsis thaliana
  misc_feature (1)..(214): Homolog of NCBI NO: 22330102 NR Description: expressed protein [Arabidopsis thaliana]
  misc_feature (1)..(213): Homolog of NCBI NO: 18401508 NR Description: expressed protein [Arabidopsis thaliana]
  misc_feature (1)..(213): Homolog of NCBI NO: 21536876 NR Description: unknown [Arabidopsis thaliana]
  misc_feature (1)..(210): Homolog of NCBI NO: 23237830 NR Description: contains ESTs
  misc_feature (1)..(206): Homolog of NCBI NO: 34896946 NR Description: putative vesicle soluble NSF attachment protein
  misc_feature (1)..(211): Homolog of NCBI NO: 18403771 NR Description: expressed protein [Arabidopsis thaliana]
  misc_feature (1)..(211): Homolog of NCBI NO: 25370780 NR Description: hypothetical protein At2g35190 [imported] -
  misc_feature (1)..(206): Homolog of NCBI NO: 34896946 NR Description: putative vesicle soluble NSF attachment protein
  misc_feature (1)..(210): Homolog of NCBI NO: 23237830 NR Description: contains ESTs
  misc_feature (1)..(213): Homolog of NCBI NO: 21536876 NR Description: unknown [Arabidopsis thaliana]
  misc_feature (1)..(213): Homolog of NCBI NO: 18401508 NR Description: expressed protein [Arabidopsis thaliana]
  misc_feature (1)..(214): Homolog of NCBI NO: 22330102 NR Description: expressed protein [Arabidopsis thaliana]

SEQ ID NO: 34343 - DNA, 1293 bp, Arabidopsis thaliana; identical to SEQ ID NO: 30753
  misc_feature (1)..(1293): Ceres Seq. ID no. 13489292
  misc_feature: MA Experiment ID: 108461 Result: Down-regulated in Transcription
  misc_feature: MA Experiment 108461 PARAMETER Experiment Name: At_Germinating_Seeds_cDNA_P Parameter: Age (day) Value: 1 vs. 0
  misc_feature: MA Experiment 108461 PARAMETER Experiment Name: At_Germinating_Seeds_cDNA_P Parameter: Tissue Value: Germinating Seeds
  misc_feature: MA Experiment ID: 108573 Result: Up-regulated in Transcription
  misc_feature: MA Experiment 108573 PARAMETER Experiment Name: At_Drought_cDNA_P Parameter: Timepoint (hr) Value: 6
  misc_feature: MA Experiment 108573 PARAMETER Experiment Name: At_Drought_cDNA_P Parameter: Tissue Value: Aerial
  misc_feature: MA Experiment 108573 PARAMETER Experiment Name: At_Drought_cDNA_P Parameter: Treatment Value: Drought vs. No Drought
  misc_feature: MA Experiment ID: 108579 Result: Down-regulated in Transcription
  misc_feature: MA Experiment 108579 PARAMETER Experiment Name: At_4deg_Cold_cDNA_P Parameter: Temperature (deg C) Value: 4 vs. 22
  misc_feature: MA Experiment 108579 PARAMETER Experiment Name: At_4deg_Cold_cDNA_P Parameter: Timepoint (hr) Value: 6
  misc_feature: MA Experiment 108579 PARAMETER Experiment Name: At_4deg_Cold_cDNA_P Parameter: Tissue Value: Aerial
  misc_feature: MA Experiment ID: 20000113 Result: Up-regulated in Transcription
  misc_feature: MA Experiment 20000113 PARAMETER Experiment Name: At_42deg_Heat_cDNA_P Parameter: Temperature (deg C) Value: 42 vs. 22
  misc_feature: MA Experiment 20000113 PARAMETER Experiment Name: At_42deg_Heat_cDNA_P Parameter: Timepoint (hr) Value: 8
  misc_feature: MA Experiment 20000113 PARAMETER Experiment Name: At_42deg_Heat_cDNA_P Parameter: Tissue Value: Aerial
  misc_feature: MA Experiment ID: 20000180 Result: Down-regulated in Transcription
  misc_feature: MA Experiment 20000180 PARAMETER Experiment Name: At_Germinating_Seeds_P Parameter: Age (hr) Value: 24 vs. 0
  misc_feature: MA Experiment 20000180 PARAMETER Experiment Name: At_Germinating_Seeds_P Parameter: Tissue Value: Germinating Seeds
  misc_feature: MA Experiment ID: 20000214 Result: Down-regulated in Transcription
  misc_feature: MA Experiment 20000214 PARAMETER Experiment Name: At_4deg_Cold_P Parameter: Timepoint (hr) Value: 6
  misc_feature: MA Experiment ID: 20000234 Result: Down-regulated in Transcription
  misc_feature: MA Experiment 20000234 PARAMETER Experiment Name: At_Siliques_P Parameter: Age (day) Value: 21
  misc_feature: MA Experiment 20000234 PARAMETER Experiment Name: At_Siliques_P Parameter: Organism Value: A. thaliana
  misc_feature: MA Experiment 20000234 PARAMETER Experiment Name: At_Siliques_P Parameter: Plant Line Value: WS
  misc_feature: MA Experiment 20000234 PARAMETER Experiment Name: At_Siliques_P Parameter: Tissue Value: Less Than 5mm Siliques vs. Whole Plant
  misc_feature: MA Experiment ID: 20000264 Result: Down-regulated in Transcription
  misc_feature: MA Experiment 20000264 PARAMETER Experiment Name: At_Open_Flower_P Parameter: Age (day) Value: 21
  misc_feature: MA Experiment 20000264 PARAMETER Experiment Name: At_Open_Flower_P Parameter: Plant Line Value: WS
  misc_feature: MA Experiment 20000264 PARAMETER Experiment Name: At_Open_Flower_P Parameter: Tissue Value: Open Flower vs. Whole Plant
  misc_feature: MA Experiment ID: 20001248 Result: Up-regulated in Transcription
  misc_feature: MA Experiment 20001248 PARAMETER Experiment Name: At_Far-red-induction_P Parameter: Age (day) Value: 7
  misc_feature: MA Experiment 20001248 PARAMETER Experiment Name: At_Far-red-induction_P Parameter: Light Value: Far-red vs. White
  misc_feature: MA Experiment 20001248 PARAMETER Experiment Name: At_Far-red-induction_P Parameter: Organism Value: A. thaliana
  misc_feature: MA Experiment 20001248 PARAMETER Experiment Name: At_Far-red-induction_P Parameter: Plant Line Value: Columbia
  misc_feature: MA Experiment 20001248 PARAMETER Experiment Name: At_Far-red-induction_P Parameter: Timepoint (hr) Value: 4
  misc_feature: MA Experiment 20001248 PARAMETER Experiment Name: At_Far-red-induction_P Parameter: Tissue Value: Whole Plant
  misc_feature: MA Experiment ID: 20001450 Result: Up-regulated in Transcription
  misc_feature: MA Experiment 20001450 PARAMETER Experiment Name: At_Far-red-induction_P Parameter: Age (day) Value: 7
  misc_feature: MA Experiment 20001450 PARAMETER Experiment Name: At_Far-red-induction_P Parameter: Light Value: Far-red vs. White
  misc_feature: MA Experiment 20001450 PARAMETER Experiment Name: At_Far-red-induction_P Parameter: Organism Value: A. thaliana
  misc_feature: MA Experiment 20001450 PARAMETER Experiment Name: At_Far-red-induction_P Parameter: Plant Line Value: Columbia
  misc_feature: MA Experiment 20001450 PARAMETER Experiment Name: At_Far-red-induction_P Parameter: Timepoint (hr) Value: 8
  misc_feature: MA Experiment 20001450 PARAMETER Experiment Name: At_Far-red-induction_P Parameter: Tissue Value: Whole Plant
  misc_feature: MA Experiment ID: 20001560 Result: Down-regulated in Transcription
  misc_feature: MA Experiment 20001560 PARAMETER Experiment Name: At_Drought_Soil_Dry_P Parameter: Age (day) Value: 28
  misc_feature: MA Experiment 20001560 PARAMETER Experiment Name: At_Drought_Soil_Dry_P Parameter: Organism Value: A. thaliana
  misc_feature: MA Experiment 20001560 PARAMETER Experiment Name: At_Drought_Soil_Dry_P Parameter: Plant Line Value: WS
  misc_feature: MA Experiment 20001560 PARAMETER Experiment Name: At_Drought_Soil_Dry_P Parameter: Post Timepoint (hr) Value: None
  misc_feature: MA Experiment 20001560 PARAMETER Experiment Name: At_Drought_Soil_Dry_P Parameter: Post-Treatment Value: None
  misc_feature: MA Experiment 20001560 PARAMETER Experiment Name: At_Drought_Soil_Dry_P Parameter: Timepoint (day) Value: 14
  misc_feature: MA Experiment 20001560 PARAMETER Experiment Name: At_Drought_Soil_Dry_P Parameter: Treatment Value: Drought vs. No Drought
  misc_feature: MA Experiment ID: 20001911 Result: Up-regulated in Transcription
  misc_feature: MA Experiment 20001911 PARAMETER Experiment Name: At_Drought_Reproduction_P Parameter: Age (day) Value: 40
  misc_feature: MA Experiment 20001911 PARAMETER Experiment Name: At_Drought_Reproduction_P Parameter: Organism Value: A. thaliana
  misc_feature: MA Experiment 20001911 PARAMETER Experiment Name: At_Drought_Reproduction_P Parameter: Plant Line Value: WS
  misc_feature: MA Experiment 20001911 PARAMETER Experiment Name: At_Drought_Reproduction_P Parameter: Timepoint (day) Value: 10
  misc_feature: MA Experiment 20001911 PARAMETER Experiment Name: At_Drought_Reproduction_P Parameter: Tissue Value: Flowers
  misc_feature: MA Experiment 20001911 PARAMETER Experiment Name: At_Drought_Reproduction_P Parameter: Treatment Value: Drought vs. No Drought

SEQ ID NO: 34344 - protein, 365 aa, Arabidopsis thaliana; identical to SEQ ID NO: 30754
  peptide (1)..(365): Ceres Seq. ID no. 13489293
  misc_feature (218)..(280): Pfam Name: bZIP transcription factor Pfam Description: bZIP transcription factor
  misc_feature (159)..(349): Homolog of NCBI NO: 21553831 NR Description: transcriptional activator RF2a, putative
  misc_feature (159)..(349): Homolog of NCBI NO: 15221391 NR Description: bZIP protein [Arabidopsis thaliana]
  misc_feature (149)..(352): Homolog of NCBI NO: 7489564 NR Description: probable transcription activator RF2a - rice
  misc_feature (159)..(352): Homolog of NCBI NO: 15224665 NR Description: bZIP transcription factor (POSF21) [Arabidopsis
  misc_feature (176)..(347): Homolog of NCBI NO: 29367343 NR Description: bZIP-like protein [Oryza sativa (japonica
  misc_feature (170)..(352): Homolog of NCBI NO: 2921823 NR Description: shoot-forming PKSF1 [Paulownia kawakamii]
  misc_feature (38)..(365): Homolog of NCBI NO: 8777512 NR Description: bZIP transcriptional activator RSG [Nicotiana
  misc_feature (105)..(365): Homolog of NCBI NO: 7258340 NR Description: VirE2-interacting protein VIP1 [Arabidopsis
  misc_feature (25)..(365): Homolog of NCBI NO: 21553989 NR Description: VirE2-interacting protein VIP1 [Arabidopsis
  misc_feature (25)..(365): Homolog of NCBI NO: 18400998 NR Description: VirE2-interacting protein VIP1 [Arabidopsis

SEQ ID NO: 34345 - protein, 341 aa, Arabidopsis thaliana; identical to SEQ ID NO: 30755
  peptide (1)..(341): Ceres Seq. ID no. 13489294
  misc_feature (194)..(256): Pfam Name: bZIP transcription factor Pfam Description: bZIP transcription factor
  misc_feature (135)..(325): Homolog of NCBI NO: 21553831 NR Description: transcriptional activator RF2a, putative
  misc_feature (135)..(325): Homolog of NCBI NO: 15221391 NR Description: bZIP protein [Arabidopsis thaliana]
  misc_feature (125)..(328): Homolog of NCBI NO: 7489564 NR Description: probable transcription activator RF2a - rice
  misc_feature (135)..(328): Homolog of NCBI NO: 15224665 NR Description: bZIP transcription factor (POSF21) [Arabidopsis
  misc_feature (152)..(323): Homolog of NCBI NO: 29367343 NR Description: bZIP-like protein [Oryza sativa (japonica
  misc_feature (146)..(328): Homolog of NCBI NO: 2921823 NR Description: shoot-forming PKSF1 [Paulownia kawakamii]
  misc_feature (14)..(341): Homolog of NCBI NO: 8777512 NR Description: bZIP transcriptional activator RSG [Nicotiana
  misc_feature (81)..(341): Homolog of NCBI NO: 7258340 NR Description: VirE2-interacting protein VIP1 [Arabidopsis
  misc_feature (1)..(341): Homolog of NCBI NO: 21553989 NR Description: VirE2-interacting protein VIP1 [Arabidopsis
  misc_feature (1)..(341): Homolog of NCBI NO: 18400998 NR Description: VirE2-interacting protein VIP1 [Arabidopsis

SEQ ID NO: 34346 - protein, 323 aa, Arabidopsis thaliana; identical to SEQ ID NO: 30756
  peptide (1)..(323): Ceres Seq. ID no. 13489295
  misc_feature (176)..(238): Pfam Name: bZIP transcription factor Pfam Description: bZIP transcription factor
  misc_feature (117)..(307): Homolog of NCBI NO: 21553831 NR Description: transcriptional activator RF2a, putative
  misc_feature (117)..(307): Homolog of NCBI NO: 15221391 NR Description: bZIP protein [Arabidopsis thaliana]
  misc_feature (107)..(310): Homolog of NCBI NO: 7489564 NR Description: probable transcription activator RF2a - rice
  misc_feature (117)..(310): Homolog of NCBI NO: 15224665 NR Description: bZIP transcription factor (POSF21) [Arabidopsis
  misc_feature (134)..(305): Homolog of NCBI NO: 29367343 NR Description: bZIP-like protein [Oryza sativa (japonica
  misc_feature (128)..(310): Homolog of NCBI NO: 2921823 NR Description: shoot-forming PKSF1 [Paulownia kawakamii]
  misc_feature (1)..(323): Homolog of NCBI NO: 8777512 NR Description: bZIP transcriptional activator RSG [Nicotiana
  misc_feature (63)..(323): Homolog of NCBI NO: 7258340 NR Description: VirE2-interacting protein VIP1 [Arabidopsis
  misc_feature (1)..(323): Homolog of NCBI NO: 21553989 NR Description: VirE2-interacting protein VIP1 [Arabidopsis
  misc_feature (1)..(323): Homolog of NCBI NO: 18400998 NR Description: VirE2-interacting protein VIP1 [Arabidopsis

SEQ ID NO: 34347 - DNA, 1430 bp, Arabidopsis thaliana; identical to SEQ ID NO: 30757
  misc_feature (1)..(1430): Ceres Seq. ID no. 12422339
  misc_feature: MA Experiment ID: 20000173 Result: Down-regulated in Transcription
  misc_feature: MA Experiment 20000173 PARAMETER Experiment Name: At_42deg_Heat_P Parameter: Age (day) Value: 14
  misc_feature: MA Experiment 20000173 PARAMETER Experiment Name: At_42deg_Heat_P Parameter: Organism Value: A. thaliana
  misc_feature: MA Experiment 20000173 PARAMETER Experiment Name: At_42deg_Heat_P Parameter: Plant Line Value: WS
  misc_feature: MA Experiment 20000173 PARAMETER Experiment Name: At_42deg_Heat_P Parameter: Temperature (deg C) Value: 42 vs. 22
  misc_feature: MA Experiment 20000173 PARAMETER Experiment Name: At_42deg_Heat_P Parameter: Timepoint (hr) Value: 6
  misc_feature: MA Experiment 20000173 PARAMETER Experiment Name: At_42deg_Heat_P Parameter: Tissue Value: Aerial
  misc_feature: MA Experiment ID: 20000179 Result: Up-regulated in Transcription
  misc_feature: MA Experiment 20000179 PARAMETER Experiment Name: At_Germinating_Seeds_P Parameter: Age (hr) Value: 6 vs. 0
  misc_feature: MA Experiment 20000179 PARAMETER Experiment Name: At_Germinating_Seeds_P Parameter: Tissue Value: Germinating Seeds
  misc_feature: MA Experiment ID: 20000180 Result: Up-regulated in Transcription
  misc_feature: MA Experiment 20000180 PARAMETER Experiment Name: At_Germinating_Seeds_P Parameter: Age (hr) Value: 24 vs. 0
  misc_feature: MA Experiment 20000180 PARAMETER Experiment Name: At_Germinating_Seeds_P Parameter: Tissue Value: Germinating Seeds
  misc_feature: MA Experiment ID: 20000227 Result: Up-regulated in Transcription
  misc_feature: MA Experiment 20000227 PARAMETER Experiment Name: At_Root-Tips-vs-Tops_P Parameter: Tissue Value: Root Tips vs. Root Tops
  misc_feature: MA Experiment ID: 20000437 Result: Up-regulated in Transcription
  misc_feature: MA Experiment 20000437 PARAMETER Experiment Name: At_Drought_P Parameter: Age (day) Value: 8
  misc_feature: MA Experiment 20000437 PARAMETER Experiment Name: At_Drought_P Parameter: Organism Value: A. thaliana
  misc_feature: MA Experiment 20000437 PARAMETER Experiment Name: At_Drought_P Parameter: Plant Line Value: WS
  misc_feature: MA Experiment 20000437 PARAMETER Experiment Name: At_Drought_P Parameter: Timepoint (hr) Value: 24
  misc_feature: MA Experiment 20000437 PARAMETER Experiment Name: At_Drought_P Parameter: Tissue Value: Whole Plant
  misc_feature: MA Experiment 20000437 PARAMETER Experiment Name: At_Drought_P Parameter: Treatment Value: Drought vs. No Drought
  misc_feature: MA Experiment ID: 20001248 Result: Up-regulated in Transcription
  misc_feature: MA Experiment 20001248 PARAMETER Experiment Name: At_Far-red-induction_P Parameter: Age (day) Value: 7
  misc_feature: MA Experiment 20001248 PARAMETER Experiment Name: At_Far-red-induction_P Parameter: Light Value: Far-red vs. White
  misc_feature: MA Experiment 20001248 PARAMETER Experiment Name: At_Far-red-induction_P Parameter: Organism Value: A. thaliana
  misc_feature: MA Experiment 20001248 PARAMETER Experiment Name: At_Far-red-induction_P Parameter: Plant Line Value: Columbia
  misc_feature: MA Experiment 20001248 PARAMETER Experiment Name: At_Far-red-induction_P Parameter: Timepoint (hr) Value: 4
  misc_feature: MA Experiment 20001248 PARAMETER Experiment Name: At_Far-red-induction_P Parameter: Tissue Value: Whole Plant
  misc_feature: MA Experiment ID: 20001558 Result: Down-regulated in Transcription
  misc_feature: MA Experiment 20001558 PARAMETER Experiment Name: At_Drought_Soil_Dry_P Parameter: Age (day) Value: 27
  misc_feature: MA Experiment 20001558 PARAMETER Experiment Name: At_Drought_Soil_Dry_P Parameter: Organism Value: A. thaliana
  misc_feature: MA Experiment 20001558 PARAMETER Experiment Name: At_Drought_Soil_Dry_P Parameter: Plant Line Value: WS
  misc_feature: MA Experiment 20001558 PARAMETER Experiment Name: At_Drought_Soil_Dry_P Parameter: Post Timepoint (hr) Value: 6
  misc_feature: MA Experiment 20001558 PARAMETER Experiment Name: At_Drought_Soil_Dry_P Parameter: Post-Treatment Value: Re-Water vs. No Drought
  misc_feature: MA Experiment 20001558 PARAMETER Experiment Name: At_Drought_Soil_Dry_P Parameter: Timepoint (day) Value: 13
  misc_feature: MA Experiment 20001558 PARAMETER Experiment Name: At_Drought_Soil_Dry_P Parameter: Treatment Value: Drought vs. No Drought

SEQ ID NO: 34348 - protein, 373 aa, Arabidopsis thaliana; identical to SEQ ID NO: 30758
  peptide (1)..(373): Ceres Seq. ID no. 12422340
  misc_feature (1)..(373): Homolog of NCBI NO: 18421880 NR Description: putative protein

SEQ ID NO: 34349 - protein, 368 aa, Arabidopsis thaliana; identical to SEQ ID NO: 30759
  peptide (1)..(368): Ceres Seq. ID no. 12422341
  misc_feature (44)..(349): Pfam Name: High molecular weight glutenin subunit Pfam Description: High molecular weight glutenin subunit
  misc_feature (150)..(365): Homolog of NCBI NO: 12580871 NR Description: hypothetical protein [Picea abies]
  misc_feature (51)..(343): Homolog of NCBI NO: 15228587 NR Description: hypothetical protein; protein id: At3g29075.1
  misc_feature (68)..(346): Homolog of NCBI NO: 6323826 NR Description: DNA damage inducible
  misc_feature (68)..(346): Homolog of NCBI NO: 171388 NR Description: DDR48 stress protein
  misc_feature (92)..(314): Homolog of NCBI NO: 12580871 NR Description: hypothetical protein [Picea abies]
  misc_feature (1)..(249): Homolog of NCBI NO: 21928162 NR Description: AT3g29075/MXE2_1 [Arabidopsis thaliana]
  misc_feature (1)..(283): Homolog of NCBI NO: 15228587 NR Description: hypothetical protein; protein id: At3g29075.1
  misc_feature (6)..(367): Homolog of NCBI NO: 32352182 NR Description: hypothetical protein [Oryza sativa (japonica
  misc_feature (1)..(368): Homolog of NCBI NO: 24417262 NR Description: unknown [Arabidopsis thaliana]
  misc_feature (1)..(368): Homolog of NCBI NO: 9758332 NR Description: gene_id:MIJ24.6~ref|NP_013897.1~similar to

SEQ ID NO: 34350 - protein, 362 aa, Arabidopsis thaliana; identical to SEQ ID NO: 30760
  peptide (1)..(362): Ceres Seq. ID no. 12422342
  misc_feature (1)..(362): Homolog of NCBI NO: 18421880 NR Description: putative protein

SEQ ID NO: 34351 - DNA, 1280 bp, Arabidopsis thaliana; identical to SEQ ID NO: 30761
  misc_feature (1)..(1280): Ceres Seq. ID no. 12323503
  misc_feature: MA Experiment ID: 108434 Result: Down-regulated in Transcription
  misc_feature: MA Experiment 108434 PARAMETER Experiment Name: At_Root_Tips_cDNA_P Parameter: Tissue Value: Root Tips
  misc_feature: MA Experiment ID: 108461 Result: Up-regulated in Transcription
  misc_feature: MA Experiment 108461 PARAMETER Experiment Name: At_Germinating_Seeds_cDNA_P Parameter: Age (day) Value: 1 vs. 0
  misc_feature: MA Experiment 108461 PARAMETER Experiment Name: At_Germinating_Seeds_cDNA_P Parameter: Tissue Value: Germinating Seeds
  misc_feature: MA Experiment ID: 108462 Result: Up-regulated in Transcription
  misc_feature: MA Experiment 108462 PARAMETER Experiment Name: At_Germinating_Seeds_cDNA_P Parameter: Age (day) Value: 2 vs. 0
  misc_feature: MA Experiment 108462 PARAMETER Experiment Name: At_Germinating_Seeds_cDNA_P Parameter: Tissue Value: Germinating Seeds
  misc_feature: MA Experiment ID: 108463 Result: Up-regulated in Transcription
  misc_feature: MA Experiment 108463 PARAMETER Experiment Name: At_Germinating_Seeds_cDNA_P Parameter: Age (day) Value: 3 vs. 0
  misc_feature: MA Experiment 108463 PARAMETER Experiment Name: At_Germinating_Seeds_cDNA_P Parameter: Tissue Value: Germinating Seeds
  misc_feature: MA Experiment ID: 108464 Result: Up-regulated in Transcription
  misc_feature: MA Experiment 108464 PARAMETER Experiment Name: At_Germinating_Seeds_cDNA_P Parameter: Age (day) Value: 4 vs. 0
  misc_feature: MA Experiment 108464 PARAMETER Experiment Name: At_Germinating_Seeds_cDNA_P Parameter: Tissue Value: Germinating Seeds
  misc_feature: MA Experiment ID: 108469 Result: Up-regulated in Transcription
  misc_feature: MA Experiment ID: 108488 Result: Down-regulated in Transcription
  misc_feature: MA Experiment ID: 108573 Result: Up-regulated in Transcription
  misc_feature: MA Experiment 108573 PARAMETER Experiment Name: At_Drought_cDNA_P Parameter: Timepoint (hr) Value: 6
  misc_feature: MA Experiment 108573 PARAMETER Experiment Name: At_Drought_cDNA_P Parameter: Tissue Value: Aerial
  misc_feature: MA Experiment 108573 PARAMETER Experiment Name: At_Drought_cDNA_P Parameter: Treatment Value: Drought vs. No Drought
  misc_feature: MA Experiment ID: 108574 Result: Up-regulated in Transcription
  misc_feature: MA Experiment 108574 PARAMETER Experiment Name: At_Wounding__cDNA_P Parameter: Timepoint (hr) Value: 1
  misc_feature: MA Experiment 108574 PARAMETER Experiment Name: At_Wounding__cDNA_P Parameter: Tissue Value: Aerial
  misc_feature: MA Experiment 108574 PARAMETER Experiment Name: At_Wounding__cDNA_P Parameter: Treatment Value: Wounding vs. No Wounding
  misc_feature: MA Experiment ID: 108577 Result: Down-regulated in Transcription
  misc_feature: MA Experiment 108577 PARAMETER Experiment Name: At_42deg_Heat_cDNA_P Parameter: Temperature (deg C) Value: 42 vs. 22
  misc_feature: MA Experiment 108577 PARAMETER Experiment Name: At_42deg_Heat_cDNA_P Parameter: Timepoint (hr) Value: 6
  misc_feature: MA Experiment 108577 PARAMETER Experiment Name: At_42deg_Heat_cDNA_P Parameter: Tissue Value: Aerial
  misc_feature: MA Experiment ID: 108579 Result: Up-regulated in Transcription
  misc_feature: MA Experiment 108579 PARAMETER Experiment Name: At_4deg_Cold_cDNA_P Parameter: Temperature (deg C) Value: 4 vs. 22
  misc_feature: MA Experiment 108579 PARAMETER Experiment Name: At_4deg_Cold_cDNA_P Parameter: Timepoint (hr) Value: 6
  misc_feature: MA Experiment 108579 PARAMETER Experiment Name: At_4deg_Cold_cDNA_P Parameter: Tissue Value: Aerial
  misc_feature: MA Experiment ID: 108585 Result: Up-regulated in Transcription
  misc_feature: MA Experiment 108585 PARAMETER Experiment Name: At_5mM_NaNP_cDNA_P Parameter: Timepoint (hr) Value: 6
  misc_feature: MA Experiment 108585 PARAMETER Experiment Name: At_5mM_NaNP_cDNA_P Parameter: Tissue Value: Aerial
  misc_feature: MA Experiment 108585 PARAMETER Experiment Name: At_5mM_NaNP_cDNA_P Parameter: Treatment Value: null
  misc_feature: MA Experiment ID: 108667 Result: Up-regulated in Transcription
  misc_feature: MA Experiment 108667 PARAMETER Experiment Name: At_2mM_SA_cDNA_P Parameter: Plant Line Value: WS
  misc_feature: MA Experiment 108667 PARAMETER Experiment Name: At_2mM_SA_cDNA_P Parameter: Timepoint (hr) Value: 1
  misc_feature: MA Experiment 108667 PARAMETER Experiment Name: At_2mM_SA_cDNA_P Parameter: Treatment Value: 2mM SA vs. No Treatment
  misc_feature: MA Experiment ID: 20000144 Result: Down-regulated in Transcription
  misc_feature: MA Experiment 20000144 PARAMETER Experiment Name: At_42deg_Heat_cDNA_P Parameter: Temperature (deg C) Value: 42 vs. 22
  misc_feature: MA Experiment 20000144 PARAMETER Experiment Name: At_42deg_Heat_cDNA_P Parameter: Timepoint (hr) Value: 1
  misc_feature: MA Experiment 20000144 PARAMETER Experiment Name: At_42deg_Heat_cDNA_P Parameter: Tissue Value: Aerial
  misc_feature: MA Experiment ID: 20000171 Result: Down-regulated in Transcription
  misc_feature: MA Experiment 20000171 PARAMETER Experiment Name: At_42deg_Heat_P Parameter: Age (day) Value: 14
  misc_feature: MA Experiment 20000171 PARAMETER Experiment Name: At_42deg_Heat_P Parameter: Organism Value: A. thaliana
  misc_feature: MA Experiment 20000171 PARAMETER Experiment Name: At_42deg_Heat_P Parameter: Plant Line Value: WS
  misc_feature: MA Experiment 20000171 PARAMETER Experiment Name: At_42deg_Heat_P Parameter: Temperature (deg C) Value: 42 vs. 22
  misc_feature: MA Experiment 20000171 PARAMETER Experiment Name: At_42deg_Heat_P Parameter: Timepoint (hr) Value: 1
  misc_feature: MA Experiment 20000171 PARAMETER Experiment Name: At_42deg_Heat_P Parameter: Tissue Value: Aerial
  misc_feature: MA Experiment ID: 20000173 Result: Down-regulated in Transcription
  misc_feature: MA Experiment 20000173 PARAMETER Experiment Name: At_42deg_Heat_P Parameter: Age (day) Value: 14
  misc_feature: MA Experiment 20000173 PARAMETER Experiment Name: At_42deg_Heat_P Parameter: Organism Value: A. thaliana
  misc_feature: MA Experiment 20000173 PARAMETER Experiment Name: At_42deg_Heat_P Parameter: Plant Line Value: WS
  misc_feature: MA Experiment 20000173 PARAMETER Experiment Name: At_42deg_Heat_P Parameter: Temperature (deg C) Value: 42 vs. 22
  misc_feature: MA Experiment 20000173 PARAMETER Experiment Name: At_42deg_Heat_P Parameter: Timepoint (hr) Value: 6
  misc_feature: MA Experiment 20000173 PARAMETER Experiment Name: At_42deg_Heat_P Parameter: Tissue Value: Aerial
  misc_feature: MA Experiment ID: 20000180 Result: Up-regulated in Transcription
  misc_feature: MA Experiment 20000180 PARAMETER Experiment Name: At_Germinating_Seeds_P Parameter: Age (hr) Value: 24 vs. 0
  misc_feature: MA Experiment 20000180 PARAMETER Experiment Name: At_Germinating_Seeds_P Parameter: Tissue Value: Germinating Seeds
  misc_feature: MA Experiment ID: 20000182 Result: Up-regulated in Transcription
  misc_feature: MA Experiment 20000182 PARAMETER Experiment Name: At_2mM_SA_P Parameter: Age (day) Value: 14
  misc_feature: MA Experiment 20000182 PARAMETER Experiment Name: At_2mM_SA_P Parameter: Organism Value: A. thaliana
  misc_feature: MA Experiment 20000182 PARAMETER Experiment Name: At_2mM_SA_P Parameter: Plant Line Value: WS
  misc_feature: MA Experiment 20000182 PARAMETER Experiment Name: At_2mM_SA_P Parameter: Timepoint (hr) Value: 6
  misc_feature: MA Experiment 20000182 PARAMETER Experiment Name: At_2mM_SA_P Parameter: Tissue Value: Aerial
  misc_feature: MA Experiment 20000182 PARAMETER Experiment Name: At_2mM_SA_P Parameter: Treatment Value: 2mM SA vs. No Treatment
  misc_feature: MA Experiment ID: 20000185 Result: Down-regulated in Transcription
  misc_feature: MA Experiment 20000185 PARAMETER Experiment Name: At_Roots__P Parameter: Age (day) Value: 7 vs. 21
  misc_feature: MA Experiment 20000185 PARAMETER Experiment Name: At_Roots__P Parameter: Organism Value: A. thaliana
  misc_feature: MA Experiment 20000185 PARAMETER Experiment Name: At_Roots__P Parameter: Tissue Value: Roots vs. Whole Plant
  misc_feature: MA Experiment ID: 20000213 Result: Up-regulated in Transcription
  misc_feature: MA Experiment 20000213 PARAMETER Experiment Name: At_4deg_Cold_P Parameter: Timepoint (hr) Value: 2
  misc_feature: MA Experiment ID: 20000227 Result: Up-regulated in Transcription
  misc_feature: MA Experiment 20000227 PARAMETER Experiment Name: At_Root-Tips-vs-Tops_P Parameter: Tissue Value: Root Tips vs. Root Tops
  misc_feature: MA Experiment ID: 20000265 Result: Down-regulated in Transcription
  misc_feature: MA Experiment 20000265 PARAMETER Experiment Name: At_Open_Flower_P Parameter: Age (day) Value: 21
  misc_feature: MA Experiment 20000265 PARAMETER Experiment Name: At_Open_Flower_P Parameter: Plant Line Value: WS
  misc_feature: MA Experiment 20000265 PARAMETER Experiment Name: At_Open_Flower_P Parameter: Tissue Value: Closed Flower vs. Whole Plant
  misc_feature: MA Experiment ID: 20000438 Result: Down-regulated in Transcription
  misc_feature: MA Experiment 20000438 PARAMETER Experiment Name: At_Shoots__P Parameter: Age (day) Value: 14
  misc_feature: MA Experiment 20000438 PARAMETER Experiment Name: At_Shoots__P Parameter: Tissue Value: Shoots vs. Whole Plant
  misc_feature: MA Experiment ID: 20000439 Result: Down-regulated in Transcription
  misc_feature: MA Experiment 20000439 PARAMETER Experiment Name: At_Roots__P Parameter: Age (day) Value: 14 vs. 21
  misc_feature: MA Experiment 20000439 PARAMETER Experiment Name: At_Roots__P Parameter: Organism Value: A. thaliana
  misc_feature: MA Experiment 20000439 PARAMETER Experiment Name: At_Roots__P Parameter: Tissue Value: Roots vs. Whole Plant
  misc_feature: MA Experiment ID: 20000455 Result: Down-regulated in Transcription
  misc_feature: MA Experiment 20000455 PARAMETER Experiment Name: At_100uM_ABA_P Parameter: Age (day) Value: 16
  misc_feature: MA Experiment 20000455 PARAMETER Experiment Name: At_100uM_ABA_P Parameter: Organism Value: A. thaliana
  misc_feature: MA Experiment 20000455 PARAMETER Experiment Name: At_100uM_ABA_P Parameter: Plant Line Value: WS
  misc_feature: MA Experiment 20000455 PARAMETER Experiment Name: At_100uM_ABA_P Parameter: Timepoint (hr) Value: 48
  misc_feature: MA Experiment 20000455 PARAMETER Experiment Name: At_100uM_ABA_P Parameter: Tissue Value: Aerial
  misc_feature: MA Experiment 20000455 PARAMETER Experiment Name: At_100uM_ABA_P Parameter: Treatment Value: 100uM ABA vs. No Treatment
  misc_feature: MA Experiment ID: 20000460 Result: Up-regulated in Transcription
  misc_feature: MA Experiment 20000460 PARAMETER Experiment Name: At_10percent_PEG_P Parameter: Age (day) Value: 12
  misc_feature: MA Experiment 20000460 PARAMETER Experiment Name: At_10percent_PEG_P Parameter: Organism Value: A. thaliana
  misc_feature: MA Experiment 20000460 PARAMETER Experiment Name: At_10percent_PEG_P Parameter: Plant Line Value: WS
  misc_feature: MA Experiment 20000460 PARAMETER Experiment Name: At_10percent_PEG_P Parameter: Timepoint (day) Value: 12
  misc_feature: MA Experiment 20000460 PARAMETER Experiment Name: At_10percent_PEG_P Parameter: Tissue Value: Whole Plant
  misc_feature: MA Experiment 20000460 PARAMETER Experiment Name: At_10percent_PEG_P Parameter: Treatment Value: 10percent PEG vs. No Treatment
  misc_feature: MA Experiment ID: 20000495 Result: Down-regulated in Transcription
  misc_feature: MA Experiment 20000495 PARAMETER Experiment Name: At_Guard_Cells_P Parameter: Harvest Date Value: 8/2/2002
  misc_feature: MA Experiment 20000495 PARAMETER Experiment Name: At_Guard_Cells_P Parameter: Organism Value: A. thaliana
  misc_feature: MA Experiment 20000495 PARAMETER Experiment Name: At_Guard_Cells_P Parameter: Tissue Value: Guard Cells vs. Leaves
  misc_feature: MA Experiment ID: 20000527 Result: Up-regulated in Transcription
  misc_feature: MA Experiment 20000527 PARAMETER Experiment Name: At_10percent_PEG_P Parameter: Age (day) Value: 20
  misc_feature: MA Experiment 20000527 PARAMETER Experiment Name: At_10percent_PEG_P Parameter: Organism Value: A. thaliana
  misc_feature: MA Experiment 20000527 PARAMETER Experiment Name: At_10percent_PEG_P Parameter: Plant Line Value: WS
  misc_feature: MA Experiment 20000527 PARAMETER Experiment Name: At_10percent_PEG_P Parameter: Timepoint (day) Value: 20
  misc_feature: MA Experiment 20000527 PARAMETER Experiment Name: At_10percent_PEG_P Parameter: Tissue Value: Whole Plant
  misc_feature: MA Experiment 20000527 PARAMETER Experiment Name: At_10percent_PEG_P Parameter: Treatment Value: 10percent PEG vs. No Treatment
  misc_feature: MA Experiment ID: 20000709 Result: Up-regulated in Transcription
  misc_feature: MA Experiment 20000709 PARAMETER Experiment Name: At_15mM_NH4NO3_L-to-H_P Parameter: Age (hr) Value: 14
  misc_feature: MA Experiment 20000709 PARAMETER Experiment Name: At_15mM_NH4NO3_L-to-H_P Parameter: Organism Value: A. thaliana
  misc_feature: MA Experiment 20000709 PARAMETER Experiment Name: At_15mM_NH4NO3_L-to-H_P Parameter: Plant Line Value: WS
  misc_feature: MA Experiment 20000709 PARAMETER Experiment Name: At_15mM_NH4NO3_L-to-H_P Parameter: Timepoint (hr) Value: 4
  misc_feature: MA Experiment 20000709 PARAMETER Experiment Name: At_15mM_NH4NO3_L-to-H_P Parameter: Tissue Value: Aerial
  misc_feature: MA Experiment 20000709 PARAMETER Experiment Name: At_15mM_NH4NO3_L-to-H_P Parameter: Treatment Value: 15mM NH4NO3 vs. 30mM Mannitol
  misc_feature: MA Experiment ID: 20001247 Result: Up-regulated in Transcription
  misc_feature: MA Experiment 20001247 PARAMETER Experiment Name: At_Far-red-induction_P Parameter: Age (day) Value: 7
  misc_feature: MA Experiment 20001247 PARAMETER Experiment Name: At_Far-red-induction_P Parameter: Light Value: Far-red vs. White
  misc_feature: MA Experiment 20001247 PARAMETER Experiment Name: At_Far-red-induction_P Parameter: Organism Value: A. thaliana
  misc_feature: MA Experiment 20001247 PARAMETER Experiment Name: At_Far-red-induction_P Parameter: Plant Line Value: Columbia
  misc_feature: MA Experiment 20001247 PARAMETER Experiment Name: At_Far-red-induction_P Parameter: Timepoint (hr) Value: 1
  misc_feature: MA Experiment 20001247 PARAMETER Experiment Name: At_Far-red-induction_P Parameter: Tissue Value: Whole Plant
  misc_feature: MA Experiment ID: 20001554 Result: Down-regulated in Transcription
  misc_feature: MA Experiment 20001554 PARAMETER Experiment Name: At_Drought_Soil_Dry_P Parameter: Age (day) Value: 21
  misc_feature: MA Experiment 20001554 PARAMETER Experiment Name: At_Drought_Soil_Dry_P Parameter: Organism Value: A. thaliana
  misc_feature: MA Experiment 20001554 PARAMETER Experiment Name: At_Drought_Soil_Dry_P Parameter: Plant Line Value: WS
  misc_feature: MA Experiment 20001554 PARAMETER Experiment Name: At_Drought_Soil_Dry_P Parameter: Post Timepoint (hr) Value: None
  misc_feature: MA Experiment 20001554 PARAMETER Experiment Name: At_Drought_Soil_Dry_P Parameter: Post-Treatment Value: None
  misc_feature: MA Experiment 20001554 PARAMETER Experiment Name: At_Drought_Soil_Dry_P Parameter: Timepoint (day) Value: 7
  misc_feature: MA Experiment 20001554 PARAMETER Experiment Name: At_Drought_Soil_Dry_P Parameter: Treatment Value: Drought vs. No Drought
  misc_feature: MA Experiment ID: 20001555 Result: Down-regulated in Transcription
  misc_feature: MA Experiment 20001555 PARAMETER Experiment Name: At_Drought_Soil_Dry_P Parameter: Age (day) Value: 24
  misc_feature: MA Experiment 20001555 PARAMETER Experiment Name: At_Drought_Soil_Dry_P Parameter: Organism Value: A. thaliana
  misc_feature: MA Experiment 20001555 PARAMETER Experiment Name: At_Drought_Soil_Dry_P Parameter: Plant Line Value: WS
  misc_feature: MA Experiment 20001555 PARAMETER Experiment Name: At_Drought_Soil_Dry_P Parameter: Post Timepoint (hr) Value: None
  misc_feature: MA Experiment 20001555 PARAMETER Experiment Name: At_Drought_Soil_Dry_P Parameter: Post-Treatment Value: None
  misc_feature: MA Experiment 20001555 PARAMETER Experiment Name: At_Drought_Soil_Dry_P Parameter: Timepoint (day) Value: 10
  misc_feature: MA Experiment 20001555 PARAMETER Experiment Name: At_Drought_Soil_Dry_P Parameter: Treatment Value: Drought vs. No Drought
  misc_feature: MA Experiment ID: 20001556 Result: Down-regulated in Transcription
  misc_feature: MA Experiment 20001556 PARAMETER Experiment Name: At_Drought_Soil_Dry_P Parameter: Age (day) Value: 26
  misc_feature: MA Experiment 20001556 PARAMETER Experiment Name: At_Drought_Soil_Dry_P Parameter: Organism Value: A. thaliana
  misc_feature: MA Experiment 20001556 PARAMETER Experiment Name: At_Drought_Soil_Dry_P Parameter: Plant Line Value: WS
  misc_feature: MA Experiment 20001556 PARAMETER Experiment Name: At_Drought_Soil_Dry_P Parameter: Post Timepoint (hr) Value: None
  misc_feature: MA Experiment 20001556 PARAMETER Experiment Name: At_Drought_Soil_Dry_P Parameter: Post-Treatment Value: None
  misc_feature: MA Experiment 20001556 PARAMETER Experiment Name: At_Drought_Soil_Dry_P Parameter: Timepoint (day) Value: 12
  misc_feature: MA Experiment 20001556 PARAMETER Experiment Name: At_Drought_Soil_Dry_P Parameter: Treatment Value: Drought vs. No Drought
  misc_feature: MA Experiment ID: 20001557 Result: Up-regulated in Transcription
  misc_feature: MA Experiment 20001557 PARAMETER Experiment Name: At_Drought_Soil_Dry_P Parameter: Age (day) Value: 27
  misc_feature: MA Experiment 20001557 PARAMETER Experiment Name: At_Drought_Soil_Dry_P Parameter: Organism Value: A. thaliana
  misc_feature: MA Experiment 20001557 PARAMETER Experiment Name: At_Drought_Soil_Dry_P Parameter: Plant Line Value: WS
  misc_feature: MA Experiment 20001557 PARAMETER Experiment Name: At_Drought_Soil_Dry_P Parameter: Post Timepoint (hr) Value: 3
  misc_feature: MA Experiment 20001557 PARAMETER Experiment Name: At_Drought_Soil_Dry_P Parameter: Post-Treatment Value: Re-Water vs. No Drought
  misc_feature: MA Experiment 20001557 PARAMETER Experiment Name: At_Drought_Soil_Dry_P Parameter: Timepoint (day) Value: 13
  misc_feature: MA Experiment 20001557 PARAMETER Experiment Name: At_Drought_Soil_Dry_P Parameter: Treatment Value: Drought vs. No Drought
  misc_feature: MA Experiment ID: 20001774 Result: Down-regulated in Transcription
  misc_feature: MA Experiment 20001774 PARAMETER Experiment Name: At_Far-red-enriched-adult_P Parameter: Age (day) Value: 31
  misc_feature: MA Experiment 20001774 PARAMETER Experiment Name: At_Far-red-enriched-adult_P Parameter: Light Value: Far-red enriched vs. White
  misc_feature: MA Experiment 20001774 PARAMETER Experiment Name: At_Far-red-enriched-adult_P Parameter: Organism Value: A. thaliana
  misc_feature: MA Experiment 20001774 PARAMETER Experiment Name: At_Far-red-enriched-adult_P Parameter: Plant Line Value: Columbia
  misc_feature: MA Experiment 20001774 PARAMETER Experiment Name: At_Far-red-enriched-adult_P Parameter: Timepoint (hr) Value: 72
  misc_feature: MA Experiment 20001774 PARAMETER Experiment Name: At_Far-red-enriched-adult_P Parameter: Tissue Value: Aerial
  misc_feature: MA Experiment ID: 20001905 Result: Up-regulated in Transcription
  misc_feature: MA Experiment 20001905 PARAMETER Experiment Name: At_Drought_Reproduction_P Parameter: Age (day) Value: 40
  misc_feature: MA Experiment 20001905 PARAMETER Experiment Name: At_Drought_Reproduction_P Parameter: Organism Value: A. thaliana
  misc_feature: MA Experiment 20001905 PARAMETER Experiment Name: At_Drought_Reproduction_P Parameter: Plant Line Value: WS
  misc_feature: MA Experiment 20001905 PARAMETER Experiment Name: At_Drought_Reproduction_P Parameter: Timepoint (day) Value: 10
  misc_feature: MA Experiment 20001905 PARAMETER Experiment Name: At_Drought_Reproduction_P Parameter: Tissue Value: Rosettes
  misc_feature: MA Experiment 20001905 PARAMETER Experiment Name: At_Drought_Reproduction_P Parameter: Treatment Value: Drought vs. No Drought
  misc_feature: MA Experiment ID: 20001911 Result: Down-regulated in Transcription
  misc_feature: MA Experiment 20001911 PARAMETER Experiment Name: At_Drought_Reproduction_P Parameter: Age (day) Value: 40
  misc_feature: MA Experiment 20001911 PARAMETER Experiment Name: At_Drought_Reproduction_P Parameter: Organism Value: A. thaliana
  misc_feature: MA Experiment 20001911 PARAMETER Experiment Name: At_Drought_Reproduction_P Parameter: Plant Line Value: WS
  misc_feature: MA Experiment 20001911 PARAMETER Experiment Name: At_Drought_Reproduction_P Parameter: Timepoint (day) Value: 10
  misc_feature: MA Experiment 20001911 PARAMETER Experiment Name: At_Drought_Reproduction_P Parameter: Tissue Value: Flowers
  misc_feature: MA Experiment 20001911 PARAMETER Experiment Name: At_Drought_Reproduction_P Parameter: Treatment Value: Drought vs. No Drought

SEQ ID NO: 34352 - protein, 365 aa, Arabidopsis thaliana; identical to SEQ ID NO: 30762
  peptide (1)..(365): Ceres Seq. ID no. 12323504
  misc_feature (1)..(351): Homolog of NCBI NO: 34898906 NR Description: putative glycosyl transferase
  misc_feature (2)..(357): Homolog of NCBI NO: 15230679 NR Description: putative glycosyl transferase; protein id:
  misc_feature (8)..(350): Homolog of NCBI NO: 21554300 NR Description: putative glycosyl transferase [Arabidopsis
  misc_feature (8)..(350): Homolog of NCBI NO: 15235247 NR Description: predicted glycosyl transferase
  misc_feature (1)..(349): Homolog of NCBI NO: 11281926 NR Description: hypothetical protein F26K9.90 - Arabidopsis
  misc_feature (1)..(349): Homolog of NCBI NO: 22331906 NR Description: putative protein
  misc_feature (42)..(350): Homolog of NCBI NO: 15221684 NR Description: putative glycosyl transferase; protein id:
  misc_feature (42)..(353): Homolog of NCBI NO: 18409445 NR Description: expressed protein
  misc_feature (11)..(350): Homolog of NCBI NO: 12003394 NR Description: Avr9/Cf-9 rapidly elicited protein 231 [Nicotiana
  misc_feature (1)..(365): Homolog of NCBI NO: 30689156 NR Description: galactinol synthase, putative [Arabidopsis

SEQ ID NO: 34353 - protein, 364 aa, Arabidopsis thaliana; identical to SEQ ID NO: 30763
  peptide (1)..(364): Ceres Seq. ID no. 12323505
  misc_feature (1)..(350): Homolog of NCBI NO: 34898906 NR Description: putative glycosyl transferase
  misc_feature (1)..(356): Homolog of NCBI NO: 15230679 NR Description: putative glycosyl transferase; protein id:
  misc_feature (7)..(349): Homolog of NCBI NO: 21554300 NR Description: putative glycosyl transferase [Arabidopsis
  misc_feature (7)..(349): Homolog of NCBI NO: 15235247 NR Description: predicted glycosyl transferase
  misc_feature (1)..(348): Homolog of NCBI NO: 11281926 NR Description: hypothetical protein F26K9.90 - Arabidopsis
  misc_feature (1)..(348): Homolog of NCBI NO: 22331906 NR Description: putative protein
  misc_feature (41)..(349): Homolog of NCBI NO: 15221684 NR Description: putative glycosyl transferase; protein id:
  misc_feature (41)..(352): Homolog of NCBI NO: 18409445 NR Description: expressed protein
  misc_feature (10)..(349): Homolog of NCBI NO: 12003394 NR Description: Avr9/Cf-9 rapidly elicited protein 231 [Nicotiana
  misc_feature (1)..(364): Homolog of NCBI NO: 30689156 NR Description: galactinol synthase, putative [Arabidopsis

SEQ ID NO: 34354 - protein, 323 aa, Arabidopsis thaliana; identical to SEQ ID NO: 30764
  peptide (1)..(323): Ceres Seq. ID no. 12323506
  misc_feature (1)..(309): Homolog of NCBI NO: 34898906 NR Description: putative glycosyl transferase
  misc_feature (1)..(315): Homolog of NCBI NO: 15230679 NR Description: putative glycosyl transferase; protein id:
  misc_feature (1)..(308): Homolog of NCBI NO: 21554300 NR Description: putative glycosyl transferase [Arabidopsis
  misc_feature (1)..(308): Homolog of NCBI NO: 15235247 NR Description: predicted glycosyl transferase
  misc_feature (1)..(307): Homolog of NCBI NO: 11281926 NR Description: hypothetical protein F26K9.90 - Arabidopsis
  misc_feature (1)..(307): Homolog of NCBI NO: 22331906 NR Description: putative protein
  misc_feature (1)..(308): Homolog of NCBI NO: 15221684 NR Description: putative glycosyl transferase; protein id:
  misc_feature (1)..(311): Homolog of NCBI NO: 18409445 NR Description: expressed protein
  misc_feature (1)..(308): Homolog of NCBI NO: 12003394 NR Description: Avr9/Cf-9 rapidly elicited protein 231 [Nicotiana
  misc_feature (1)..(323): Homolog of NCBI NO: 30689156 NR Description: galactinol synthase, putative [Arabidopsis

SEQ ID NO: 34355 - DNA, 1608 bp, Arabidopsis thaliana; identical to SEQ ID NO: 30765
  misc_feature (1)..(1608): Ceres Seq. ID no. 12340059
  misc_feature: MA Experiment ID: 108434 Result: Up-regulated in Transcription
  misc_feature: MA Experiment 108434 PARAMETER Experiment Name: At_Root_Tips_cDNA_P Parameter: Tissue Value: Root Tips
  misc_feature: MA Experiment ID: 108435 Result: Up-regulated in Transcription
  misc_feature: MA Experiment 108435 PARAMETER Experiment Name: At_stm_Mutants_cDNA_P Parameter: Plant Line Value: wt Landsburg vs stm
  misc_feature: MA Experiment 108435 PARAMETER Experiment Name: At_stm_Mutants_cDNA_P Parameter: Tissue Value: Shoot Apical Meristem Region

SEQ ID NO: 34356 - protein, 210 aa, Arabidopsis thaliana; identical to SEQ ID NO: 30766
  peptide (1)..(210): Ceres Seq. ID no. 12340060
  misc_feature (67)..(209): Homolog of NCBI NO: 3059122 NR Description: glyeraldehyde-3-phosphate dehydrogenase [Marsilea
  misc_feature (60)..(210): Homolog of NCBI NO: 3059140 NR Description: NAD-dependent glyceraldehyde-3-phosphate
  misc_feature (1)..(209): Homolog of NCBI NO: 2129472 NR Description: glyceraldehyde-3-phosphate dehydrogenase
  misc_feature (1)..(209): Homolog of NCBI NO: 2129471 NR Description: glyceraldehyde-3-phosphate dehydrogenase
  misc_feature (1)..(209): Homolog of NCBI NO: 18072805 NR Description: glyceraldehyde-3-phosphate dehydrogenase
  misc_feature (1)..(209): Homolog of NCBI NO: 25284351 NR Description: hypothetical protein F3O9.10 - Arabidopsis
  misc_feature (1)..(209): Homolog of NCBI NO: 27754473 NR Description: putative glyceraldehyde-3-phosphate dehydrogenase
  misc_feature (1)..(209): Homolog of NCBI NO: 21618027 NR Description: putative glyceraldehyde-3-phosphate dehydrogenase
  misc_feature (1)..(209): Homolog of NCBI NO: 15219206 NR Description: putative glyceraldehyde-3-phosphate dehydrogenase
  misc_feature (1)..(209): Homolog of NCBI NO: 15219406 NR Description: glyceraldehyde-3-phosphate dehydrogenase, putative

SEQ ID NO: 34357 - protein, 209 aa, Arabidopsis thaliana; identical to SEQ ID NO: 30767
  peptide (1)..(209): Ceres Seq. ID no. 12340061
  misc_feature (24)..(185): Pfam Name: Glyceraldehyde 3-phosphate dehydrogenase, Pfam Description: Glyceraldehyde 3-phosphate dehydrogenase,
  misc_feature (1)..(209): Homolog of NCBI NO: 3059122 NR Description: glyeraldehyde-3-phosphate dehydrogenase [Marsilea
  misc_feature (1)..(207): Homolog of NCBI NO: 3059140 NR Description: NAD-dependent glyceraldehyde-3-phosphate
  misc_feature (1)..(207): Homolog of NCBI NO: 2129472 NR Description: glyceraldehyde-3-phosphate dehydrogenase
  misc_feature (1)..(207): Homolog of NCBI NO: 2129471 NR Description: glyceraldehyde-3-phosphate dehydrogenase
  misc_feature (1)..(208): Homolog of NCBI NO: 18072805 NR Description: glyceraldehyde-3-phosphate dehydrogenase
  misc_feature (1)..(208): Homolog of NCBI NO: 25284351 NR Description: hypothetical protein F3O9.10 - Arabidopsis
  misc_feature (1)..(208): Homolog of NCBI NO: 27754473 NR Description: putative glyceraldehyde-3-phosphate dehydrogenase
  misc_feature (1)..(208): Homolog of NCBI NO: 21618027 NR Description: putative glyceraldehyde-3-phosphate dehydrogenase
  misc_feature (1)..(208): Homolog of NCBI NO: 15219206 NR Description: putative glyceraldehyde-3-phosphate dehydrogenase
  misc_feature (1)..(209): Homolog of NCBI NO: 15219406 NR Description: glyceraldehyde-3-phosphate dehydrogenase, putative

SEQ ID NO: 34358 - protein, 195 aa, Arabidopsis thaliana; identical to SEQ ID NO: 30768
  peptide (1)..(195): Ceres Seq. ID no. 12340062
  misc_feature (10)..(171): Pfam Name: Glyceraldehyde 3-phosphate dehydrogenase, Pfam Description: Glyceraldehyde 3-phosphate dehydrogenase,
  misc_feature (1)..(195): Homolog of NCBI NO: 3059122 NR Description: glyeraldehyde-3-phosphate dehydrogenase [Marsilea
  misc_feature (1)..(193): Homolog of NCBI NO: 3059140 NR Description: NAD-dependent glyceraldehyde-3-phosphate
  misc_feature (1)..(193): Homolog of NCBI NO: 2129472 NR Description: glyceraldehyde-3-phosphate dehydrogenase
  misc_feature (1)..(193): Homolog of NCBI NO: 2129471 NR Description: glyceraldehyde-3-phosphate dehydrogenase
  misc_feature (1)..(194): Homolog of NCBI NO: 18072805 NR Description: glyceraldehyde-3-phosphate dehydrogenase
  misc_feature (1)..(194): Homolog of NCBI NO: 25284351 NR Description: hypothetical protein F3O9.10 - Arabidopsis
  misc_feature (1)..(194): Homolog of NCBI NO: 27754473 NR Description: putative glyceraldehyde-3-phosphate dehydrogenase
  misc_feature (1)..(194): Homolog of NCBI NO: 21618027 NR Description: putative glyceraldehyde-3-phosphate dehydrogenase
  misc_feature (1)..(194): Homolog of NCBI NO: 15219206 NR Description: putative glyceraldehyde-3-phosphate dehydrogenase
  misc_feature (1)..(195): Homolog of NCBI NO: 15219406 NR Description: glyceraldehyde-3-phosphate dehydrogenase, putative

SEQ ID NO: 34359 - DNA, 1437 bp, Arabidopsis thaliana; identical to SEQ ID NO: 30769
  misc_feature (1)..(1437): Ceres Seq. ID no. 12338079
  misc_feature: MA Experiment ID: 20000437 Result: Down-regulated in Transcription
  misc_feature: MA Experiment 20000437 PARAMETER Experiment Name: At_Drought_P Parameter: Age (day) Value: 8
  misc_feature: MA Experiment 20000437 PARAMETER Experiment Name: At_Drought_P Parameter: Organism Value: A. thaliana
  misc_feature: MA Experiment 20000437 PARAMETER Experiment Name: At_Drought_P Parameter: Plant Line Value: WS
  misc_feature: MA Experiment 20000437 PARAMETER Experiment Name: At_Drought_P Parameter: Timepoint (hr) Value: 24
  misc_feature: MA Experiment 20000437 PARAMETER Experiment Name: At_Drought_P Parameter: Tissue Value: Whole Plant
  misc_feature: MA Experiment 20000437 PARAMETER Experiment Name: At_Drought_P Parameter: Treatment Value: Drought vs. No Drought
  misc_feature: MA Experiment ID: 20001557 Result: Up-regulated in Transcription
  misc_feature: MA Experiment 20001557 PARAMETER Experiment Name: At_Drought_Soil_Dry_P Parameter: Age (day) Value: 27
  misc_feature: MA Experiment 20001557 PARAMETER Experiment Name: At_Drought_Soil_Dry_P Parameter: Organism Value: A. thaliana
  misc_feature: MA Experiment 20001557 PARAMETER Experiment Name: At_Drought_Soil_Dry_P Parameter: Plant Line Value: WS
  misc_feature: MA Experiment 20001557 PARAMETER Experiment Name: At_Drought_Soil_Dry_P Parameter: Post Timepoint (hr) Value: 3
  misc_feature: MA Experiment 20001557 PARAMETER Experiment Name: At_Drought_Soil_Dry_P Parameter: Post-Treatment Value: Re-Water vs. No Drought
  misc_feature: MA Experiment 20001557 PARAMETER Experiment Name: At_Drought_Soil_Dry_P Parameter: Timepoint (day) Value: 13
  misc_feature: MA Experiment 20001557 PARAMETER Experiment Name: At_Drought_Soil_Dry_P Parameter: Treatment Value: Drought vs. No Drought
  misc_feature: MA Experiment ID: 20001558 Result: Up-regulated in Transcription
  misc_feature: MA Experiment 20001558 PARAMETER Experiment Name: At_Drought_Soil_Dry_P Parameter: Age (day) Value: 27
  misc_feature: MA Experiment 20001558 PARAMETER Experiment Name: At_Drought_Soil_Dry_P Parameter: Organism Value: A. thaliana
  misc_feature: MA Experiment 20001558 PARAMETER Experiment Name: At_Drought_Soil_Dry_P Parameter: Plant Line Value: WS
  misc_feature: MA Experiment 20001558 PARAMETER Experiment Name: At_Drought_Soil_Dry_P Parameter: Post Timepoint (hr) Value: 6
  misc_feature: MA Experiment 20001558 PARAMETER Experiment Name: At_Drought_Soil_Dry_P Parameter: Post-Treatment Value: Re-Water vs. No Drought
  misc_feature: MA Experiment 20001558 PARAMETER Experiment Name: At_Drought_Soil_Dry_P Parameter: Timepoint (day) Value: 13
  misc_feature: MA Experiment 20001558 PARAMETER Experiment Name: At_Drought_Soil_Dry_P Parameter: Treatment Value: Drought vs. No Drought

SEQ ID NO: 34360 - protein, 357 aa, Arabidopsis thaliana; identical to SEQ ID NO: 30770
  peptide (1)..(357): Ceres Seq. ID no. 12338080
  misc_feature (131)..(303): Pfam Name: Hyaluronan / mRNA binding family Pfam Description: Hyaluronan / mRNA binding family
  misc_feature (1)..(357): Homolog of NCBI NO: 39725276 NR Description: salt tolerance protein 1 [Beta vulgaris]
  misc_feature (1)..(357): Homolog of NCBI NO: 6492266 NR Description: nuclear RNA binding protein A [Spinacia oleracea]
  misc_feature (1)..(357): Homolog of NCBI NO: 34910712 NR Description: putative nuclear RNA binding protein A
  misc_feature (1)..(357): Homolog of NCBI NO: 21537052 NR Description: nuclear antigen homolog [Arabidopsis thaliana]
  misc_feature (1)..(357): Homolog of NCBI NO: 15235894 NR Description: nuclear antigen homolog
  misc_feature (1)..(357): Homolog of NCBI NO: 39725278 NR Description: salt tolerance protein 2 [Beta vulgaris]
  misc_feature (1)..(337): Homolog of NCBI NO: 21593013 NR Description: nuclear RNA binding protein A-like protein
  misc_feature (1)..(337): Homolog of NCBI NO: 15236552 NR Description: nuclear RNA binding protein A-like protein
  misc_feature (1)..(357): Homolog of NCBI NO: 15238039 NR Description: putative protein
  misc_feature (1)..(357): Homolog of NCBI NO: 21553991 NR Description: nuclear RNA binding protein A-like protein

SEQ ID NO: 34361 - protein, 195 aa, Arabidopsis thaliana; identical to SEQ ID NO: 24160
  peptide (1)..(195): Ceres Seq. ID no. 12338081
  misc_feature (1)..(141): Pfam Name: Hyaluronan / mRNA binding family Pfam Description: Hyaluronan / mRNA binding family
  misc_feature (1)..(195): Homolog of NCBI NO: 39725276 NR Description: salt tolerance protein 1 [Beta vulgaris]
  misc_feature (1)..(195): Homolog of NCBI NO: 6492266 NR Description: nuclear RNA binding protein A [Spinacia oleracea]
  misc_feature (1)..(195): Homolog of NCBI NO: 34910712 NR Description: putative nuclear RNA binding protein A
  misc_feature (1)..(195): Homolog of NCBI NO: 21537052 NR Description: nuclear antigen homolog [Arabidopsis thaliana]
  misc_feature (1)..(195): Homolog of NCBI NO: 15235894 NR Description: nuclear antigen homolog
  misc_feature (1)..(195): Homolog of NCBI NO: 39725278 NR Description: salt tolerance protein 2 [Beta vulgaris]
  misc_feature (1)..(175): Homolog of NCBI NO: 21593013 NR Description: nuclear RNA binding protein A-like protein
  misc_feature (1)..(175): Homolog of NCBI NO: 15236552 NR Description: nuclear RNA binding protein A-like protein
  misc_feature (1)..(195): Homolog of NCBI NO: 15238039 NR Description: putative protein
  misc_feature (1)..(195): Homolog of NCBI NO: 21553991 NR Description: nuclear RNA binding protein A-like protein

SEQ ID NO: 34362 - DNA, 1191 bp, Arabidopsis thaliana; identical to SEQ ID NO: 30772
  misc_feature (1)..(1191): Ceres Seq. ID no. 13497360
  misc_feature: MA Experiment ID: 108464 Result: Down-regulated in Transcription
  misc_feature: MA Experiment 108464 PARAMETER Experiment Name: At_Germinating_Seeds_cDNA_P Parameter: Age (day) Value: 4 vs. 0
  misc_feature: MA Experiment 108464 PARAMETER Experiment Name: At_Germinating_Seeds_cDNA_P Parameter: Tissue Value: Germinating Seeds
  misc_feature: MA Experiment ID: 20000113 Result: Down-regulated in Transcription
  misc_feature: MA Experiment 20000113 PARAMETER Experiment Name: At_42deg_Heat_cDNA_P Parameter: Temperature (deg C) Value: 42 vs. 22
  misc_feature: MA Experiment 20000113 PARAMETER Experiment Name: At_42deg_Heat_cDNA_P Parameter: Timepoint (hr) Value: 8
  misc_feature: MA Experiment 20000113 PARAMETER Experiment Name: At_42deg_Heat_cDNA_P Parameter: Tissue Value: Aerial

SEQ ID NO: 34363 - protein, 333 aa, Arabidopsis thaliana; identical to SEQ ID NO: 30773
  peptide (1)..(333): Ceres Seq. ID no. 13497361
  misc_feature (49)..(312): Pfam Name: Inositol polyphosphate kinase Pfam Description: Inositol polyphosphate kinase
  misc_feature (37)..(265): Homolog of NCBI NO: 19705555 NR Description: inositol polyphosphate multikinase [Rattus
  misc_feature (41)..(315): Homolog of NCBI NO: 24580674 NR Description: CG13688-PA [Drosophila melanogaster]
  misc_feature (41)..(315): Homolog of NCBI NO: 21430778 NR Description: SD14726p [Drosophila melanogaster]
  misc_feature (34)..(313): Homolog of NCBI NO: 13509210 NR Description: hypothetical protein [Linum usitatissimum]
  misc_feature (34)..(332): Homolog of NCBI NO: 13509208 NR Description: hypothetical protein [Linum usitatissimum]
  misc_feature (35)..(320): Homolog of NCBI NO: 8919088 NR Description: putative inositol hexaphosphate kinase
  misc_feature (35)..(320): Homolog of NCBI NO: 15240776 NR Description: inositol polyphosphate 6-/3-/5-kinase 2a (IPK2a)
  misc_feature (35)..(320): Homolog of NCBI NO: 21592823 NR Description: putative inositol hexaphosphate kinase
  misc_feature (34)..(333): Homolog of NCBI NO: 21553994 NR Description: putative inositol hexaphosphate kinase
  misc_feature (34)..(333): Homolog of NCBI NO: 15240350 NR Description: inositol polyphosphate 6-/3-/5-kinase 2b (IPK2b)

SEQ ID NO: 34364 - protein, 300 aa, Arabidopsis thaliana; identical to SEQ ID NO: 30774
  peptide (1)..(300): Ceres Seq. ID no. 13497362
  misc_feature (16)..(279): Pfam Name: Inositol polyphosphate kinase Pfam Description: Inositol polyphosphate kinase
  misc_feature (4)..(232): Homolog of NCBI NO: 19705555 NR Description: inositol polyphosphate multikinase [Rattus
  misc_feature (8)..(282): Homolog of NCBI NO: 24580674 NR Description: CG13688-PA [Drosophila melanogaster]
  misc_feature (8)..(282): Homolog of NCBI NO: 21430778 NR Description: SD14726p [Drosophila melanogaster]
  misc_feature (1)..(280): Homolog of NCBI NO: 13509210 NR Description: hypothetical protein [Linum usitatissimum]
  misc_feature (1)..(299): Homolog of NCBI NO: 13509208 NR Description: hypothetical protein [Linum usitatissimum]
  misc_feature (2)..(287): Homolog of NCBI NO: 8919088 NR Description: putative inositol hexaphosphate kinase
  misc_feature (2)..(287): Homolog of NCBI NO: 15240776 NR Description: inositol polyphosphate 6-/3-/5-kinase 2a (IPK2a)
  misc_feature (2)..(287): Homolog of NCBI NO: 21592823 NR Description: putative inositol hexaphosphate kinase
  misc_feature (1)..(300): Homolog of NCBI NO: 21553994 NR Description: putative inositol hexaphosphate kinase
  misc_feature (1)..(300): Homolog of NCBI NO: 15240350 NR Description: inositol polyphosphate 6-/3-/5-kinase 2b (IPK2b)

SEQ ID NO: 34365 - protein, 248 aa, Arabidopsis thaliana; identical to SEQ ID NO: 30775
  peptide (1)..(248): Ceres Seq. ID no. 13497363
  misc_feature (1)..(227): Pfam Name: Inositol polyphosphate kinase Pfam Description: Inositol polyphosphate kinase
  misc_feature (1)..(180): Homolog of NCBI NO: 19705555 NR Description: inositol polyphosphate multikinase [Rattus
  misc_feature (1)..(230): Homolog of NCBI NO: 24580674 NR Description: CG13688-PA [Drosophila melanogaster]
  misc_feature (1)..(230): Homolog of NCBI NO: 21430778 NR Description: SD14726p [Drosophila melanogaster]
  misc_feature (1)..(228): Homolog of NCBI NO: 13509210 NR Description: hypothetical protein [Linum usitatissimum]
  misc_feature (1)..(247): Homolog of NCBI NO: 13509208 NR Description: hypothetical protein [Linum usitatissimum]
  misc_feature (1)..(235): Homolog of NCBI NO: 8919088 NR Description: putative inositol hexaphosphate kinase
  misc_feature (1)..(235): Homolog of NCBI NO: 15240776 NR Description: inositol polyphosphate 6-/3-/5-kinase 2a (IPK2a)
  misc_feature (1)..(235): Homolog of NCBI NO: 21592823 NR Description: putative inositol hexaphosphate kinase
  misc_feature (1)..(248): Homolog of NCBI NO: 21553994 NR Description: putative inositol hexaphosphate kinase
  misc_feature (1)..(248): Homolog of NCBI NO: 15240350 NR Description: inositol polyphosphate 6-/3-/5-kinase 2b (IPK2b)

SEQ ID NO: 34366 - DNA, 1536 bp, Arabidopsis thaliana; identical to SEQ ID NO: 30776
  misc_feature (1)..(1536): Ceres Seq. ID no. 12335031
  misc_feature: MA Experiment ID: 20000112 Result: Up-regulated in Transcription
  misc_feature: MA Experiment 20000112 PARAMETER Experiment Name: At_42deg_Heat_cDNA_P Parameter: Temperature (deg C) Value: 42 vs. 22
  misc_feature: MA Experiment 20000112 PARAMETER Experiment Name: At_42deg_Heat_cDNA_P Parameter: Timepoint (hr) Value: 2
  misc_feature: MA Experiment 20000112 PARAMETER Experiment Name: At_42deg_Heat_cDNA_P Parameter: Tissue Value: Aerial
  misc_feature: MA Experiment ID: 20000144 Result: Up-regulated in Transcription
  misc_feature: MA Experiment 20000144 PARAMETER Experiment Name: At_42deg_Heat_cDNA_P Parameter: Temperature (deg C) Value: 42 vs. 22
  misc_feature: MA Experiment 20000144 PARAMETER Experiment Name: At_42deg_Heat_cDNA_P Parameter: Timepoint (hr) Value: 1
  misc_feature: MA Experiment 20000144 PARAMETER Experiment Name: At_42deg_Heat_cDNA_P Parameter: Tissue Value: Aerial
  misc_feature: MA Experiment ID: 20000171 Result: Up-regulated in Transcription
  misc_feature: MA Experiment 20000171 PARAMETER Experiment Name: At_42deg_Heat_P Parameter: Age (day) Value: 14
  misc_feature: MA Experiment 20000171 PARAMETER Experiment Name: At_42deg_Heat_P Parameter: Organism Value: A. thaliana
  misc_feature: MA Experiment 20000171 PARAMETER Experiment Name: At_42deg_Heat_P Parameter: Plant Line Value: WS
  misc_feature: MA Experiment 20000171 PARAMETER Experiment Name: At_42deg_Heat_P Parameter: Temperature (deg C) Value: 42 vs. 22
  misc_feature: MA Experiment 20000171 PARAMETER Experiment Name: At_42deg_Heat_P Parameter: Timepoint (hr) Value: 1
  misc_feature: MA Experiment 20000171 PARAMETER Experiment Name: At_42deg_Heat_P Parameter: Tissue Value: Aerial
  misc_feature: Phenotype: WHOLE PLANT Color-Dark Green
  misc_feature: Phenotype: WHOLE PLANT Size-Small
  misc_feature: Phenotype: INFLORESCENCE Height-Short
  misc_feature: Phenotype: INFLORESCENCE Internode Length-Short Internode
  misc_feature: Phenotype: INFLORESCENCE Strength-Strong
  misc_feature: Phenotype: WHOLE PLANT Color-Dark Green
  misc_feature: Phenotype: WHOLE PLANT Size-Small
  misc_feature: Phenotype: WHOLE PLANT Color-Dark Green
  misc_feature: Phenotype: WHOLE PLANT Size-Small
  misc_feature: Phenotype: WHOLE PLANT Color-Dark Green
  misc_feature: Phenotype: WHOLE PLANT Size-Small
  misc_feature: Phenotype: INFLORESCENCE Height-Short
  misc_feature: Phenotype: INFLORESCENCE Internode Length-Short Internode
  misc_feature: Phenotype: WHOLE PLANT Color-Dark Green
  misc_feature: Phenotype: WHOLE PLANT Size-Small
  misc_feature: Phenotype: INFLORESCENCE Height-Short
  misc_feature: Phenotype: INFLORESCENCE Internode Length-Short Internode
  misc_feature: Phenotype: ROSETTE LEAVES Shape-Oval
  misc_feature: Phenotype: WHOLE PLANT Color-Dark Green
  misc_feature: Phenotype: WHOLE PLANT Size-Small
  misc_feature: Phenotype: INFLORESCENCE Internode Length-Short Internode
  misc_feature: Phenotype: WHOLE PLANT Color-Dark Green
  misc_feature: Phenotype: WHOLE PLANT Size-Small
  misc_feature: Phenotype: INFLORESCENCE Height-Short
  misc_feature: Phenotype: INFLORESCENCE Internode Length-Short Internode
  misc_feature: Phenotype: WHOLE PLANT Color-Dark Green
  misc_feature: Phenotype: INFLORESCENCE Height-Short
  misc_feature: Phenotype: INFLORESCENCE Internode Length-Short Internode

SEQ ID NO: 34367 - protein, 445 aa, Arabidopsis thaliana; identical to SEQ ID NO: 30777
  peptide (1)..(445): Ceres Seq. ID no. 12335032
  misc_feature (49)..(433): Pfam Name: TAP42-like family Pfam Description: TAP42-like family
  misc_feature (345)..(440): Homolog of NCBI NO: 30584781 NR Description: Homo sapiens immunoglobulin (CD79A) binding
  misc_feature (48)..(281): Homolog of NCBI NO: 30584781 NR Description: Homo sapiens immunoglobulin (CD79A) binding
  misc_feature (345)..(440): Homolog of NCBI NO: 4557663 NR Description: immunoglobulin (CD79A) binding protein 1
  misc_feature (48)..(281): Homolog of NCBI NO: 4557663 NR Description: immunoglobulin (CD79A) binding protein 1
  misc_feature (227)..(445): Homolog of NCBI NO: 7489459 NR Description: chilling-induced protein - rice
  misc_feature (48)..(263): Homolog of NCBI NO: 7489459 NR Description: chilling-induced protein - rice
  misc_feature (48)..(445): Homolog of NCBI NO: 29367365 NR Description: PP2A regulatory subunit-like protein
  misc_feature (41)..(445): Homolog of NCBI NO: 8809589 NR Description: PP2A regulatory subunit [Arabidopsis thaliana]
  misc_feature (41)..(445): Homolog of NCBI NO: 21553995 NR Description: PP2A regulatory subunit [Arabidopsis thaliana]
  misc_feature (41)..(445): Homolog of NCBI NO: 18423459 NR Description: PP2A regulatory subunit

SEQ ID NO: 34368 - protein, 405 aa, Arabidopsis thaliana; identical to SEQ ID NO: 30778
  peptide (1)..(405): Ceres Seq. ID no. 12335033
  misc_feature (9)..(393): Pfam Name: TAP42-like family Pfam Description: TAP42-like family
  misc_feature (305)..(400): Homolog of NCBI NO: 30584781 NR Description: Homo sapiens immunoglobulin (CD79A) binding
  misc_feature (8)..(241): Homolog of NCBI NO: 30584781 NR Description: Homo sapiens immunoglobulin (CD79A) binding
  misc_feature (305)..(400): Homolog of NCBI NO: 4557663 NR Description: immunoglobulin (CD79A) binding protein 1
  misc_feature (8)..(241): Homolog of NCBI NO: 4557663 NR Description: immunoglobulin (CD79A) binding protein 1
  misc_feature (187)..(405): Homolog of NCBI NO: 7489459 NR Description: chilling-induced protein - rice
  misc_feature (8)..(223): Homolog of NCBI NO: 7489459 NR Description: chilling-induced protein - rice
  misc_feature (8)..(405): Homolog of NCBI NO: 29367365 NR Description: PP2A regulatory subunit-like protein
  misc_feature (1)..(405): Homolog of NCBI NO: 8809589 NR Description: PP2A regulatory subunit [Arabidopsis thaliana]
  misc_feature (1)..(405): Homolog of NCBI NO: 21553995 NR Description: PP2A regulatory subunit [Arabidopsis thaliana]
  misc_feature (1)..(405): Homolog of NCBI NO: 18423459 NR Description: PP2A regulatory subunit

SEQ ID NO: 34369 - protein, 400 aa, Arabidopsis thaliana; identical to SEQ ID NO: 30779
  peptide (1)..(400): Ceres Seq. ID no. 12335034
  misc_feature (4)..(388): Pfam Name: TAP42-like family Pfam Description: TAP42-like family
  misc_feature (300)..(395): Homolog of NCBI NO: 30584781 NR Description: Homo sapiens immunoglobulin (CD79A) binding
  misc_feature (3)..(236): Homolog of NCBI NO: 30584781 NR Description: Homo sapiens immunoglobulin (CD79A) binding
  misc_feature (300)..(395): Homolog of NCBI NO: 4557663 NR Description: immunoglobulin (CD79A) binding protein 1
  misc_feature (3)..(236): Homolog of NCBI NO: 4557663 NR Description: immunoglobulin (CD79A) binding protein 1
  misc_feature (182)..(400): Homolog of NCBI NO: 7489459 NR Description: chilling-induced protein - rice
  misc_feature (3)..(218): Homolog of NCBI NO: 7489459 NR Description: chilling-induced protein - rice
  misc_feature (3)..(400): Homolog of NCBI NO: 29367365 NR Description: PP2A regulatory subunit-like protein
  misc_feature (1)..(400): Homolog of NCBI NO: 8809589 NR Description: PP2A regulatory subunit [Arabidopsis thaliana]
  misc_feature (1)..(400): Homolog of NCBI NO: 21553995 NR Description: PP2A regulatory subunit [Arabidopsis thaliana]
  misc_feature (1)..(400): Homolog of NCBI NO: 18423459 NR Description: PP2A regulatory subunit

SEQ ID NO: 34370 - DNA, 1169 bp, Arabidopsis thaliana; identical to SEQ ID NO: 30780
  misc_feature (1)..(1169): Ceres Seq. ID no. 13486807
  misc_feature: MA Experiment ID: 108434 Result: Up-regulated in Transcription
  misc_feature: MA Experiment 108434 PARAMETER Experiment Name: At_Root_Tips_cDNA_P Parameter: Tissue Value: Root Tips
  misc_feature: MA Experiment ID: 108488 Result: Up-regulated in Transcription
  misc_feature: MA Experiment ID: 108573 Result: Up-regulated in Transcription
  misc_feature: MA Experiment 108573 PARAMETER Experiment Name: At_Drought_cDNA_P Parameter: Timepoint (hr) Value: 6
  misc_feature: MA Experiment 108573 PARAMETER Experiment Name: At_Drought_cDNA_P Parameter: Tissue Value: Aerial
  misc_feature: MA Experiment 108573 PARAMETER Experiment Name: At_Drought_cDNA_P Parameter: Treatment Value: Drought vs. No Drought
  misc_feature: MA Experiment ID: 108595 Result: Down-regulated in Transcription
  misc_feature: MA Experiment 108595 PARAMETER Experiment Name: At_Ler-pi_Ovule_cDNA_P Parameter: Plant Line Value: null
  misc_feature: MA Experiment ID: 20000069 Result: Down-regulated in Transcription
  misc_feature: MA Experiment 20000069 PARAMETER Experiment Name: At_100uM_ABA_Mutants_cDNA_P Parameter: Plant Line Value: CS23
  misc_feature: MA Experiment 20000069 PARAMETER Experiment Name: At_100uM_ABA_Mutants_cDNA_P Parameter: Timepoint (hr) Value: 6
  misc_feature: MA Experiment 20000069 PARAMETER Experiment Name: At_100uM_ABA_Mutants_cDNA_P Parameter: Tissue Value: Aerial
  misc_feature: MA Experiment 20000069 PARAMETER Experiment Name: At_100uM_ABA_Mutants_cDNA_P Parameter: Treatment Value: 100uM ABA vs. No Treatment
  misc_feature: MA Experiment ID: 20000070 Result: Down-regulated in Transcription
  misc_feature: MA Experiment 20000070 PARAMETER Experiment Name: At_100uM_ABA_Mutants_cDNA_P Parameter: Plant Line Value: CS24
  misc_feature: MA Experiment 20000070 PARAMETER Experiment Name: At_100uM_ABA_Mutants_cDNA_P Parameter: Timepoint (hr) Value: 6
  misc_feature: MA Experiment 20000070 PARAMETER Experiment Name: At_100uM_ABA_Mutants_cDNA_P Parameter: Tissue Value: Aerial
  misc_feature: MA Experiment 20000070 PARAMETER Experiment Name: At_100uM_ABA_Mutants_cDNA_P Parameter: Treatment Value: 100uM ABA vs. No Treatment
  misc_feature: MA Experiment ID: 20000071 Result: Down-regulated in Transcription
  misc_feature: MA Experiment 20000071 PARAMETER Experiment Name: At_100uM_ABA_Mutants_cDNA_P Parameter: Plant Line Value: CS8104
  misc_feature: MA Experiment 20000071 PARAMETER Experiment Name: At_100uM_ABA_Mutants_cDNA_P Parameter: Timepoint (hr) Value: 6
  misc_feature: MA Experiment 20000071 PARAMETER Experiment Name: At_100uM_ABA_Mutants_cDNA_P Parameter: Tissue Value: Aerial
  misc_feature: MA Experiment 20000071 PARAMETER Experiment Name: At_100uM_ABA_Mutants_cDNA_P Parameter: Treatment Value: 100uM ABA vs. No Treatment
  misc_feature: MA Experiment ID: 20000072 Result: Down-regulated in Transcription
  misc_feature: MA Experiment 20000072 PARAMETER Experiment Name: At_100uM_ABA_Mutants_cDNA_P Parameter: Plant Line Value: CS8105
  misc_feature: MA Experiment 20000072 PARAMETER Experiment Name: At_100uM_ABA_Mutants_cDNA_P Parameter: Timepoint (hr) Value: 6
  misc_feature: MA Experiment 20000072 PARAMETER Experiment Name: At_100uM_ABA_Mutants_cDNA_P Parameter: Tissue Value: Aerial
  misc_feature: MA Experiment 20000072 PARAMETER Experiment Name: At_100uM_ABA_Mutants_cDNA_P Parameter: Treatment Value: 100uM ABA vs. No Treatment
  misc_feature: MA Experiment ID: 20000086 Result: Down-regulated in Transcription
  misc_feature: MA Experiment 20000086 PARAMETER Experiment Name: At_100uM_ABA_Mutants_cDNA_P Parameter: Plant Line Value: CS22
  misc_feature: MA Experiment 20000086 PARAMETER Experiment Name: At_100uM_ABA_Mutants_cDNA_P Parameter: Timepoint (hr) Value: 6
  misc_feature: MA Experiment 20000086 PARAMETER Experiment Name: At_100uM_ABA_Mutants_cDNA_P Parameter: Tissue Value: Aerial
  misc_feature: MA Experiment 20000086 PARAMETER Experiment Name: At_100uM_ABA_Mutants_cDNA_P Parameter: Treatment Value: 100uM ABA vs. No Treatment
  misc_feature: MA Experiment ID: 20000087 Result: Down-regulated in Transcription
  misc_feature: MA Experiment 20000087 PARAMETER Experiment Name: At_100uM_ABA_Mutants_cDNA_P Parameter: Plant Line Value: WS
  misc_feature: MA Experiment 20000087 PARAMETER Experiment Name: At_100uM_ABA_Mutants_cDNA_P Parameter: Timepoint (hr) Value: 6
  misc_feature: MA Experiment 20000087 PARAMETER Experiment Name: At_100uM_ABA_Mutants_cDNA_P Parameter: Tissue Value: Aerial
  misc_feature: MA Experiment 20000087 PARAMETER Experiment Name: At_100uM_ABA_Mutants_cDNA_P Parameter: Treatment Value: 100uM ABA vs. No Treatment
  misc_feature: MA Experiment ID: 20000088 Result: Down-regulated in Transcription
  misc_feature: MA Experiment 20000088 PARAMETER Experiment Name: At_100uM_ABA_Mutants_cDNA_P Parameter: Plant Line Value: Landsberg
  misc_feature: MA Experiment 20000088 PARAMETER Experiment Name: At_100uM_ABA_Mutants_cDNA_P Parameter: Timepoint (hr) Value: 6
  misc_feature: MA Experiment 20000088 PARAMETER Experiment Name: At_100uM_ABA_Mutants_cDNA_P Parameter: Tissue Value: Aerial
  misc_feature: MA Experiment 20000088 PARAMETER Experiment Name: At_100uM_ABA_Mutants_cDNA_P Parameter: Treatment Value: 100uM ABA vs. No Treatment
  misc_feature: MA Experiment ID: 20000089 Result: Down-regulated in Transcription
  misc_feature: MA Experiment ID: 20000090 Result: Down-regulated in Transcription
  misc_feature: MA Experiment ID: 20000117 Result: Down-regulated in Transcription
  misc_feature: MA Experiment 20000117 PARAMETER Experiment Name: At_100uM_ABA_Mutants_cDNA_P Parameter: Plant Line Value: Columbia
  misc_feature: MA Experiment 20000117 PARAMETER Experiment Name: At_100uM_ABA_Mutants_cDNA_P Parameter: Timepoint (hr) Value: 6
  misc_feature: MA Experiment 20000117 PARAMETER Experiment Name: At_100uM_ABA_Mutants_cDNA_P Parameter: Tissue Value: Aerial
  misc_feature: MA Experiment 20000117 PARAMETER Experiment Name: At_100uM_ABA_Mutants_cDNA_P Parameter: Treatment Value: 100uM ABA vs. No Treatment
  misc_feature: MA Experiment ID: 20000184 Result: Up-regulated in Transcription
  misc_feature: MA Experiment 20000184 PARAMETER Experiment Name: At_Shoots__P Parameter: Age (day) Value: 7
  misc_feature: MA Experiment 20000184 PARAMETER Experiment Name: At_Shoots__P Parameter: Tissue Value: Shoots vs. Whole Plant
  misc_feature: MA Experiment ID: 20000185 Result: Down-regulated in Transcription
  misc_feature: MA Experiment 20000185 PARAMETER Experiment Name: At_Roots__P Parameter: Age (day) Value: 7 vs. 21
  misc_feature: MA Experiment 20000185 PARAMETER Experiment Name: At_Roots__P Parameter: Organism Value: A. thaliana
  misc_feature: MA Experiment 20000185 PARAMETER Experiment Name: At_Roots__P Parameter: Tissue Value: Roots vs. Whole Plant
  misc_feature: MA Experiment ID: 20000437 Result: Down-regulated in Transcription
  misc_feature: MA Experiment 20000437 PARAMETER Experiment Name: At_Drought_P Parameter: Age (day) Value: 8
  misc_feature: MA Experiment 20000437 PARAMETER Experiment Name: At_Drought_P Parameter: Organism Value: A. thaliana
  misc_feature: MA Experiment 20000437 PARAMETER Experiment Name: At_Drought_P Parameter: Plant Line Value: WS
  misc_feature: MA Experiment 20000437 PARAMETER Experiment Name: At_Drought_P Parameter: Timepoint (hr) Value: 24
  misc_feature: MA Experiment 20000437 PARAMETER Experiment Name: At_Drought_P Parameter: Tissue Value: Whole Plant
  misc_feature: MA Experiment 20000437 PARAMETER Experiment Name: At_Drought_P Parameter: Treatment Value: Drought vs. No Drought
  misc_feature: MA Experiment ID: 20000438 Result: Up-regulated in Transcription
  misc_feature: MA Experiment 20000438 PARAMETER Experiment Name: At_Shoots__P Parameter: Age (day) Value: 14
  misc_feature: MA Experiment 20000438 PARAMETER Experiment Name: At_Shoots__P Parameter: Tissue Value: Shoots vs. Whole Plant
  misc_feature: MA Experiment ID: 20000439 Result: Down-regulated in Transcription
  misc_feature: MA Experiment 20000439 PARAMETER Experiment Name: At_Roots__P Parameter: Age (day) Value: 14 vs. 21
  misc_feature: MA Experiment 20000439 PARAMETER Experiment Name: At_Roots__P Parameter: Organism Value: A. thaliana
  misc_feature: MA Experiment 20000439 PARAMETER Experiment Name: At_Roots__P Parameter: Tissue Value: Roots vs. Whole Plant
  misc_feature: MA Experiment ID: 20000794 Result: Down-regulated in Transcription
  misc_feature: MA Experiment 20000794 PARAMETER Experiment Name: At_Petals_P Parameter: Age (day) Value: 23-25 days
  misc_feature: MA Experiment 20000794 PARAMETER Experiment Name: At_Petals_P Parameter: Plant Line Value: WS
  misc_feature: MA Experiment 20000794 PARAMETER Experiment Name: At_Petals_P Parameter: Tissue Value: Petals vs. Whole plant
  misc_feature: MA Experiment ID: 20001451 Result: Down-regulated in Transcription
  misc_feature: MA Experiment 20001451 PARAMETER Experiment Name: At_Far-red-induction_P Parameter: Age (day) Value: 7
  misc_feature: MA Experiment 20001451 PARAMETER Experiment Name: At_Far-red-induction_P Parameter: Light Value: Far-red vs. White
  misc_feature: MA Experiment 20001451 PARAMETER Experiment Name: At_Far-red-induction_P Parameter: Organism Value: A. thaliana
  misc_feature: MA Experiment 20001451 PARAMETER Experiment Name: At_Far-red-induction_P Parameter: Plant Line Value: Columbia
  misc_feature: MA Experiment 20001451 PARAMETER Experiment Name: At_Far-red-induction_P Parameter: Timepoint (hr) Value: 24
  misc_feature: MA Experiment 20001451 PARAMETER Experiment Name: At_Far-red-induction_P Parameter: Tissue Value: Whole Plant
  misc_feature: MA Experiment ID: 20001757 Result: Up-regulated in Transcription
  misc_feature: MA Experiment 20001757 PARAMETER Experiment Name: At_50mM_NH4NO3_L-to-H_P Parameter: Timepoint (hr) Value: 6
  misc_feature: MA Experiment 20001757 PARAMETER Experiment Name: At_50mM_NH4NO3_L-to-H_P Parameter: Tissue Value: Leaf
  misc_feature: MA Experiment 20001757 PARAMETER Experiment Name: At_50mM_NH4NO3_L-to-H_P Parameter: Treatment Value: 50mM NH4NO3 vs 100mM Mannitol

SEQ ID NO: 34371 - protein, 338 aa, Arabidopsis thaliana; identical to SEQ ID NO: 30781
  peptide (1)..(338): Ceres Seq. ID no. 13486808
  misc_feature (67)..(257): Pfam Name: ubiE/COQ5 methyltransferase family Pfam Description: ubiE/COQ5 methyltransferase family
  misc_feature (67)..(250): Homolog of NCBI NO: 15790980 NR Description: membrane protein; Hmp [Halobacterium sp. NRC-1]
  misc_feature (67)..(260): Homolog of NCBI NO: 11498123 NR Description: chloroplast inner envelope membrane protein
  misc_feature (1)..(186): Homolog of NCBI NO: 25458195 NR Description: membrane protein, 37K, chloroplast inner envelope
  misc_feature (21)..(335): Homolog of NCBI NO: 37265798 NR Description: MPBQ/MSBQ methyltransferase [Chlamydomonas
  misc_feature (46)..(338): Homolog of NCBI NO: 34393472 NR Description: putative 37kDa chloroplast inner envelope
  misc_feature (1)..(338): Homolog of NCBI NO: 124429 NR Description: 37 KD INNER ENVELOPE MEMBRANE PROTEIN,
  misc_feature (1)..(338): Homolog of NCBI NO: 7489166 NR Description: membrane protein, 37K, precursor, chloroplast
  misc_feature (1)..(338): Homolog of NCBI NO: 15005009 NR Description: APG1 [Arabidopsis thaliana]
  misc_feature (1)..(338): Homolog of NCBI NO: 15229430 NR Description: chloroplast inner envelope membrane protein,
  misc_feature (1)..(338): Homolog of NCBI NO: 21553996 NR Description: putative chloroplast inner envelope protein

SEQ ID NO: 34372 - protein, 334 aa, Arabidopsis thaliana; identical to SEQ ID NO: 30782
  peptide (1)..(334): Ceres Seq. ID no. 13486809
  misc_feature (63)..(253): Pfam Name: ubiE/COQ5 methyltransferase family Pfam Description: ubiE/COQ5 methyltransferase family
  misc_feature (63)..(246): Homolog of NCBI NO: 15790980 NR Description: membrane protein; Hmp [Halobacterium sp. NRC-1]
  misc_feature (63)..(256): Homolog of NCBI NO: 11498123 NR Description: chloroplast inner envelope membrane protein
  misc_feature (1)..(182): Homolog of NCBI NO: 25458195 NR Description: membrane protein, 37K, chloroplast inner envelope
  misc_feature (17)..(331): Homolog of NCBI NO: 37265798 NR Description: MPBQ/MSBQ methyltransferase [Chlamydomonas
  misc_feature (42)..(334): Homolog of NCBI NO: 34393472 NR Description: putative 37kDa chloroplast inner envelope
  misc_feature (1)..(334): Homolog of NCBI NO: 124429 NR Description: 37 KD INNER ENVELOPE MEMBRANE PROTEIN,
  misc_feature (1)..(334): Homolog of NCBI NO: 7489166 NR Description: membrane protein, 37K, precursor, chloroplast
  misc_feature (1)..(334): Homolog of NCBI NO: 15005009 NR Description: APG1 [Arabidopsis thaliana]
  misc_feature (1)..(334): Homolog of NCBI NO: 15229430 NR Description: chloroplast inner envelope membrane protein,
  misc_feature (1)..(334): Homolog of NCBI NO: 21553996 NR Description: putative chloroplast inner envelope protein

SEQ ID NO: 34373 - protein, 242 aa, Arabidopsis thaliana; identical to SEQ ID NO: 30783
  peptide (1)..(242): Ceres Seq. ID no. 13486810
  misc_feature (1)..(161): Pfam Name: ubiE/COQ5 methyltransferase family Pfam Description: ubiE/COQ5 methyltransferase family
  misc_feature (1)..(154): Homolog of NCBI NO: 15790980 NR Description: membrane protein; Hmp [Halobacterium sp. NRC-1]
  misc_feature (1)..(164): Homolog of NCBI NO: 11498123 NR Description: chloroplast inner envelope membrane protein
  misc_feature (1)..(90): Homolog of NCBI NO: 25458195 NR Description: membrane protein, 37K, chloroplast inner envelope
  misc_feature (1)..(239): Homolog of NCBI NO: 37265798 NR Description: MPBQ/MSBQ methyltransferase [Chlamydomonas
  misc_feature (1)..(242): Homolog of NCBI NO: 34393472 NR Description: putative 37kDa chloroplast inner envelope
  misc_feature (1)..(242): Homolog of NCBI NO: 124429 NR Description: 37 KD INNER ENVELOPE MEMBRANE PROTEIN,
  misc_feature (1)..(242): Homolog of NCBI NO: 7489166 NR Description: membrane protein, 37K, precursor, chloroplast
  misc_feature (1)..(242): Homolog of NCBI NO: 15005009 NR Description: APG1 [Arabidopsis thaliana]
  misc_feature (1)..(242): Homolog of NCBI NO: 15229430 NR Description: chloroplast inner envelope membrane protein,
  misc_feature (1)..(242): Homolog of NCBI NO: 21553996 NR Description: putative chloroplast inner envelope protein

SEQ ID NO: 34374 - DNA, 1466 bp, Arabidopsis thaliana; identical to SEQ ID NO: 30784
  misc_feature (1)..(1466): Ceres Seq. ID no. 13486703
  misc_feature: MA Experiment ID: 108434 Result: Up-regulated in Transcription
  misc_feature: MA Experiment 108434 PARAMETER Experiment Name: At_Root_Tips_cDNA_P Parameter: Tissue Value: Root Tips
  misc_feature: MA Experiment ID: 108461 Result: Down-regulated in Transcription
  misc_feature: MA Experiment 108461 PARAMETER Experiment Name: At_Germinating_Seeds_cDNA_P Parameter: Age (day) Value: 1 vs. 0
  misc_feature: MA Experiment 108461 PARAMETER Experiment Name: At_Germinating_Seeds_cDNA_P Parameter: Tissue Value: Germinating Seeds
  misc_feature: MA Experiment ID: 108462 Result: Down-regulated in Transcription
  misc_feature: MA Experiment 108462 PARAMETER Experiment Name: At_Germinating_Seeds_cDNA_P Parameter: Age (day) Value: 2 vs. 0
  misc_feature: MA Experiment 108462 PARAMETER Experiment Name: At_Germinating_Seeds_cDNA_P Parameter: Tissue Value: Germinating Seeds
  misc_feature: MA Experiment ID: 108463 Result: Down-regulated in Transcription
  misc_feature: MA Experiment 108463 PARAMETER Experiment Name: At_Germinating_Seeds_cDNA_P Parameter: Age (day) Value: 3 vs. 0
  misc_feature: MA Experiment 108463 PARAMETER Experiment Name: At_Germinating_Seeds_cDNA_P Parameter: Tissue Value: Germinating Seeds
  misc_feature: MA Experiment ID: 108576 Result: Up-regulated in Transcription
  misc_feature: MA Experiment 108576 PARAMETER Experiment Name: At_42deg_Heat_cDNA_P Parameter: Temperature (deg C) Value: 42 vs. 22
  misc_feature: MA Experiment 108576 PARAMETER Experiment Name: At_42deg_Heat_cDNA_P Parameter: Timepoint (hr) Value: 1
  misc_feature: MA Experiment 108576 PARAMETER Experiment Name: At_42deg_Heat_cDNA_P Parameter: Tissue Value: Aerial
  misc_feature: MA Experiment ID: 108577 Result: Up-regulated in Transcription
  misc_feature: MA Experiment 108577 PARAMETER Experiment Name: At_42deg_Heat_cDNA_P Parameter: Temperature (deg C) Value: 42 vs. 22
  misc_feature: MA Experiment 108577 PARAMETER Experiment Name: At_42deg_Heat_cDNA_P Parameter: Timepoint (hr) Value: 6
  misc_feature: MA Experiment 108577 PARAMETER Experiment Name: At_42deg_Heat_cDNA_P Parameter: Tissue Value: Aerial
  misc_feature: MA Experiment ID: 108595 Result: Up-regulated in Transcription
  misc_feature: MA Experiment 108595 PARAMETER Experiment Name: At_Ler-pi_Ovule_cDNA_P Parameter: Plant Line Value: null
  misc_feature: MA Experiment ID: 108668 Result: Up-regulated in Transcription
  misc_feature: MA Experiment 108668 PARAMETER Experiment Name: At_2mM_SA_cDNA_P Parameter: Plant Line Value: WS
  misc_feature: MA Experiment 108668 PARAMETER Experiment Name: At_2mM_SA_cDNA_P Parameter: Timepoint (hr) Value: 6
  misc_feature: MA Experiment 108668 PARAMETER Experiment Name: At_2mM_SA_cDNA_P Parameter: Treatment Value: 2mM SA vs. No Treatment
  misc_feature: MA Experiment ID: 20000070 Result: Up-regulated in Transcription
  misc_feature: MA Experiment 20000070 PARAMETER Experiment Name: At_100uM_ABA_Mutants_cDNA_P Parameter: Plant Line Value: CS24
  misc_feature: MA Experiment 20000070 PARAMETER Experiment Name: At_100uM_ABA_Mutants_cDNA_P Parameter: Timepoint (hr) Value: 6
  misc_feature: MA Experiment 20000070 PARAMETER Experiment Name: At_100uM_ABA_Mutants_cDNA_P Parameter: Tissue Value: Aerial
  misc_feature: MA Experiment 20000070 PARAMETER Experiment Name: At_100uM_ABA_Mutants_cDNA_P Parameter: Treatment Value: 100uM ABA vs. No Treatment
  misc_feature: MA Experiment ID: 20000089 Result: Up-regulated in Transcription
  misc_feature: MA Experiment ID: 20000090 Result: Up-regulated in Transcription
  misc_feature: MA Experiment ID: 20000093 Result: Up-regulated in Transcription
  misc_feature: MA Experiment 20000093 PARAMETER Experiment Name: At_42deg_Heat_cDNA_P Parameter: Temperature (deg C) Value: 42 vs. 22
  misc_feature: MA Experiment 20000093 PARAMETER Experiment Name: At_42deg_Heat_cDNA_P Parameter: Timepoint (hr) Value: 0.5
  misc_feature: MA Experiment 20000093 PARAMETER Experiment Name: At_42deg_Heat_cDNA_P Parameter: Tissue Value: Aerial
  misc_feature: MA Experiment ID: 20000112 Result: Up-regulated in Transcription
  misc_feature: MA Experiment 20000112 PARAMETER Experiment Name: At_42deg_Heat_cDNA_P Parameter: Temperature (deg C) Value: 42 vs. 22
  misc_feature: MA Experiment 20000112 PARAMETER Experiment Name: At_42deg_Heat_cDNA_P Parameter: Timepoint (hr) Value: 2
  misc_feature: MA Experiment 20000112 PARAMETER Experiment Name: At_42deg_Heat_cDNA_P Parameter: Tissue Value: Aerial
  misc_feature: MA Experiment ID: 20000113 Result: Up-regulated in Transcription
  misc_feature: MA Experiment 20000113 PARAMETER Experiment Name: At_42deg_Heat_cDNA_P Parameter: Temperature (deg C) Value: 42 vs. 22
  misc_feature: MA Experiment 20000113 PARAMETER Experiment Name: At_42deg_Heat_cDNA_P Parameter: Timepoint (hr) Value: 8
  misc_feature: MA Experiment 20000113 PARAMETER Experiment Name: At_42deg_Heat_cDNA_P Parameter: Tissue Value: Aerial
  misc_feature: MA Experiment ID: 20000117 Result: Up-regulated in Transcription
  misc_feature: MA Experiment 20000117 PARAMETER Experiment Name: At_100uM_ABA_Mutants_cDNA_P Parameter: Plant Line Value: Columbia
  misc_feature: MA Experiment 20000117 PARAMETER Experiment Name: At_100uM_ABA_Mutants_cDNA_P Parameter: Timepoint (hr) Value: 6
  misc_feature: MA Experiment 20000117 PARAMETER Experiment Name: At_100uM_ABA_Mutants_cDNA_P Parameter: Tissue Value: Aerial
  misc_feature: MA Experiment 20000117 PARAMETER Experiment Name: At_100uM_ABA_Mutants_cDNA_P Parameter: Treatment Value: 100uM ABA vs. No Treatment
  misc_feature: MA Experiment ID: 20000144 Result: Up-regulated in Transcription
  misc_feature: MA Experiment 20000144 PARAMETER Experiment Name: At_42deg_Heat_cDNA_P Parameter: Temperature (deg C) Value: 42 vs. 22
  misc_feature: MA Experiment 20000144 PARAMETER Experiment Name: At_42deg_Heat_cDNA_P Parameter: Timepoint (hr) Value: 1
  misc_feature: MA Experiment 20000144 PARAMETER Experiment Name: At_42deg_Heat_cDNA_P Parameter: Tissue Value: Aerial
  misc_feature: MA Experiment ID: 20000171 Result: Up-regulated in Transcription
  misc_feature: MA Experiment 20000171 PARAMETER Experiment Name: At_42deg_Heat_P Parameter: Age (day) Value: 14
  misc_feature: MA Experiment 20000171 PARAMETER Experiment Name: At_42deg_Heat_P Parameter: Organism Value: A. thaliana
  misc_feature: MA Experiment 20000171 PARAMETER Experiment Name: At_42deg_Heat_P Parameter: Plant Line Value: WS
  misc_feature: MA Experiment 20000171 PARAMETER Experiment Name: At_42deg_Heat_P Parameter: Temperature (deg C) Value: 42 vs. 22
  misc_feature: MA Experiment 20000171 PARAMETER Experiment Name: At_42deg_Heat_P Parameter: Timepoint (hr) Value: 1
  misc_feature: MA Experiment 20000171 PARAMETER Experiment Name: At_42deg_Heat_P Parameter: Tissue Value: Aerial
  misc_feature: MA Experiment ID: 20000173 Result: Up-regulated in Transcription
  misc_feature: MA Experiment 20000173 PARAMETER Experiment Name: At_42deg_Heat_P Parameter: Age (day) Value: 14
  misc_feature: MA Experiment 20000173 PARAMETER Experiment Name: At_42deg_Heat_P Parameter: Organism Value: A. thaliana
  misc_feature: MA Experiment 20000173 PARAMETER Experiment Name: At_42deg_Heat_P Parameter: Plant Line Value: WS
  misc_feature: MA Experiment 20000173 PARAMETER Experiment Name: At_42deg_Heat_P Parameter: Temperature (deg C) Value: 42 vs. 22
  misc_feature: MA Experiment 20000173 PARAMETER Experiment Name: At_42deg_Heat_P Parameter: Timepoint (hr) Value: 6
  misc_feature: MA Experiment 20000173 PARAMETER Experiment Name: At_42deg_Heat_P Parameter: Tissue Value: Aerial
  misc_feature: MA Experiment ID: 20000180 Result: Down-regulated in Transcription
  misc_feature: MA Experiment 20000180 PARAMETER Experiment Name: At_Germinating_Seeds_P Parameter: Age (hr) Value: 24 vs. 0
  misc_feature: MA Experiment 20000180 PARAMETER Experiment Name: At_Germinating_Seeds_P Parameter: Tissue Value: Germinating Seeds
  misc_feature: MA Experiment ID: 20000182 Result: Up-regulated in Transcription
  misc_feature: MA Experiment 20000182 PARAMETER Experiment Name: At_2mM_SA_P Parameter: Age (day) Value: 14
  misc_feature: MA Experiment 20000182 PARAMETER Experiment Name: At_2mM_SA_P Parameter: Organism Value: A. thaliana
  misc_feature: MA Experiment 20000182 PARAMETER Experiment Name: At_2mM_SA_P Parameter: Plant Line Value: WS
  misc_feature: MA Experiment 20000182 PARAMETER Experiment Name: At_2mM_SA_P Parameter: Timepoint (hr) Value: 6
  misc_feature: MA Experiment 20000182 PARAMETER Experiment Name: At_2mM_SA_P Parameter: Tissue Value: Aerial
  misc_feature: MA Experiment 20000182 PARAMETER Experiment Name: At_2mM_SA_P Parameter: Treatment Value: 2mM SA vs. No Treatment
  misc_feature: MA Experiment ID: 20000437 Result: Up-regulated in Transcription
  misc_feature: MA Experiment 20000437 PARAMETER Experiment Name: At_Drought_P Parameter: Age (day) Value: 8
  misc_feature: MA Experiment 20000437 PARAMETER Experiment Name: At_Drought_P Parameter: Organism Value: A. thaliana
  misc_feature: MA Experiment 20000437 PARAMETER Experiment Name: At_Drought_P Parameter: Plant Line Value: WS
  misc_feature: MA Experiment 20000437 PARAMETER Experiment Name: At_Drought_P Parameter: Timepoint (hr) Value: 24
  misc_feature: MA Experiment 20000437 PARAMETER Experiment Name: At_Drought_P Parameter: Tissue Value: Whole Plant
  misc_feature: MA Experiment 20000437 PARAMETER Experiment Name: At_Drought_P Parameter: Treatment Value: Drought vs. No Drought
  misc_feature: MA Experiment ID: 20000456 Result: Up-regulated in Transcription
  misc_feature: MA Experiment 20000456 PARAMETER Experiment Name: At_100uM_BA_P Parameter: Age (day) Value: 14
  misc_feature: MA Experiment 20000456 PARAMETER Experiment Name: At_100uM_BA_P Parameter: Organism Value: A. thaliana
  misc_feature: MA Experiment 20000456 PARAMETER Experiment Name: At_100uM_BA_P Parameter: Plant Line Value: WS
  misc_feature: MA Experiment 20000456 PARAMETER Experiment Name: At_100uM_BA_P Parameter: Timepoint (hr) Value: 6
  misc_feature: MA Experiment 20000456 PARAMETER Experiment Name: At_100uM_BA_P Parameter: Tissue Value: Aerial
  misc_feature: MA Experiment 20000456 PARAMETER Experiment Name: At_100uM_BA_P Parameter: Treatment Value: 100uM BA vs. No Treatment
  misc_feature: MA Experiment ID: 20000709 Result: Up-regulated in Transcription
  misc_feature: MA Experiment 20000709 PARAMETER Experiment Name: At_15mM_NH4NO3_L-to-H_P Parameter: Age (hr) Value: 14
  misc_feature: MA Experiment 20000709 PARAMETER Experiment Name: At_15mM_NH4NO3_L-to-H_P Parameter: Organism Value: A. thaliana
  misc_feature: MA Experiment 20000709 PARAMETER Experiment Name: At_15mM_NH4NO3_L-to-H_P Parameter: Plant Line Value: WS
  misc_feature: MA Experiment 20000709 PARAMETER Experiment Name: At_15mM_NH4NO3_L-to-H_P Parameter: Timepoint (hr) Value: 4
  misc_feature: MA Experiment 20000709 PARAMETER Experiment Name: At_15mM_NH4NO3_L-to-H_P Parameter: Tissue Value: Aerial
  misc_feature: MA Experiment 20000709 PARAMETER Experiment Name: At_15mM_NH4NO3_L-to-H_P Parameter: Treatment Value: 15mM NH4NO3 vs. 30mM Mannitol
  misc_feature: MA Experiment ID: 20001247 Result: Down-regulated in Transcription
  misc_feature: MA Experiment 20001247 PARAMETER Experiment Name: At_Far-red-induction_P Parameter: Age (day) Value: 7
  misc_feature: MA Experiment 20001247 PARAMETER Experiment Name: At_Far-red-induction_P Parameter: Light Value: Far-red vs. White
  misc_feature: MA Experiment 20001247 PARAMETER Experiment Name: At_Far-red-induction_P Parameter: Organism Value: A. thaliana
  misc_feature: MA Experiment 20001247 PARAMETER Experiment Name: At_Far-red-induction_P Parameter: Plant Line Value: Columbia
  misc_feature: MA Experiment 20001247 PARAMETER Experiment Name: At_Far-red-induction_P Parameter: Timepoint (hr) Value: 1
  misc_feature: MA Experiment 20001247 PARAMETER Experiment Name: At_Far-red-induction_P Parameter: Tissue Value: Whole Plant
  misc_feature: MA Experiment ID: 20001248 Result: Down-regulated in Transcription
  misc_feature: MA Experiment 20001248 PARAMETER Experiment Name: At_Far-red-induction_P Parameter: Age (day) Value: 7
  misc_feature: MA Experiment 20001248 PARAMETER Experiment Name: At_Far-red-induction_P Parameter: Light Value: Far-red vs. White
  misc_feature: MA Experiment 20001248 PARAMETER Experiment Name: At_Far-red-induction_P Parameter: Organism Value: A. thaliana
  misc_feature: MA Experiment 20001248 PARAMETER Experiment Name: At_Far-red-induction_P Parameter: Plant Line Value: Columbia
  misc_feature: MA Experiment 20001248 PARAMETER Experiment Name: At_Far-red-induction_P Parameter: Timepoint (hr) Value: 4
  misc_feature: MA Experiment 20001248 PARAMETER Experiment Name: At_Far-red-induction_P Parameter: Tissue Value: Whole Plant
  misc_feature: MA Experiment ID: 20001450 Result: Down-regulated in Transcription
  misc_feature: MA Experiment 20001450 PARAMETER Experiment Name: At_Far-red-induction_P Parameter: Age (day) Value: 7
  misc_feature: MA Experiment 20001450 PARAMETER Experiment Name: At_Far-red-induction_P Parameter: Light Value: Far-red vs. White
  misc_feature: MA Experiment 20001450 PARAMETER Experiment Name: At_Far-red-induction_P Parameter: Organism Value: A. thaliana
  misc_feature: MA Experiment 20001450 PARAMETER Experiment Name: At_Far-red-induction_P Parameter: Plant Line Value: Columbia
  misc_feature: MA Experiment 20001450 PARAMETER Experiment Name: At_Far-red-induction_P Parameter: Timepoint (hr) Value: 8
  misc_feature: MA Experiment 20001450 PARAMETER Experiment Name: At_Far-red-induction_P Parameter: Tissue Value: Whole Plant
  misc_feature: MA Experiment ID: 20001451 Result: Down-regulated in Transcription
  misc_feature: MA Experiment 20001451 PARAMETER Experiment Name: At_Far-red-induction_P Parameter: Age (day) Value: 7
  misc_feature: MA Experiment 20001451 PARAMETER Experiment Name: At_Far-red-induction_P Parameter: Light Value: Far-red vs. White
  misc_feature: MA Experiment 20001451 PARAMETER Experiment Name: At_Far-red-induction_P Parameter: Organism Value: A. thaliana
  misc_feature: MA Experiment 20001451 PARAMETER Experiment Name: At_Far-red-induction_P Parameter: Plant Line Value: Columbia
  misc_feature: MA Experiment 20001451 PARAMETER Experiment Name: At_Far-red-induction_P Parameter: Timepoint (hr) Value: 24
  misc_feature: MA Experiment 20001451 PARAMETER Experiment Name: At_Far-red-induction_P Parameter: Tissue Value: Whole Plant
  misc_feature: MA Experiment ID: 20001557 Result: Up-regulated in Transcription
  misc_feature: MA Experiment 20001557 PARAMETER Experiment Name: At_Drought_Soil_Dry_P Parameter: Age (day) Value: 27
  misc_feature: MA Experiment 20001557 PARAMETER Experiment Name: At_Drought_Soil_Dry_P Parameter: Organism Value: A. thaliana
  misc_feature: MA Experiment 20001557 PARAMETER Experiment Name: At_Drought_Soil_Dry_P Parameter: Plant Line Value: WS
  misc_feature: MA Experiment 20001557 PARAMETER Experiment Name: At_Drought_Soil_Dry_P Parameter: Post Timepoint (hr) Value: 3
  misc_feature: MA Experiment 20001557 PARAMETER Experiment Name: At_Drought_Soil_Dry_P Parameter: Post-Treatment Value: Re-Water vs. No Drought
  misc_feature: MA Experiment 20001557 PARAMETER Experiment Name: At_Drought_Soil_Dry_P Parameter: Timepoint (day) Value: 13
  misc_feature: MA Experiment 20001557 PARAMETER Experiment Name: At_Drought_Soil_Dry_P Parameter: Treatment Value: Drought vs. No Drought
  misc_feature: MA Experiment ID: 20001560 Result: Up-regulated in Transcription
  misc_feature: MA Experiment 20001560 PARAMETER Experiment Name: At_Drought_Soil_Dry_P Parameter: Age (day) Value: 28
  misc_feature: MA Experiment 20001560 PARAMETER Experiment Name: At_Drought_Soil_Dry_P Parameter: Organism Value: A. thaliana
  misc_feature: MA Experiment 20001560 PARAMETER Experiment Name: At_Drought_Soil_Dry_P Parameter: Plant Line Value: WS
  misc_feature: MA Experiment 20001560 PARAMETER Experiment Name: At_Drought_Soil_Dry_P Parameter: Post Timepoint (hr) Value: None
  misc_feature: MA Experiment 20001560 PARAMETER Experiment Name: At_Drought_Soil_Dry_P Parameter: Post-Treatment Value: None
  misc_feature: MA Experiment 20001560 PARAMETER Experiment Name: At_Drought_Soil_Dry_P Parameter: Timepoint (day) Value: 14
  misc_feature: MA Experiment 20001560 PARAMETER Experiment Name: At_Drought_Soil_Dry_P Parameter: Treatment Value: Drought vs. No Drought
  misc_feature: MA Experiment ID: 20001772 Result: Down-regulated in Transcription
  misc_feature: MA Experiment 20001772 PARAMETER Experiment Name: At_Far-red-enriched-adult_P Parameter: Age (day) Value: 29
  misc_feature: MA Experiment 20001772 PARAMETER Experiment Name: At_Far-red-enriched-adult_P Parameter: Light Value: Far-red enriched vs. White
  misc_feature: MA Experiment 20001772 PARAMETER Experiment Name: At_Far-red-enriched-adult_P Parameter: Organism Value: A. thaliana
  misc_feature: MA Experiment 20001772 PARAMETER Experiment Name: At_Far-red-enriched-adult_P Parameter: Plant Line Value: Columbia
  misc_feature: MA Experiment 20001772 PARAMETER Experiment Name: At_Far-red-enriched-adult_P Parameter: Timepoint (hr) Value: 24
  misc_feature: MA Experiment 20001772 PARAMETER Experiment Name: At_Far-red-enriched-adult_P Parameter: Tissue Value: Aerial
  misc_feature: MA Experiment ID: 20001905 Result: Up-regulated in Transcription
  misc_feature: MA Experiment 20001905 PARAMETER Experiment Name: At_Drought_Reproduction_P Parameter: Age (day) Value: 40
  misc_feature: MA Experiment 20001905 PARAMETER Experiment Name: At_Drought_Reproduction_P Parameter: Organism Value: A. thaliana
  misc_feature: MA Experiment 20001905 PARAMETER Experiment Name: At_Drought_Reproduction_P Parameter: Plant Line Value: WS
  misc_feature: MA Experiment 20001905 PARAMETER Experiment Name: At_Drought_Reproduction_P Parameter: Timepoint (day) Value: 10
  misc_feature: MA Experiment 20001905 PARAMETER Experiment Name: At_Drought_Reproduction_P Parameter: Tissue Value: Rosettes
  misc_feature: MA Experiment 20001905 PARAMETER Experiment Name: At_Drought_Reproduction_P Parameter: Treatment Value: Drought vs. No Drought
  misc_feature: MA Experiment ID: 20001911 Result: Up-regulated in Transcription
  misc_feature: MA Experiment 20001911 PARAMETER Experiment Name: At_Drought_Reproduction_P Parameter: Age (day) Value: 40
  misc_feature: MA Experiment 20001911 PARAMETER Experiment Name: At_Drought_Reproduction_P Parameter: Organism Value: A. thaliana
  misc_feature: MA Experiment 20001911 PARAMETER Experiment Name: At_Drought_Reproduction_P Parameter: Plant Line Value: WS
  misc_feature: MA Experiment 20001911 PARAMETER Experiment Name: At_Drought_Reproduction_P Parameter: Timepoint (day) Value: 10
  misc_feature: MA Experiment 20001911 PARAMETER Experiment Name: At_Drought_Reproduction_P Parameter: Tissue Value: Flowers
  misc_feature: MA Experiment 20001911 PARAMETER Experiment Name: At_Drought_Reproduction_P Parameter: Treatment Value: Drought vs. No Drought

SEQ ID NO: 34375 - protein, 363 aa, Arabidopsis thaliana; identical to SEQ ID NO: 30785
  peptide (1)..(363): Ceres Seq. ID no. 13486704
  misc_feature (130)..(171): Pfam Name: Armadillo/beta-catenin-like repeat Pfam Description: Armadillo/beta-catenin-like repeat
  misc_feature (7)..(316): Homolog of NCBI NO: 12667701 NR Description: Hsp70 binding protein [Danio rerio]
  misc_feature (7)..(316): Homolog of NCBI NO: 29436427 NR Description: Similar to RIKEN cDNA 1500019G21 gene [Danio
  misc_feature (1)..(314): Homolog of NCBI NO: 15241689 NR Description: expressed protein [Arabidopsis thaliana]
  misc_feature (1)..(363): Homolog of NCBI NO: 26449490 NR Description: unknown protein [Arabidopsis thaliana]
  misc_feature (1)..(363): Homolog of NCBI NO: 15232329 NR Description: expressed protein [Arabidopsis thaliana]
  misc_feature (1)..(363): Homolog of NCBI NO: 34897412 NR Description: putative Hsp70 binding protein
  misc_feature (1)..(29): Homolog of NCBI NO: 6478927 NR Description: hypothetical protein [Arabidopsis thaliana]
  misc_feature (30)..(363): Homolog of NCBI NO: 6478927 NR Description: hypothetical protein [Arabidopsis thaliana]
  misc_feature (1)..(363): Homolog of NCBI NO: 21553998 NR Description: unknown [Arabidopsis thaliana]
  misc_feature (1)..(363): Homolog of NCBI NO: 18398480 NR Description: expressed protein [Arabidopsis thaliana]

SEQ ID NO: 34376 - protein, 327 aa, Arabidopsis thaliana; identical to SEQ ID NO: 30786
  peptide (1)..(327): Ceres Seq. ID no. 13486705
  misc_feature (94)..(135): Pfam Name: Armadillo/beta-catenin-like repeat Pfam Description: Armadillo/beta-catenin-like repeat
  misc_feature (1)..(264): Homolog of NCBI NO: 15231095 NR Description: expressed protein [Arabidopsis thaliana]
  misc_feature (1)..(280): Homolog of NCBI NO: 12667701 NR Description: Hsp70 binding protein [Danio rerio]
  misc_feature (1)..(280): Homolog of NCBI NO: 29436427 NR Description: Similar to RIKEN cDNA 1500019G21 gene [Danio
  misc_feature (1)..(278): Homolog of NCBI NO: 15241689 NR Description: expressed protein [Arabidopsis thaliana]
  misc_feature (1)..(327): Homolog of NCBI NO: 26449490 NR Description: unknown protein [Arabidopsis thaliana]
  misc_feature (1)..(327): Homolog of NCBI NO: 15232329 NR Description: expressed protein [Arabidopsis thaliana]
  misc_feature (1)..(327): Homolog of NCBI NO: 34897412 NR Description: putative Hsp70 binding protein
  misc_feature (1)..(327): Homolog of NCBI NO: 6478927 NR Description: hypothetical protein [Arabidopsis thaliana]
  misc_feature (1)..(327): Homolog of NCBI NO: 21553998 NR Description: unknown [Arabidopsis thaliana]
  misc_feature (1)..(327): Homolog of NCBI NO: 18398480 NR Description: expressed protein [Arabidopsis thaliana]

SEQ ID NO: 34377 - protein, 324 aa, Arabidopsis thaliana; identical to SEQ ID NO: 30787
  peptide (1)..(324): Ceres Seq. ID no. 13486706
  misc_feature (91)..(132): Pfam Name: Armadillo/beta-catenin-like repeat Pfam Description: Armadillo/beta-catenin-like repeat
  misc_feature (1)..(261): Homolog of NCBI NO: 15231095 NR Description: expressed protein [Arabidopsis thaliana]
  misc_feature (1)..(277): Homolog of NCBI NO: 12667701 NR Description: Hsp70 binding protein [Danio rerio]
  misc_feature (1)..(277): Homolog of NCBI NO: 29436427 NR Description: Similar to RIKEN cDNA 1500019G21 gene [Danio
  misc_feature (1)..(275): Homolog of NCBI NO: 15241689 NR Description: expressed protein [Arabidopsis thaliana]
  misc_feature (1)..(324): Homolog of NCBI NO: 26449490 NR Description: unknown protein [Arabidopsis thaliana]
  misc_feature (1)..(324): Homolog of NCBI NO: 15232329 NR Description: expressed protein [Arabidopsis thaliana]
  misc_feature (1)..(324): Homolog of NCBI NO: 34897412 NR Description: putative Hsp70 binding protein
  misc_feature (1)..(324): Homolog of NCBI NO: 6478927 NR Description: hypothetical protein [Arabidopsis thaliana]
  misc_feature (1)..(324): Homolog of NCBI NO: 21553998 NR Description: unknown [Arabidopsis thaliana]
  misc_feature (1)..(324): Homolog of NCBI NO: 18398480 NR Description: expressed protein [Arabidopsis thaliana]

SEQ ID NO: 34378 - DNA, 1148 bp, Arabidopsis thaliana; identical to SEQ ID NO: 30788
  misc_feature (1)..(1148): Ceres Seq. ID no. 13491548
  misc_feature: MA Experiment ID: 20000169 Result: Up-regulated in Transcription
  misc_feature: MA Experiment 20000169 PARAMETER Experiment Name: At_100uM_ABA_P Parameter: Age (day) Value: 14
  misc_feature: MA Experiment 20000169 PARAMETER Experiment Name: At_100uM_ABA_P Parameter: Organism Value: A. thaliana
  misc_feature: MA Experiment 20000169 PARAMETER Experiment Name: At_100uM_ABA_P Parameter: Plant Line Value: WS
  misc_feature: MA Experiment 20000169 PARAMETER Experiment Name: At_100uM_ABA_P Parameter: Timepoint (hr) Value: 6
  misc_feature: MA Experiment 20000169 PARAMETER Experiment Name: At_100uM_ABA_P Parameter: Tissue Value: Aerial
  misc_feature: MA Experiment 20000169 PARAMETER Experiment Name: At_100uM_ABA_P Parameter: Treatment Value: 100uM ABA vs. No Treatment
  misc_feature: MA Experiment ID: 20000179 Result: Up-regulated in Transcription
  misc_feature: MA Experiment 20000179 PARAMETER Experiment Name: At_Germinating_Seeds_P Parameter: Age (hr) Value: 6 vs. 0
  misc_feature: MA Experiment 20000179 PARAMETER Experiment Name: At_Germinating_Seeds_P Parameter: Tissue Value: Germinating Seeds
  misc_feature: MA Experiment ID: 20000180 Result: Up-regulated in Transcription
  misc_feature: MA Experiment 20000180 PARAMETER Experiment Name: At_Germinating_Seeds_P Parameter: Age (hr) Value: 24 vs. 0
  misc_feature: MA Experiment 20000180 PARAMETER Experiment Name: At_Germinating_Seeds_P Parameter: Tissue Value: Germinating Seeds
  misc_feature: MA Experiment ID: 20000184 Result: Down-regulated in Transcription
  misc_feature: MA Experiment 20000184 PARAMETER Experiment Name: At_Shoots__P Parameter: Age (day) Value: 7
  misc_feature: MA Experiment 20000184 PARAMETER Experiment Name: At_Shoots__P Parameter: Tissue Value: Shoots vs. Whole Plant
  misc_feature: MA Experiment ID: 20000185 Result: Down-regulated in Transcription
  misc_feature: MA Experiment 20000185 PARAMETER Experiment Name: At_Roots__P Parameter: Age (day) Value: 7 vs. 21
  misc_feature: MA Experiment 20000185 PARAMETER Experiment Name: At_Roots__P Parameter: Organism Value: A. thaliana
  misc_feature: MA Experiment 20000185 PARAMETER Experiment Name: At_Roots__P Parameter: Tissue Value: Roots vs. Whole Plant
  misc_feature: MA Experiment ID: 20000234 Result: Down-regulated in Transcription
  misc_feature: MA Experiment 20000234 PARAMETER Experiment Name: At_Siliques_P Parameter: Age (day) Value: 21
  misc_feature: MA Experiment 20000234 PARAMETER Experiment Name: At_Siliques_P Parameter: Organism Value: A. thaliana
  misc_feature: MA Experiment 20000234 PARAMETER Experiment Name: At_Siliques_P Parameter: Plant Line Value: WS
  misc_feature: MA Experiment 20000234 PARAMETER Experiment Name: At_Siliques_P Parameter: Tissue Value: Less Than 5mm Siliques vs. Whole Plant
  misc_feature: MA Experiment ID: 20000235 Result: Down-regulated in Transcription
  misc_feature: MA Experiment 20000235 PARAMETER Experiment Name: At_Siliques_P Parameter: Age (day) Value: 21
  misc_feature: MA Experiment 20000235 PARAMETER Experiment Name: At_Siliques_P Parameter: Organism Value: A. thaliana
  misc_feature: MA Experiment 20000235 PARAMETER Experiment Name: At_Siliques_P Parameter: Plant Line Value: WS
  misc_feature: MA Experiment 20000235 PARAMETER Experiment Name: At_Siliques_P Parameter: Tissue Value: 5-10mm Siliques vs. Whole Plant
  misc_feature: MA Experiment ID: 20000264 Result: Up-regulated in Transcription
  misc_feature: MA Experiment 20000264 PARAMETER Experiment Name: At_Open_Flower_P Parameter: Age (day) Value: 21
  misc_feature: MA Experiment 20000264 PARAMETER Experiment Name: At_Open_Flower_P Parameter: Plant Line Value: WS
  misc_feature: MA Experiment 20000264 PARAMETER Experiment Name: At_Open_Flower_P Parameter: Tissue Value: Open Flower vs. Whole Plant
  misc_feature: MA Experiment ID: 20000265 Result: Down-regulated in Transcription
  misc_feature: MA Experiment 20000265 PARAMETER Experiment Name: At_Open_Flower_P Parameter: Age (day) Value: 21
  misc_feature: MA Experiment 20000265 PARAMETER Experiment Name: At_Open_Flower_P Parameter: Plant Line Value: WS
  misc_feature: MA Experiment 20000265 PARAMETER Experiment Name: At_Open_Flower_P Parameter: Tissue Value: Closed Flower vs. Whole Plant
  misc_feature: MA Experiment ID: 20000268 Result: Down-regulated in Transcription
  misc_feature: MA Experiment 20000268 PARAMETER Experiment Name: At_100mM_NaCl__P Parameter: Age (day) Value: 14
  misc_feature: MA Experiment 20000268 PARAMETER Experiment Name: At_100mM_NaCl__P Parameter: Organism Value: A. thaliana
  misc_feature: MA Experiment 20000268 PARAMETER Experiment Name: At_100mM_NaCl__P Parameter: Plant Line Value: WS
  misc_feature: MA Experiment 20000268 PARAMETER Experiment Name: At_100mM_NaCl__P Parameter: Timepoint (hr) Value: 6
  misc_feature: MA Experiment 20000268 PARAMETER Experiment Name: At_100mM_NaCl__P Parameter: Tissue Value: Whole Plant
  misc_feature: MA Experiment 20000268 PARAMETER Experiment Name: At_100mM_NaCl__P Parameter: Treatment Value: 100mM NaCl vs. No Treatment
  misc_feature: MA Experiment ID: 20000286 Result: Down-regulated in Transcription
  misc_feature: MA Experiment 20000286 PARAMETER Experiment Name: At_Open_Flower_P Parameter: Age (day) Value: 21
  misc_feature: MA Experiment 20000286 PARAMETER Experiment Name: At_Open_Flower_P Parameter: Plant Line Value: WS
  misc_feature: MA Experiment 20000286 PARAMETER Experiment Name: At_Open_Flower_P Parameter: Tissue Value: Half Open vs. Whole Plant
  misc_feature: MA Experiment ID: 20000436 Result: Down-regulated in Transcription
  misc_feature: MA Experiment 20000436 PARAMETER Experiment Name: At_Drought_P Parameter: Age (day) Value: 7
  misc_feature: MA Experiment 20000436 PARAMETER Experiment Name: At_Drought_P Parameter: Organism Value: A. thaliana
  misc_feature: MA Experiment 20000436 PARAMETER Experiment Name: At_Drought_P Parameter: Plant Line Value: WS
  misc_feature: MA Experiment 20000436 PARAMETER Experiment Name: At_Drought_P Parameter: Timepoint (hr) Value: 12
  misc_feature: MA Experiment 20000436 PARAMETER Experiment Name: At_Drought_P Parameter: Tissue Value: Whole Plant
  misc_feature: MA Experiment 20000436 PARAMETER Experiment Name: At_Drought_P Parameter: Treatment Value: Drought vs. No Drought
  misc_feature: MA Experiment ID: 20000437 Result: Down-regulated in Transcription
  misc_feature: MA Experiment 20000437 PARAMETER Experiment Name: At_Drought_P Parameter: Age (day) Value: 8
  misc_feature: MA Experiment 20000437 PARAMETER Experiment Name: At_Drought_P Parameter: Organism Value: A. thaliana
  misc_feature: MA Experiment 20000437 PARAMETER Experiment Name: At_Drought_P Parameter: Plant Line Value: WS
  misc_feature: MA Experiment 20000437 PARAMETER Experiment Name: At_Drought_P Parameter: Timepoint (hr) Value: 24
  misc_feature: MA Experiment 20000437 PARAMETER Experiment Name: At_Drought_P Parameter: Tissue Value: Whole Plant
  misc_feature: MA Experiment 20000437 PARAMETER Experiment Name: At_Drought_P Parameter: Treatment Value: Drought vs. No Drought
  misc_feature: MA Experiment ID: 20000438 Result: Down-regulated in Transcription
  misc_feature: MA Experiment 20000438 PARAMETER Experiment Name: At_Shoots__P Parameter: Age (day) Value: 14
  misc_feature: MA Experiment 20000438 PARAMETER Experiment Name: At_Shoots__P Parameter: Tissue Value: Shoots vs. Whole Plant
  misc_feature: MA Experiment ID: 20000441 Result: Up-regulated in Transcription
  misc_feature: MA Experiment 20000441 PARAMETER Experiment Name: At_1uM_BR-BRZ__P Parameter: Tissue Value: Shoot Apices
  misc_feature: MA Experiment 20000441 PARAMETER Experiment Name: At_1uM_BR-BRZ__P Parameter: Treatment Value: 1uM BR vs. No Treatment
  misc_feature: MA Experiment ID: 20000443 Result: Up-regulated in Transcription
  misc_feature: MA Experiment 20000443 PARAMETER Experiment Name: At_1uM_BR-BRZ__P Parameter: Tissue Value: Shoot Apices
  misc_feature: MA Experiment 20000443 PARAMETER Experiment Name: At_1uM_BR-BRZ__P Parameter: Treatment Value: 1uM BRZ vs. No Treatment
  misc_feature: MA Experiment ID: 20000453 Result: Up-regulated in Transcription
  misc_feature: MA Experiment 20000453 PARAMETER Experiment Name: At_100uM_ABA_P Parameter: Age (day) Value: 15
  misc_feature: MA Experiment 20000453 PARAMETER Experiment Name: At_100uM_ABA_P Parameter: Organism Value: A. thaliana
  misc_feature: MA Experiment 20000453 PARAMETER Experiment Name: At_100uM_ABA_P Parameter: Plant Line Value: WS
  misc_feature: MA Experiment 20000453 PARAMETER Experiment Name: At_100uM_ABA_P Parameter: Timepoint (hr) Value: 24
  misc_feature: MA Experiment 20000453 PARAMETER Experiment Name: At_100uM_ABA_P Parameter: Tissue Value: Aerial
  misc_feature: MA Experiment 20000453 PARAMETER Experiment Name: At_100uM_ABA_P Parameter: Treatment Value: 100uM ABA vs. No Treatment
  misc_feature: MA Experiment ID: 20000495 Result: Down-regulated in Transcription
  misc_feature: MA Experiment 20000495 PARAMETER Experiment Name: At_Guard_Cells_P Parameter: Harvest Date Value: 8/2/2002
  misc_feature: MA Experiment 20000495 PARAMETER Experiment Name: At_Guard_Cells_P Parameter: Organism Value: A. thaliana
  misc_feature: MA Experiment 20000495 PARAMETER Experiment Name: At_Guard_Cells_P Parameter: Tissue Value: Guard Cells vs. Leaves
  misc_feature: MA Experiment ID: 20000573 Result: Up-regulated in Transcription
  misc_feature: MA Experiment 20000573 PARAMETER Experiment Name: At_100uM_ABA_Mutants__P Parameter: Organism Value: A. thaliana
  misc_feature: MA Experiment 20000573 PARAMETER Experiment Name: At_100uM_ABA_Mutants__P Parameter: Plant Line Value: CS22 vs. Ler wt
  misc_feature: MA Experiment 20000573 PARAMETER Experiment Name: At_100uM_ABA_Mutants__P Parameter: Timepoint (hr) Value: N/A
  misc_feature: MA Experiment 20000573 PARAMETER Experiment Name: At_100uM_ABA_Mutants__P Parameter: Tissue Value: Whole Plant
  misc_feature: MA Experiment 20000573 PARAMETER Experiment Name: At_100uM_ABA_Mutants__P Parameter: Treatment Value: None
  misc_feature: MA Experiment ID: 20000574 Result: Up-regulated in Transcription
  misc_feature: MA Experiment 20000574 PARAMETER Experiment Name: At_100uM_ABA_Mutants__P Parameter: Organism Value: A. thaliana
  misc_feature: MA Experiment 20000574 PARAMETER Experiment Name: At_100uM_ABA_Mutants__P Parameter: Plant Line Value: CS23 vs. Ler wt
  misc_feature: MA Experiment 20000574 PARAMETER Experiment Name: At_100uM_ABA_Mutants__P Parameter: Timepoint (hr) Value: N/A
  misc_feature: MA Experiment 20000574 PARAMETER Experiment Name: At_100uM_ABA_Mutants__P Parameter: Tissue Value: Whole Plant
  misc_feature: MA Experiment 20000574 PARAMETER Experiment Name: At_100uM_ABA_Mutants__P Parameter: Treatment Value: None
  misc_feature: MA Experiment ID: 20000794 Result: Up-regulated in Transcription
  misc_feature: MA Experiment 20000794 PARAMETER Experiment Name: At_Petals_P Parameter: Age (day) Value: 23-25 days
  misc_feature: MA Experiment 20000794 PARAMETER Experiment Name: At_Petals_P Parameter: Plant Line Value: WS
  misc_feature: MA Experiment 20000794 PARAMETER Experiment Name: At_Petals_P Parameter: Tissue Value: Petals vs. Whole plant
  misc_feature: MA Experiment ID: 20001248 Result: Up-regulated in Transcription
  misc_feature: MA Experiment 20001248 PARAMETER Experiment Name: At_Far-red-induction_P Parameter: Age (day) Value: 7
  misc_feature: MA Experiment 20001248 PARAMETER Experiment Name: At_Far-red-induction_P Parameter: Light Value: Far-red vs. White
  misc_feature: MA Experiment 20001248 PARAMETER Experiment Name: At_Far-red-induction_P Parameter: Organism Value: A. thaliana
  misc_feature: MA Experiment 20001248 PARAMETER Experiment Name: At_Far-red-induction_P Parameter: Plant Line Value: Columbia
  misc_feature: MA Experiment 20001248 PARAMETER Experiment Name: At_Far-red-induction_P Parameter: Timepoint (hr) Value: 4
  misc_feature: MA Experiment 20001248 PARAMETER Experiment Name: At_Far-red-induction_P Parameter: Tissue Value: Whole Plant
  misc_feature: MA Experiment ID: 20001450 Result: Up-regulated in Transcription
  misc_feature: MA Experiment 20001450 PARAMETER Experiment Name: At_Far-red-induction_P Parameter: Age (day) Value: 7
  misc_feature: MA Experiment 20001450 PARAMETER Experiment Name: At_Far-red-induction_P Parameter: Light Value: Far-red vs. White
  misc_feature: MA Experiment 20001450 PARAMETER Experiment Name: At_Far-red-induction_P Parameter: Organism Value: A. thaliana
  misc_feature: MA Experiment 20001450 PARAMETER Experiment Name: At_Far-red-induction_P Parameter: Plant Line Value: Columbia
  misc_feature: MA Experiment 20001450 PARAMETER Experiment Name: At_Far-red-induction_P Parameter: Timepoint (hr) Value: 8
  misc_feature: MA Experiment 20001450 PARAMETER Experiment Name: At_Far-red-induction_P Parameter: Tissue Value: Whole Plant
  misc_feature: MA Experiment ID: 20001451 Result: Up-regulated in Transcription
  misc_feature: MA Experiment 20001451 PARAMETER Experiment Name: At_Far-red-induction_P Parameter: Age (day) Value: 7
  misc_feature: MA Experiment 20001451 PARAMETER Experiment Name: At_Far-red-induction_P Parameter: Light Value: Far-red vs. White
  misc_feature: MA Experiment 20001451 PARAMETER Experiment Name: At_Far-red-induction_P Parameter: Organism Value: A. thaliana
  misc_feature: MA Experiment 20001451 PARAMETER Experiment Name: At_Far-red-induction_P Parameter: Plant Line Value: Columbia
  misc_feature: MA Experiment 20001451 PARAMETER Experiment Name: At_Far-red-induction_P Parameter: Timepoint (hr) Value: 24
  misc_feature: MA Experiment 20001451 PARAMETER Experiment Name: At_Far-red-induction_P Parameter: Tissue Value: Whole Plant
  misc_feature: MA Experiment ID: 20001554 Result: Down-regulated in Transcription
  misc_feature: MA Experiment 20001554 PARAMETER Experiment Name: At_Drought_Soil_Dry_P Parameter: Age (day) Value: 21
  misc_feature: MA Experiment 20001554 PARAMETER Experiment Name: At_Drought_Soil_Dry_P Parameter: Organism Value: A. thaliana
  misc_feature: MA Experiment 20001554 PARAMETER Experiment Name: At_Drought_Soil_Dry_P Parameter: Plant Line Value: WS
  misc_feature: MA Experiment 20001554 PARAMETER Experiment Name: At_Drought_Soil_Dry_P Parameter: Post Timepoint (hr) Value: None
  misc_feature: MA Experiment 20001554 PARAMETER Experiment Name: At_Drought_Soil_Dry_P Parameter: Post-Treatment Value: None
  misc_feature: MA Experiment 20001554 PARAMETER Experiment Name: At_Drought_Soil_Dry_P Parameter: Timepoint (day) Value: 7
  misc_feature: MA Experiment 20001554 PARAMETER Experiment Name: At_Drought_Soil_Dry_P Parameter: Treatment Value: Drought vs. No Drought
  misc_feature: MA Experiment ID: 20001555 Result: Down-regulated in Transcription
  misc_feature: MA Experiment 20001555 PARAMETER Experiment Name: At_Drought_Soil_Dry_P Parameter: Age (day) Value: 24
  misc_feature: MA Experiment 20001555 PARAMETER Experiment Name: At_Drought_Soil_Dry_P Parameter: Organism Value: A. thaliana
  misc_feature: MA Experiment 20001555 PARAMETER Experiment Name: At_Drought_Soil_Dry_P Parameter: Plant Line Value: WS
  misc_feature: MA Experiment 20001555 PARAMETER Experiment Name: At_Drought_Soil_Dry_P Parameter: Post Timepoint (hr) Value: None
  misc_feature: MA Experiment 20001555 PARAMETER Experiment Name: At_Drought_Soil_Dry_P Parameter: Post-Treatment Value: None
  misc_feature: MA Experiment 20001555 PARAMETER Experiment Name: At_Drought_Soil_Dry_P Parameter: Timepoint (day) Value: 10
  misc_feature: MA Experiment 20001555 PARAMETER Experiment Name: At_Drought_Soil_Dry_P Parameter: Treatment Value: Drought vs. No Drought
  misc_feature: MA Experiment ID: 20001556 Result: Down-regulated in Transcription
  misc_feature: MA Experiment 20001556 PARAMETER Experiment Name: At_Drought_Soil_Dry_P Parameter: Age (day) Value: 26
  misc_feature: MA Experiment 20001556 PARAMETER Experiment Name: At_Drought_Soil_Dry_P Parameter: Organism Value: A. thaliana
  misc_feature: MA Experiment 20001556 PARAMETER Experiment Name: At_Drought_Soil_Dry_P Parameter: Plant Line Value: WS
  misc_feature: MA Experiment 20001556 PARAMETER Experiment Name: At_Drought_Soil_Dry_P Parameter: Post Timepoint (hr) Value: None
  misc_feature: MA Experiment 20001556 PARAMETER Experiment Name: At_Drought_Soil_Dry_P Parameter: Post-Treatment Value: None
  misc_feature: MA Experiment 20001556 PARAMETER Experiment Name: At_Drought_Soil_Dry_P Parameter: Timepoint (day) Value: 12
  misc_feature: MA Experiment 20001556 PARAMETER Experiment Name: At_Drought_Soil_Dry_P Parameter: Treatment Value: Drought vs. No Drought
  misc_feature: MA Experiment ID: 20001557 Result: Down-regulated in Transcription
  misc_feature: MA Experiment 20001557 PARAMETER Experiment Name: At_Drought_Soil_Dry_P Parameter: Age (day) Value: 27
  misc_feature: MA Experiment 20001557 PARAMETER Experiment Name: At_Drought_Soil_Dry_P Parameter: Organism Value: A. thaliana
  misc_feature: MA Experiment 20001557 PARAMETER Experiment Name: At_Drought_Soil_Dry_P Parameter: Plant Line Value: WS
  misc_feature: MA Experiment 20001557 PARAMETER Experiment Name: At_Drought_Soil_Dry_P Parameter: Post Timepoint (hr) Value: 3
  misc_feature: MA Experiment 20001557 PARAMETER Experiment Name: At_Drought_Soil_Dry_P Parameter: Post-Treatment Value: Re-Water vs. No Drought
  misc_feature: MA Experiment 20001557 PARAMETER Experiment Name: At_Drought_Soil_Dry_P Parameter: Timepoint (day) Value: 13
  misc_feature: MA Experiment 20001557 PARAMETER Experiment Name: At_Drought_Soil_Dry_P Parameter: Treatment Value: Drought vs. No Drought
  misc_feature: MA Experiment ID: 20001559 Result: Down-regulated in Transcription
  misc_feature: MA Experiment 20001559 PARAMETER Experiment Name: At_Drought_Soil_Dry_P Parameter: Age (day) Value: 28
  misc_feature: MA Experiment 20001559 PARAMETER Experiment Name: At_Drought_Soil_Dry_P Parameter: Organism Value: A. thaliana
  misc_feature: MA Experiment 20001559 PARAMETER Experiment Name: At_Drought_Soil_Dry_P Parameter: Plant Line Value: WS
  misc_feature: MA Experiment 20001559 PARAMETER Experiment Name: At_Drought_Soil_Dry_P Parameter: Post Timepoint (hr) Value: 29
  misc_feature: MA Experiment 20001559 PARAMETER Experiment Name: At_Drought_Soil_Dry_P Parameter: Post-Treatment Value: Re-Water vs. No Drought
  misc_feature: MA Experiment 20001559 PARAMETER Experiment Name: At_Drought_Soil_Dry_P Parameter: Timepoint (day) Value: 14
  misc_feature: MA Experiment 20001559 PARAMETER Experiment Name: At_Drought_Soil_Dry_P Parameter: Treatment Value: Drought vs. No Drought
  misc_feature: MA Experiment ID: 20001904 Result: Down-regulated in Transcription
  misc_feature: MA Experiment 20001904 PARAMETER Experiment Name: At_Drought_Reproduction_P Parameter: Age (day) Value: 37
  misc_feature: MA Experiment 20001904 PARAMETER Experiment Name: At_Drought_Reproduction_P Parameter: Organism Value: A. thaliana
  misc_feature: MA Experiment 20001904 PARAMETER Experiment Name: At_Drought_Reproduction_P Parameter: Plant Line Value: WS
  misc_feature: MA Experiment 20001904 PARAMETER Experiment Name: At_Drought_Reproduction_P Parameter: Timepoint (day) Value: 7
  misc_feature: MA Experiment 20001904 PARAMETER Experiment Name: At_Drought_Reproduction_P Parameter: Tissue Value: Rosettes
  misc_feature: MA Experiment 20001904 PARAMETER Experiment Name: At_Drought_Reproduction_P Parameter: Treatment Value: Drought vs. No Drought
  misc_feature: MA Experiment ID: 20001905 Result: Down-regulated in Transcription
  misc_feature: MA Experiment 20001905 PARAMETER Experiment Name: At_Drought_Reproduction_P Parameter: Age (day) Value: 40
  misc_feature: MA Experiment 20001905 PARAMETER Experiment Name: At_Drought_Reproduction_P Parameter: Organism Value: A. thaliana
  misc_feature: MA Experiment 20001905 PARAMETER Experiment Name: At_Drought_Reproduction_P Parameter: Plant Line Value: WS
  misc_feature: MA Experiment 20001905 PARAMETER Experiment Name: At_Drought_Reproduction_P Parameter: Timepoint (day) Value: 10
  misc_feature: MA Experiment 20001905 PARAMETER Experiment Name: At_Drought_Reproduction_P Parameter: Tissue Value: Rosettes
  misc_feature: MA Experiment 20001905 PARAMETER Experiment Name: At_Drought_Reproduction_P Parameter: Treatment Value: Drought vs. No Drought
  misc_feature: MA Experiment ID: 20001906 Result: Down-regulated in Transcription
  misc_feature: MA Experiment 20001906 PARAMETER Experiment Name: At_Drought_Reproduction_P Parameter: Age (day) Value: 35
  misc_feature: MA Experiment 20001906 PARAMETER Experiment Name: At_Drought_Reproduction_P Parameter: Organism Value: A. thaliana
  misc_feature: MA Experiment 20001906 PARAMETER Experiment Name: At_Drought_Reproduction_P Parameter: Plant Line Value: WS
  misc_feature: MA Experiment 20001906 PARAMETER Experiment Name: At_Drought_Reproduction_P Parameter: Timepoint (day) Value: 5
  misc_feature: MA Experiment 20001906 PARAMETER Experiment Name: At_Drought_Reproduction_P Parameter: Tissue Value: Siliques
  misc_feature: MA Experiment 20001906 PARAMETER Experiment Name: At_Drought_Reproduction_P Parameter: Treatment Value: Drought vs. No Drought
  misc_feature: MA Experiment ID: 20001907 Result: Down-regulated in Transcription
  misc_feature: MA Experiment 20001907 PARAMETER Experiment Name: At_Drought_Reproduction_P Parameter: Age (day) Value: 37
  misc_feature: MA Experiment 20001907 PARAMETER Experiment Name: At_Drought_Reproduction_P Parameter: Organism Value: A. thaliana
  misc_feature: MA Experiment 20001907 PARAMETER Experiment Name: At_Drought_Reproduction_P Parameter: Plant Line Value: WS
  misc_feature: MA Experiment 20001907 PARAMETER Experiment Name: At_Drought_Reproduction_P Parameter: Timepoint (day) Value: 7
  misc_feature: MA Experiment 20001907 PARAMETER Experiment Name: At_Drought_Reproduction_P Parameter: Tissue Value: Siliques
  misc_feature: MA Experiment 20001907 PARAMETER Experiment Name: At_Drought_Reproduction_P Parameter: Treatment Value: Drought vs. No Drought
  misc_feature: MA Experiment ID: 20001908 Result: Down-regulated in Transcription
  misc_feature: MA Experiment 20001908 PARAMETER Experiment Name: At_Drought_Reproduction_P Parameter: Age (day) Value: 40
  misc_feature: MA Experiment 20001908 PARAMETER Experiment Name: At_Drought_Reproduction_P Parameter: Organism Value: A. thaliana
  misc_feature: MA Experiment 20001908 PARAMETER Experiment Name: At_Drought_Reproduction_P Parameter: Plant Line Value: WS
  misc_feature: MA Experiment 20001908 PARAMETER Experiment Name: At_Drought_Reproduction_P Parameter: Timepoint (day) Value: 10
  misc_feature: MA Experiment 20001908 PARAMETER Experiment Name: At_Drought_Reproduction_P Parameter: Tissue Value: Siliques
  misc_feature: MA Experiment 20001908 PARAMETER Experiment Name: At_Drought_Reproduction_P Parameter: Treatment Value: Drought vs. No Drought
  misc_feature: MA Experiment ID: 20001910 Result: Down-regulated in Transcription
  misc_feature: MA Experiment 20001910 PARAMETER Experiment Name: At_Drought_Reproduction_P Parameter: Age (day) Value: 37
  misc_feature: MA Experiment 20001910 PARAMETER Experiment Name: At_Drought_Reproduction_P Parameter: Organism Value: A. thaliana
  misc_feature: MA Experiment 20001910 PARAMETER Experiment Name: At_Drought_Reproduction_P Parameter: Plant Line Value: WS
  misc_feature: MA Experiment 20001910 PARAMETER Experiment Name: At_Drought_Reproduction_P Parameter: Timepoint (day) Value: 7
  misc_feature: MA Experiment 20001910 PARAMETER Experiment Name: At_Drought_Reproduction_P Parameter: Tissue Value: Flowers
  misc_feature: MA Experiment 20001910 PARAMETER Experiment Name: At_Drought_Reproduction_P Parameter: Treatment Value: Drought vs. No Drought
  misc_feature: MA Experiment ID: 20001911 Result: Down-regulated in Transcription
  misc_feature: MA Experiment 20001911 PARAMETER Experiment Name: At_Drought_Reproduction_P Parameter: Age (day) Value: 40
  misc_feature: MA Experiment 20001911 PARAMETER Experiment Name: At_Drought_Reproduction_P Parameter: Organism Value: A. thaliana
  misc_feature: MA Experiment 20001911 PARAMETER Experiment Name: At_Drought_Reproduction_P Parameter: Plant Line Value: WS
  misc_feature: MA Experiment 20001911 PARAMETER Experiment Name: At_Drought_Reproduction_P Parameter: Timepoint (day) Value: 10
  misc_feature: MA Experiment 20001911 PARAMETER Experiment Name: At_Drought_Reproduction_P Parameter: Tissue Value: Flowers
  misc_feature: MA Experiment 20001911 PARAMETER Experiment Name: At_Drought_Reproduction_P Parameter: Treatment Value: Drought vs. No Drought

SEQ ID NO: 34379 - protein, 299 aa, Arabidopsis thaliana; identical to SEQ ID NO: 30789
  peptide (1)..(299): Ceres Seq. ID no. 13491549
  misc_feature (54)..(235): Pfam Name: Glycosyl hydrolases family 16 Pfam Description: Glycosyl hydrolases family 16
  misc_feature (255)..(295): Homolog of NCBI NO: 29500893 NR Description: putative xyloglucan endotransglycosylase [Cucumis
  misc_feature (32)..(244): Homolog of NCBI NO: 29500893 NR Description: putative xyloglucan endotransglycosylase [Cucumis
  misc_feature (39)..(295): Homolog of NCBI NO: 29500891 NR Description: putative xyloglucan endotransglycosylase [Cucumis
  misc_feature (233)..(295): Homolog of NCBI NO: 15242781 NR Description: xyloglucan endotransglycosylase (TCH4)
  misc_feature (39)..(254): Homolog of NCBI NO: 15242781 NR Description: xyloglucan endotransglycosylase (TCH4)
  misc_feature (31)..(299): Homolog of NCBI NO: 21553999 NR Description: xyloglucan endo-1,4-beta-D-glucanase precursor
  misc_feature (31)..(299): Homolog of NCBI NO: 15234678 NR Description: xyloglucan endotransglycosylase (meri5B)

SEQ ID NO: 34380 - protein, 269 aa, Arabidopsis thaliana; identical to SEQ ID NO: 21034
  peptide (1)..(269): Ceres Seq. ID no. 13491550
  misc_feature (24)..(205): Pfam Name: Glycosyl hydrolases family 16 Pfam Description: Glycosyl hydrolases family 16
  misc_feature (225)..(265): Homolog of NCBI NO: 29500893 NR Description: putative xyloglucan endotransglycosylase [Cucumis
  misc_feature (2)..(214): Homolog of NCBI NO: 29500893 NR Description: putative xyloglucan endotransglycosylase [Cucumis
  misc_feature (9)..(265): Homolog of NCBI NO: 29500891 NR Description: putative xyloglucan endotransglycosylase [Cucumis
  misc_feature (203)..(265): Homolog of NCBI NO: 15242781 NR Description: xyloglucan endotransglycosylase (TCH4)
  misc_feature (9)..(224): Homolog of NCBI NO: 15242781 NR Description: xyloglucan endotransglycosylase (TCH4)
  misc_feature (1)..(269): Homolog of NCBI NO: 21553999 NR Description: xyloglucan endo-1,4-beta-D-glucanase precursor
  misc_feature (1)..(269): Homolog of NCBI NO: 15234678 NR Description: xyloglucan endotransglycosylase (meri5B)

SEQ ID NO: 34381 - protein, 199 aa, Arabidopsis thaliana; identical to SEQ ID NO: 21035
  peptide (1)..(199): Ceres Seq. ID no. 13491551
  misc_feature (1)..(135): Pfam Name: Glycosyl hydrolases family 16 Pfam Description: Glycosyl hydrolases family 16
  misc_feature (155)..(195): Homolog of NCBI NO: 29500893 NR Description: putative xyloglucan endotransglycosylase [Cucumis
  misc_feature (1)..(144): Homolog of NCBI NO: 29500893 NR Description: putative xyloglucan endotransglycosylase [Cucumis
  misc_feature (1)..(195): Homolog of NCBI NO: 29500891 NR Description: putative xyloglucan endotransglycosylase [Cucumis
  misc_feature (133)..(195): Homolog of NCBI NO: 15242781 NR Description: xyloglucan endotransglycosylase (TCH4)
  misc_feature (1)..(154): Homolog of NCBI NO: 15242781 NR Description: xyloglucan endotransglycosylase (TCH4)
  misc_feature (1)..(199): Homolog of NCBI NO: 21553999 NR Description: xyloglucan endo-1,4-beta-D-glucanase precursor
  misc_feature (1)..(199): Homolog of NCBI NO: 15234678 NR Description: xyloglucan endotransglycosylase (meri5B)

SEQ ID NO: 34382 - DNA, 1458 bp, Arabidopsis thaliana; identical to SEQ ID NO: 30792
  misc_feature (1)..(1458): Ceres Seq. ID no. 13487675
  misc_feature: MA Experiment ID: 108462 Result: Up-regulated in Transcription
  misc_feature: MA Experiment 108462 PARAMETER Experiment Name: At_Germinating_Seeds_cDNA_P Parameter: Age (day) Value: 2 vs. 0
  misc_feature: MA Experiment 108462 PARAMETER Experiment Name: At_Germinating_Seeds_cDNA_P Parameter: Tissue Value: Germinating Seeds
  misc_feature: MA Experiment ID: 108463 Result: Up-regulated in Transcription
  misc_feature: MA Experiment 108463 PARAMETER Experiment Name: At_Germinating_Seeds_cDNA_P Parameter: Age (day) Value: 3 vs. 0
  misc_feature: MA Experiment 108463 PARAMETER Experiment Name: At_Germinating_Seeds_cDNA_P Parameter: Tissue Value: Germinating Seeds
  misc_feature: MA Experiment ID: 108464 Result: Up-regulated in Transcription
  misc_feature: MA Experiment 108464 PARAMETER Experiment Name: At_Germinating_Seeds_cDNA_P Parameter: Age (day) Value: 4 vs. 0
  misc_feature: MA Experiment 108464 PARAMETER Experiment Name: At_Germinating_Seeds_cDNA_P Parameter: Tissue Value: Germinating Seeds
  misc_feature: MA Experiment ID: 108577 Result: Down-regulated in Transcription
  misc_feature: MA Experiment 108577 PARAMETER Experiment Name: At_42deg_Heat_cDNA_P Parameter: Temperature (deg C) Value: 42 vs. 22
  misc_feature: MA Experiment 108577 PARAMETER Experiment Name: At_42deg_Heat_cDNA_P Parameter: Timepoint (hr) Value: 6
  misc_feature: MA Experiment 108577 PARAMETER Experiment Name: At_42deg_Heat_cDNA_P Parameter: Tissue Value: Aerial
  misc_feature: MA Experiment ID: 108595 Result: Up-regulated in Transcription
  misc_feature: MA Experiment 108595 PARAMETER Experiment Name: At_Ler-pi_Ovule_cDNA_P Parameter: Plant Line Value: null
  misc_feature: MA Experiment ID: 108667 Result: Up-regulated in Transcription
  misc_feature: MA Experiment 108667 PARAMETER Experiment Name: At_2mM_SA_cDNA_P Parameter: Plant Line Value: WS
  misc_feature: MA Experiment 108667 PARAMETER Experiment Name: At_2mM_SA_cDNA_P Parameter: Timepoint (hr) Value: 1
  misc_feature: MA Experiment 108667 PARAMETER Experiment Name: At_2mM_SA_cDNA_P Parameter: Treatment Value: 2mM SA vs. No Treatment
  misc_feature: MA Experiment ID: 108668 Result: Up-regulated in Transcription
  misc_feature: MA Experiment 108668 PARAMETER Experiment Name: At_2mM_SA_cDNA_P Parameter: Plant Line Value: WS
  misc_feature: MA Experiment 108668 PARAMETER Experiment Name: At_2mM_SA_cDNA_P Parameter: Timepoint (hr) Value: 6
  misc_feature: MA Experiment 108668 PARAMETER Experiment Name: At_2mM_SA_cDNA_P Parameter: Treatment Value: 2mM SA vs. No Treatment
  misc_feature: MA Experiment ID: 20000224 Result: Down-regulated in Transcription
  misc_feature: MA Experiment ID: 20000227 Result: Down-regulated in Transcription
  misc_feature: MA Experiment 20000227 PARAMETER Experiment Name: At_Root-Tips-vs-Tops_P Parameter: Tissue Value: Root Tips vs. Root Tops
  misc_feature: MA Experiment ID: 20000234 Result: Down-regulated in Transcription
  misc_feature: MA Experiment 20000234 PARAMETER Experiment Name: At_Siliques_P Parameter: Age (day) Value: 21
  misc_feature: MA Experiment 20000234 PARAMETER Experiment Name: At_Siliques_P Parameter: Organism Value: A. thaliana
  misc_feature: MA Experiment 20000234 PARAMETER Experiment Name: At_Siliques_P Parameter: Plant Line Value: WS
  misc_feature: MA Experiment 20000234 PARAMETER Experiment Name: At_Siliques_P Parameter: Tissue Value: Less Than 5mm Siliques vs. Whole Plant
  misc_feature: MA Experiment ID: 20000235 Result: Down-regulated in Transcription
  misc_feature: MA Experiment 20000235 PARAMETER Experiment Name: At_Siliques_P Parameter: Age (day) Value: 21
  misc_feature: MA Experiment 20000235 PARAMETER Experiment Name: At_Siliques_P Parameter: Organism Value: A. thaliana
  misc_feature: MA Experiment 20000235 PARAMETER Experiment Name: At_Siliques_P Parameter: Plant Line Value: WS
  misc_feature: MA Experiment 20000235 PARAMETER Experiment Name: At_Siliques_P Parameter: Tissue Value: 5-10mm Siliques vs. Whole Plant
  misc_feature: MA Experiment ID: 20000264 Result: Down-regulated in Transcription
  misc_feature: MA Experiment 20000264 PARAMETER Experiment Name: At_Open_Flower_P Parameter: Age (day) Value: 21
  misc_feature: MA Experiment 20000264 PARAMETER Experiment Name: At_Open_Flower_P Parameter: Plant Line Value: WS
  misc_feature: MA Experiment 20000264 PARAMETER Experiment Name: At_Open_Flower_P Parameter: Tissue Value: Open Flower vs. Whole Plant
  misc_feature: MA Experiment ID: 20000265 Result: Down-regulated in Transcription
  misc_feature: MA Experiment 20000265 PARAMETER Experiment Name: At_Open_Flower_P Parameter: Age (day) Value: 21
  misc_feature: MA Experiment 20000265 PARAMETER Experiment Name: At_Open_Flower_P Parameter: Plant Line Value: WS
  misc_feature: MA Experiment 20000265 PARAMETER Experiment Name: At_Open_Flower_P Parameter: Tissue Value: Closed Flower vs. Whole Plant
  misc_feature: MA Experiment ID: 20000286 Result: Down-regulated in Transcription
  misc_feature: MA Experiment 20000286 PARAMETER Experiment Name: At_Open_Flower_P Parameter: Age (day) Value: 21
  misc_feature: MA Experiment 20000286 PARAMETER Experiment Name: At_Open_Flower_P Parameter: Plant Line Value: WS
  misc_feature: MA Experiment 20000286 PARAMETER Experiment Name: At_Open_Flower_P Parameter: Tissue Value: Half Open vs. Whole Plant
  misc_feature: MA Experiment ID: 20000438 Result: Down-regulated in Transcription
  misc_feature: MA Experiment 20000438 PARAMETER Experiment Name: At_Shoots__P Parameter: Age (day) Value: 14
  misc_feature: MA Experiment 20000438 PARAMETER Experiment Name: At_Shoots__P Parameter: Tissue Value: Shoots vs. Whole Plant
  misc_feature: MA Experiment ID: 20000460 Result: Up-regulated in Transcription
  misc_feature: MA Experiment 20000460 PARAMETER Experiment Name: At_10percent_PEG_P Parameter: Age (day) Value: 12
  misc_feature: MA Experiment 20000460 PARAMETER Experiment Name: At_10percent_PEG_P Parameter: Organism Value: A. thaliana
  misc_feature: MA Experiment 20000460 PARAMETER Experiment Name: At_10percent_PEG_P Parameter: Plant Line Value: WS
  misc_feature: MA Experiment 20000460 PARAMETER Experiment Name: At_10percent_PEG_P Parameter: Timepoint (day) Value: 12
  misc_feature: MA Experiment 20000460 PARAMETER Experiment Name: At_10percent_PEG_P Parameter: Tissue Value: Whole Plant
  misc_feature: MA Experiment 20000460 PARAMETER Experiment Name: At_10percent_PEG_P Parameter: Treatment Value: 10percent PEG vs. No Treatment
  misc_feature: MA Experiment ID: 20000527 Result: Up-regulated in Transcription
  misc_feature: MA Experiment 20000527 PARAMETER Experiment Name: At_10percent_PEG_P Parameter: Age (day) Value: 20
  misc_feature: MA Experiment 20000527 PARAMETER Experiment Name: At_10percent_PEG_P Parameter: Organism Value: A. thaliana
  misc_feature: MA Experiment 20000527 PARAMETER Experiment Name: At_10percent_PEG_P Parameter: Plant Line Value: WS
  misc_feature: MA Experiment 20000527 PARAMETER Experiment Name: At_10percent_PEG_P Parameter: Timepoint (day) Value: 20
  misc_feature: MA Experiment 20000527 PARAMETER Experiment Name: At_10percent_PEG_P Parameter: Tissue Value: Whole Plant
  misc_feature: MA Experiment 20000527 PARAMETER Experiment Name: At_10percent_PEG_P Parameter: Treatment Value: 10percent PEG vs. No Treatment
  misc_feature: MA Experiment ID: 20000794 Result: Down-regulated in Transcription
  misc_feature: MA Experiment 20000794 PARAMETER Experiment Name: At_Petals_P Parameter: Age (day) Value: 23-25 days
  misc_feature: MA Experiment 20000794 PARAMETER Experiment Name: At_Petals_P Parameter: Plant Line Value: WS
  misc_feature: MA Experiment 20000794 PARAMETER Experiment Name: At_Petals_P Parameter: Tissue Value: Petals vs. Whole plant
  misc_feature: MA Experiment ID: 20001247 Result: Up-regulated in Transcription
  misc_feature: MA Experiment 20001247 PARAMETER Experiment Name: At_Far-red-induction_P Parameter: Age (day) Value: 7
  misc_feature: MA Experiment 20001247 PARAMETER Experiment Name: At_Far-red-induction_P Parameter: Light Value: Far-red vs. White
  misc_feature: MA Experiment 20001247 PARAMETER Experiment Name: At_Far-red-induction_P Parameter: Organism Value: A. thaliana
  misc_feature: MA Experiment 20001247 PARAMETER Experiment Name: At_Far-red-induction_P Parameter: Plant Line Value: Columbia
  misc_feature: MA Experiment 20001247 PARAMETER Experiment Name: At_Far-red-induction_P Parameter: Timepoint (hr) Value: 1
  misc_feature: MA Experiment 20001247 PARAMETER Experiment Name: At_Far-red-induction_P Parameter: Tissue Value: Whole Plant
  misc_feature: MA Experiment ID: 20001905 Result: Up-regulated in Transcription
  misc_feature: MA Experiment 20001905 PARAMETER Experiment Name: At_Drought_Reproduction_P Parameter: Age (day) Value: 40
  misc_feature: MA Experiment 20001905 PARAMETER Experiment Name: At_Drought_Reproduction_P Parameter: Organism Value: A. thaliana
  misc_feature: MA Experiment 20001905 PARAMETER Experiment Name: At_Drought_Reproduction_P Parameter: Plant Line Value: WS
  misc_feature: MA Experiment 20001905 PARAMETER Experiment Name: At_Drought_Reproduction_P Parameter: Timepoint (day) Value: 10
  misc_feature: MA Experiment 20001905 PARAMETER Experiment Name: At_Drought_Reproduction_P Parameter: Tissue Value: Rosettes
  misc_feature: MA Experiment 20001905 PARAMETER Experiment Name: At_Drought_Reproduction_P Parameter: Treatment Value: Drought vs. No Drought

SEQ ID NO: 34383 - protein, 327 aa, Arabidopsis thaliana; identical to SEQ ID NO: 30793
  peptide (1)..(327): Ceres Seq. ID no. 13487676
  misc_feature (133)..(273): Pfam Name: PAP2 superfamily Pfam Description: PAP2 superfamily
  misc_feature (26)..(300): Homolog of NCBI NO: 9279656 NR Description: phosphatidic acid phosphatase-like protein
  misc_feature (26)..(315): Homolog of NCBI NO: 10673973 NR Description: phosphatidic acid phosphatase beta [Vigna
  misc_feature (26)..(312): Homolog of NCBI NO: 15218051 NR Description: phosphatidic acid phosphatase (PAP2) family
  misc_feature (26)..(300): Homolog of NCBI NO: 6957723 NR Description: putative phosphatidate phosphohydrolase
  misc_feature (18)..(300): Homolog of NCBI NO: 18396250 NR Description: phosphatidic acid phosphatase (PAP2) family
  misc_feature (1)..(289): Homolog of NCBI NO: 9621903 NR Description: phosphatidic acid phosphatase alpha [Vigna
  misc_feature (26)..(327): Homolog of NCBI NO: 25353094 NR Description: probable phosphatidic acid phosphatase
  misc_feature (1)..(327): Homolog of NCBI NO: 21554001 NR Description: putative phosphatidic acid phosphatase
  misc_feature (1)..(327): Homolog of NCBI NO: 15724220 NR Description: At2g01180/F10A8.6 [Arabidopsis thaliana]
  misc_feature (1)..(327): Homolog of NCBI NO: 18379166 NR Description: phosphatidic acid phosphatase (PAP2) family

SEQ ID NO: 34384 - protein, 302 aa, Arabidopsis thaliana; identical to SEQ ID NO: 30794
  peptide (1)..(302): Ceres Seq. ID no. 13487677
  misc_feature (108)..(248): Pfam Name: PAP2 superfamily Pfam Description: PAP2 superfamily
  misc_feature (1)..(275): Homolog of NCBI NO: 9279656 NR Description: phosphatidic acid phosphatase-like protein
  misc_feature (1)..(290): Homolog of NCBI NO: 10673973 NR Description: phosphatidic acid phosphatase beta [Vigna
  misc_feature (1)..(287): Homolog of NCBI NO: 15218051 NR Description: phosphatidic acid phosphatase (PAP2) family
  misc_feature (1)..(275): Homolog of NCBI NO: 6957723 NR Description: putative phosphatidate phosphohydrolase
  misc_feature (1)..(275): Homolog of NCBI NO: 18396250 NR Description: phosphatidic acid phosphatase (PAP2) family
  misc_feature (1)..(264): Homolog of NCBI NO: 9621903 NR Description: phosphatidic acid phosphatase alpha [Vigna
  misc_feature (1)..(302): Homolog of NCBI NO: 25353094 NR Description: probable phosphatidic acid phosphatase
  misc_feature (1)..(302): Homolog of NCBI NO: 21554001 NR Description: putative phosphatidic acid phosphatase
  misc_feature (1)..(302): Homolog of NCBI NO: 15724220 NR Description: At2g01180/F10A8.6 [Arabidopsis thaliana]
  misc_feature (1)..(302): Homolog of NCBI NO: 18379166 NR Description: phosphatidic acid phosphatase (PAP2) family

SEQ ID NO: 34385 - protein, 250 aa, Arabidopsis thaliana; identical to SEQ ID NO: 30795
  peptide (1)..(250): Ceres Seq. ID no. 13487678
  misc_feature (56)..(196): Pfam Name: PAP2 superfamily Pfam Description: PAP2 superfamily
  misc_feature (1)..(223): Homolog of NCBI NO: 9279656 NR Description: phosphatidic acid phosphatase-like protein
  misc_feature (1)..(238): Homolog of NCBI NO: 10673973 NR Description: phosphatidic acid phosphatase beta [Vigna
  misc_feature (1)..(235): Homolog of NCBI NO: 15218051 NR Description: phosphatidic acid phosphatase (PAP2) family
  misc_feature (1)..(223): Homolog of NCBI NO: 6957723 NR Description: putative phosphatidate phosphohydrolase
  misc_feature (1)..(223): Homolog of NCBI NO: 18396250 NR Description: phosphatidic acid phosphatase (PAP2) family
  misc_feature (1)..(212): Homolog of NCBI NO: 9621903 NR Description: phosphatidic acid phosphatase alpha [Vigna
  misc_feature (1)..(250): Homolog of NCBI NO: 25353094 NR Description: probable phosphatidic acid phosphatase
  misc_feature (1)..(250): Homolog of NCBI NO: 21554001 NR Description: putative phosphatidic acid phosphatase
  misc_feature (1)..(250): Homolog of NCBI NO: 15724220 NR Description: At2g01180/F10A8.6 [Arabidopsis thaliana]
  misc_feature (1)..(250): Homolog of NCBI NO: 18379166 NR Description: phosphatidic acid phosphatase (PAP2) family

SEQ ID NO: 34386 - DNA, 2496 bp, Arabidopsis thaliana; identical to SEQ ID NO: 30796
  misc_feature (1)..(2496): Ceres Seq. ID no. 12561218
  misc_feature: MA Experiment ID: 108434 Result: Down-regulated in Transcription
  misc_feature: MA Experiment 108434 PARAMETER Experiment Name: At_Root_Tips_cDNA_P Parameter: Tissue Value: Root Tips
  misc_feature: MA Experiment ID: 108585 Result: Up-regulated in Transcription
  misc_feature: MA Experiment 108585 PARAMETER Experiment Name: At_5mM_NaNP_cDNA_P Parameter: Timepoint (hr) Value: 6
  misc_feature: MA Experiment 108585 PARAMETER Experiment Name: At_5mM_NaNP_cDNA_P Parameter: Tissue Value: Aerial
  misc_feature: MA Experiment 108585 PARAMETER Experiment Name: At_5mM_NaNP_cDNA_P Parameter: Treatment Value: null
  misc_feature: MA Experiment ID: 108668 Result: Up-regulated in Transcription
  misc_feature: MA Experiment 108668 PARAMETER Experiment Name: At_2mM_SA_cDNA_P Parameter: Plant Line Value: WS
  misc_feature: MA Experiment 108668 PARAMETER Experiment Name: At_2mM_SA_cDNA_P Parameter: Timepoint (hr) Value: 6
  misc_feature: MA Experiment 108668 PARAMETER Experiment Name: At_2mM_SA_cDNA_P Parameter: Treatment Value: 2mM SA vs. No Treatment
  misc_feature: MA Experiment ID: 20000182 Result: Up-regulated in Transcription
  misc_feature: MA Experiment 20000182 PARAMETER Experiment Name: At_2mM_SA_P Parameter: Age (day) Value: 14
  misc_feature: MA Experiment 20000182 PARAMETER Experiment Name: At_2mM_SA_P Parameter: Organism Value: A. thaliana
  misc_feature: MA Experiment 20000182 PARAMETER Experiment Name: At_2mM_SA_P Parameter: Plant Line Value: WS
  misc_feature: MA Experiment 20000182 PARAMETER Experiment Name: At_2mM_SA_P Parameter: Timepoint (hr) Value: 6
  misc_feature: MA Experiment 20000182 PARAMETER Experiment Name: At_2mM_SA_P Parameter: Tissue Value: Aerial
  misc_feature: MA Experiment 20000182 PARAMETER Experiment Name: At_2mM_SA_P Parameter: Treatment Value: 2mM SA vs. No Treatment
  misc_feature: MA Experiment ID: 20000234 Result: Down-regulated in Transcription
  misc_feature: MA Experiment 20000234 PARAMETER Experiment Name: At_Siliques_P Parameter: Age (day) Value: 21
  misc_feature: MA Experiment 20000234 PARAMETER Experiment Name: At_Siliques_P Parameter: Organism Value: A. thaliana
  misc_feature: MA Experiment 20000234 PARAMETER Experiment Name: At_Siliques_P Parameter: Plant Line Value: WS
  misc_feature: MA Experiment 20000234 PARAMETER Experiment Name: At_Siliques_P Parameter: Tissue Value: Less Than 5mm Siliques vs. Whole Plant
  misc_feature: MA Experiment ID: 20000235 Result: Down-regulated in Transcription
  misc_feature: MA Experiment 20000235 PARAMETER Experiment Name: At_Siliques_P Parameter: Age (day) Value: 21
  misc_feature: MA Experiment 20000235 PARAMETER Experiment Name: At_Siliques_P Parameter: Organism Value: A. thaliana
  misc_feature: MA Experiment 20000235 PARAMETER Experiment Name: At_Siliques_P Parameter: Plant Line Value: WS
  misc_feature: MA Experiment 20000235 PARAMETER Experiment Name: At_Siliques_P Parameter: Tissue Value: 5-10mm Siliques vs. Whole Plant
  misc_feature: MA Experiment ID: 20000265 Result: Down-regulated in Transcription
  misc_feature: MA Experiment 20000265 PARAMETER Experiment Name: At_Open_Flower_P Parameter: Age (day) Value: 21
  misc_feature: MA Experiment 20000265 PARAMETER Experiment Name: At_Open_Flower_P Parameter: Plant Line Value: WS
  misc_feature: MA Experiment 20000265 PARAMETER Experiment Name: At_Open_Flower_P Parameter: Tissue Value: Closed Flower vs. Whole Plant

SEQ ID NO: 34387 - protein, 615 aa, Arabidopsis thaliana; identical to SEQ ID NO: 30797
  peptide (1)..(615): Ceres Seq. ID no. 12561219
  misc_feature (11)..(615): Homolog of NCBI NO: 13897310 NR Description: SERK2 protein [Zea mays]
  misc_feature (1)..(615): Homolog of NCBI NO: 15081616 NR Description: At1g71830/F14O23_24 [Arabidopsis thaliana]
  misc_feature (1)..(615): Homolog of NCBI NO: 15217584 NR Description: protein kinase, putative
  misc_feature (145)..(177): Homolog of NCBI NO: 7488244 NR Description: protein kinase homolog F17M5.190 - Arabidopsis
  misc_feature (9)..(615): Homolog of NCBI NO: 14573457 NR Description: somatic embryogenesis receptor-like kinase 2
  misc_feature (9)..(615): Homolog of NCBI NO: 24935324 NR Description: somatic embryogenesis receptor kinase 1 [Medicago
  misc_feature (9)..(615): Homolog of NCBI NO: 15218543 NR Description: somatic embryogenesis receptor-like kinase,
  misc_feature (1)..(615): Homolog of NCBI NO: 30678986 NR Description: leucine-rich repeat protein kinase family
  misc_feature (29)..(109): Homolog of NCBI NO: 7488244 NR Description: protein kinase homolog F17M5.190 - Arabidopsis
  misc_feature (171)..(615): Homolog of NCBI NO: 7488244 NR Description: protein kinase homolog F17M5.190 - Arabidopsis
  misc_feature (11)..(615): Homolog of NCBI NO: 13897310 NR Description: SERK2 protein [Zea mays]
  misc_feature (1)..(615): Homolog of NCBI NO: 15081616 NR Description: At1g71830/F14O23_24 [Arabidopsis thaliana]
  misc_feature (1)..(615): Homolog of NCBI NO: 15217584 NR Description: protein kinase, putative
  misc_feature (145)..(177): Homolog of NCBI NO: 7488244 NR Description: protein kinase homolog F17M5.190 - Arabidopsis
  misc_feature (9)..(615): Homolog of NCBI NO: 14573457 NR Description: somatic embryogenesis receptor-like kinase 2
  misc_feature (9)..(615): Homolog of NCBI NO: 24935324 NR Description: somatic embryogenesis receptor kinase 1 [Medicago
  misc_feature (9)..(615): Homolog of NCBI NO: 15218543 NR Description: somatic embryogenesis receptor-like kinase,
  misc_feature (1)..(615): Homolog of NCBI NO: 30678986 NR Description: leucine-rich repeat protein kinase family
  misc_feature (29)..(109): Homolog of NCBI NO: 7488244 NR Description: protein kinase homolog F17M5.190 - Arabidopsis
  misc_feature (171)..(615): Homolog of NCBI NO: 7488244 NR Description: protein kinase homolog F17M5.190 - Arabidopsis

SEQ ID NO: 34388 - protein, 610 aa, Arabidopsis thaliana; identical to SEQ ID NO: 30798
  peptide (1)..(610): Ceres Seq. ID no. 12561220
  misc_feature (6)..(610): Homolog of NCBI NO: 13897310 NR Description: SERK2 protein [Zea mays]
  misc_feature (1)..(610): Homolog of NCBI NO: 15081616 NR Description: At1g71830/F14O23_24 [Arabidopsis thaliana]
  misc_feature (1)..(610): Homolog of NCBI NO: 15217584 NR Description: protein kinase, putative
  misc_feature (140)..(172): Homolog of NCBI NO: 7488244 NR Description: protein kinase homolog F17M5.190 - Arabidopsis
  misc_feature (4)..(610): Homolog of NCBI NO: 14573457 NR Description: somatic embryogenesis receptor-like kinase 2
  misc_feature (4)..(610): Homolog of NCBI NO: 24935324 NR Description: somatic embryogenesis receptor kinase 1 [Medicago
  misc_feature (4)..(610): Homolog of NCBI NO: 15218543 NR Description: somatic embryogenesis receptor-like kinase,
  misc_feature (1)..(610): Homolog of NCBI NO: 30678986 NR Description: leucine-rich repeat protein kinase family
  misc_feature (24)..(104): Homolog of NCBI NO: 7488244 NR Description: protein kinase homolog F17M5.190 - Arabidopsis
  misc_feature (166)..(610): Homolog of NCBI NO: 7488244 NR Description: protein kinase homolog F17M5.190 - Arabidopsis
  misc_feature (6)..(610): Homolog of NCBI NO: 13897310 NR Description: SERK2 protein [Zea mays]
  misc_feature (1)..(610): Homolog of NCBI NO: 15081616 NR Description: At1g71830/F14O23_24 [Arabidopsis thaliana]
  misc_feature (1)..(610): Homolog of NCBI NO: 15217584 NR Description: protein kinase, putative
  misc_feature (140)..(172): Homolog of NCBI NO: 7488244 NR Description: protein kinase homolog F17M5.190 - Arabidopsis
  misc_feature (4)..(610): Homolog of NCBI NO: 14573457 NR Description: somatic embryogenesis receptor-like kinase 2
  misc_feature (4)..(610): Homolog of NCBI NO: 24935324 NR Description: somatic embryogenesis receptor kinase 1 [Medicago
  misc_feature (4)..(610): Homolog of NCBI NO: 15218543 NR Description: somatic embryogenesis receptor-like kinase,
  misc_feature (1)..(610): Homolog of NCBI NO: 30678986 NR Description: leucine-rich repeat protein kinase family
  misc_feature (24)..(104): Homolog of NCBI NO: 7488244 NR Description: protein kinase homolog F17M5.190 - Arabidopsis
  misc_feature (166)..(610): Homolog of NCBI NO: 7488244 NR Description: protein kinase homolog F17M5.190 - Arabidopsis

SEQ ID NO: 34389 - protein, 530 aa, Arabidopsis thaliana; identical to SEQ ID NO: 30799
  peptide (1)..(530): Ceres Seq. ID no. 12561221
  misc_feature (1)..(530): Homolog of NCBI NO: 13897310 NR Description: SERK2 protein [Zea mays]
  misc_feature (1)..(530): Homolog of NCBI NO: 15081616 NR Description: At1g71830/F14O23_24 [Arabidopsis thaliana]
  misc_feature (1)..(530): Homolog of NCBI NO: 15217584 NR Description: protein kinase, putative
  misc_feature (60)..(92): Homolog of NCBI NO: 7488244 NR Description: protein kinase homolog F17M5.190 - Arabidopsis
  misc_feature (1)..(530): Homolog of NCBI NO: 14573457 NR Description: somatic embryogenesis receptor-like kinase 2
  misc_feature (1)..(530): Homolog of NCBI NO: 24935324 NR Description: somatic embryogenesis receptor kinase 1 [Medicago
  misc_feature (1)..(530): Homolog of NCBI NO: 15218543 NR Description: somatic embryogenesis receptor-like kinase,
  misc_feature (1)..(530): Homolog of NCBI NO: 30678986 NR Description: leucine-rich repeat protein kinase family
  misc_feature (1)..(24): Homolog of NCBI NO: 7488244 NR Description: protein kinase homolog F17M5.190 - Arabidopsis
  misc_feature (86)..(530): Homolog of NCBI NO: 7488244 NR Description: protein kinase homolog F17M5.190 - Arabidopsis
  misc_feature (1)..(530): Homolog of NCBI NO: 13897310 NR Description: SERK2 protein [Zea mays]
  misc_feature (1)..(530): Homolog of NCBI NO: 15081616 NR Description: At1g71830/F14O23_24 [Arabidopsis thaliana]
  misc_feature (1)..(530): Homolog of NCBI NO: 15217584 NR Description: protein kinase, putative
  misc_feature (60)..(92): Homolog of NCBI NO: 7488244 NR Description: protein kinase homolog F17M5.190 - Arabidopsis
  misc_feature (1)..(530): Homolog of NCBI NO: 14573457 NR Description: somatic embryogenesis receptor-like kinase 2
  misc_feature (1)..(530): Homolog of NCBI NO: 24935324 NR Description: somatic embryogenesis receptor kinase 1 [Medicago
  misc_feature (1)..(530): Homolog of NCBI NO: 15218543 NR Description: somatic embryogenesis receptor-like kinase,
  misc_feature (1)..(530): Homolog of NCBI NO: 30678986 NR Description: leucine-rich repeat protein kinase family
  misc_feature (1)..(24): Homolog of NCBI NO: 7488244 NR Description: protein kinase homolog F17M5.190 - Arabidopsis
  misc_feature (86)..(530): Homolog of NCBI NO: 7488244 NR Description: protein kinase homolog F17M5.190 - Arabidopsis

SEQ ID NO: 34390 - DNA, 606 bp, Arabidopsis thaliana; identical to SEQ ID NO: 30800
  misc_feature (1)..(606): Ceres Seq. ID no. 12333083
  misc_feature: MA Experiment ID: 20000171 Result: Down-regulated in Transcription
  misc_feature: MA Experiment 20000171 PARAMETER Experiment Name: At_42deg_Heat_P Parameter: Age (day) Value: 14
  misc_feature: MA Experiment 20000171 PARAMETER Experiment Name: At_42deg_Heat_P Parameter: Organism Value: A. thaliana
  misc_feature: MA Experiment 20000171 PARAMETER Experiment Name: At_42deg_Heat_P Parameter: Plant Line Value: WS
  misc_feature: MA Experiment 20000171 PARAMETER Experiment Name: At_42deg_Heat_P Parameter: Temperature (deg C) Value: 42 vs. 22
  misc_feature: MA Experiment 20000171 PARAMETER Experiment Name: At_42deg_Heat_P Parameter: Timepoint (hr) Value: 1
  misc_feature: MA Experiment 20000171 PARAMETER Experiment Name: At_42deg_Heat_P Parameter: Tissue Value: Aerial
  misc_feature: MA Experiment ID: 20000173 Result: Down-regulated in Transcription
  misc_feature: MA Experiment 20000173 PARAMETER Experiment Name: At_42deg_Heat_P Parameter: Age (day) Value: 14
  misc_feature: MA Experiment 20000173 PARAMETER Experiment Name: At_42deg_Heat_P Parameter: Organism Value: A. thaliana
  misc_feature: MA Experiment 20000173 PARAMETER Experiment Name: At_42deg_Heat_P Parameter: Plant Line Value: WS
  misc_feature: MA Experiment 20000173 PARAMETER Experiment Name: At_42deg_Heat_P Parameter: Temperature (deg C) Value: 42 vs. 22
  misc_feature: MA Experiment 20000173 PARAMETER Experiment Name: At_42deg_Heat_P Parameter: Timepoint (hr) Value: 6
  misc_feature: MA Experiment 20000173 PARAMETER Experiment Name: At_42deg_Heat_P Parameter: Tissue Value: Aerial
  misc_feature: MA Experiment ID: 20000234 Result: Up-regulated in Transcription
  misc_feature: MA Experiment 20000234 PARAMETER Experiment Name: At_Siliques_P Parameter: Age (day) Value: 21
  misc_feature: MA Experiment 20000234 PARAMETER Experiment Name: At_Siliques_P Parameter: Organism Value: A. thaliana
  misc_feature: MA Experiment 20000234 PARAMETER Experiment Name: At_Siliques_P Parameter: Plant Line Value: WS
  misc_feature: MA Experiment 20000234 PARAMETER Experiment Name: At_Siliques_P Parameter: Tissue Value: Less Than 5mm Siliques vs. Whole Plant
  misc_feature: MA Experiment ID: 20000794 Result: Down-regulated in Transcription
  misc_feature: MA Experiment 20000794 PARAMETER Experiment Name: At_Petals_P Parameter: Age (day) Value: 23-25 days
  misc_feature: MA Experiment 20000794 PARAMETER Experiment Name: At_Petals_P Parameter: Plant Line Value: WS
  misc_feature: MA Experiment 20000794 PARAMETER Experiment Name: At_Petals_P Parameter: Tissue Value: Petals vs. Whole plant
  misc_feature: MA Experiment ID: 20001911 Result: Down-regulated in Transcription
  misc_feature: MA Experiment 20001911 PARAMETER Experiment Name: At_Drought_Reproduction_P Parameter: Age (day) Value: 40
  misc_feature: MA Experiment 20001911 PARAMETER Experiment Name: At_Drought_Reproduction_P Parameter: Organism Value: A. thaliana
  misc_feature: MA Experiment 20001911 PARAMETER Experiment Name: At_Drought_Reproduction_P Parameter: Plant Line Value: WS
  misc_feature: MA Experiment 20001911 PARAMETER Experiment Name: At_Drought_Reproduction_P Parameter: Timepoint (day) Value: 10
  misc_feature: MA Experiment 20001911 PARAMETER Experiment Name: At_Drought_Reproduction_P Parameter: Tissue Value: Flowers
  misc_feature: MA Experiment 20001911 PARAMETER Experiment Name: At_Drought_Reproduction_P Parameter: Treatment Value: Drought vs. No Drought

SEQ ID NO: 34391 - protein, 113 aa, Arabidopsis thaliana; identical to SEQ ID NO: 30801
  peptide (1)..(113): Ceres Seq. ID no. 12333084
  misc_feature (42)..(106): Pfam Name: Rapid ALkalinization Factor (RALF) Pfam Description: Rapid ALkalinization Factor (RALF)
  misc_feature (42)..(104): Homolog of NCBI NO: 34902918 NR Description: unnamed protein product [Oryza sativa (japonica
  misc_feature (7)..(106): Homolog of NCBI NO: 15217877 NR Description: hypothetical protein; protein id: At1g28270.1
  misc_feature (41)..(104): Homolog of NCBI NO: 15218637 NR Description: hypothetical protein; protein id: At1g02900.1
  misc_feature (41)..(106): Homolog of NCBI NO: 18401177 NR Description: expressed protein
  misc_feature (41)..(106): Homolog of NCBI NO: 18397246 NR Description: expressed protein
  misc_feature (5)..(106): Homolog of NCBI NO: 18414528 NR Description: Expressed protein
  misc_feature (1)..(113): Homolog of NCBI NO: 18403901 NR Description: Expressed protein
  misc_feature (1)..(62): Homolog of NCBI NO: 7459901 NR Description: hypothetical protein DL3015C - Arabidopsis
  misc_feature (1)..(113): Homolog of NCBI NO: 18414108 NR Description: expressed protein
  misc_feature (1)..(113): Homolog of NCBI NO: 21553907 NR Description: unknown [Arabidopsis thaliana]

SEQ ID NO: 34392 - protein, 80 aa, Arabidopsis thaliana; identical to SEQ ID NO: 30802
  peptide (1)..(80): Ceres Seq. ID no. 12333085
  misc_feature (9)..(73): Pfam Name: Rapid ALkalinization Factor (RALF) Pfam Description: Rapid ALkalinization Factor (RALF)
  misc_feature (9)..(71): Homolog of NCBI NO: 34902918 NR Description: unnamed protein product [Oryza sativa (japonica
  misc_feature (1)..(73): Homolog of NCBI NO: 15217877 NR Description: hypothetical protein; protein id: At1g28270.1
  misc_feature (8)..(71): Homolog of NCBI NO: 15218637 NR Description: hypothetical protein; protein id: At1g02900.1
  misc_feature (8)..(73): Homolog of NCBI NO: 18401177 NR Description: expressed protein
  misc_feature (8)..(73): Homolog of NCBI NO: 18397246 NR Description: expressed protein
  misc_feature (1)..(73): Homolog of NCBI NO: 18414528 NR Description: Expressed protein
  misc_feature (1)..(80): Homolog of NCBI NO: 18403901 NR Description: Expressed protein
  misc_feature (1)..(29): Homolog of NCBI NO: 7459901 NR Description: hypothetical protein DL3015C - Arabidopsis
  misc_feature (1)..(80): Homolog of NCBI NO: 18414108 NR Description: expressed protein
  misc_feature (1)..(80): Homolog of NCBI NO: 21553907 NR Description: unknown [Arabidopsis thaliana]

SEQ ID NO: 34393 - protein, 66 aa, Arabidopsis thaliana; identical to SEQ ID NO: 30803
  peptide (1)..(66): Ceres Seq. ID no. 12333086
  misc_feature (1)..(59): Pfam Name: Rapid ALkalinization Factor (RALF) Pfam Description: Rapid ALkalinization Factor (RALF)
  misc_feature (1)..(57): Homolog of NCBI NO: 34902918 NR Description: unnamed protein product [Oryza sativa (japonica
  misc_feature (1)..(59): Homolog of NCBI NO: 15217877 NR Description: hypothetical protein; protein id: At1g28270.1
  misc_feature (1)..(57): Homolog of NCBI NO: 15218637 NR Description: hypothetical protein; protein id: At1g02900.1
  misc_feature (1)..(59): Homolog of NCBI NO: 18401177 NR Description: expressed protein
  misc_feature (1)..(59): Homolog of NCBI NO: 18397246 NR Description: expressed protein
  misc_feature (1)..(59): Homolog of NCBI NO: 18414528 NR Description: Expressed protein
  misc_feature (1)..(66): Homolog of NCBI NO: 18403901 NR Description: Expressed protein
  misc_feature (1)..(15): Homolog of NCBI NO: 7459901 NR Description: hypothetical protein DL3015C - Arabidopsis
  misc_feature (1)..(66): Homolog of NCBI NO: 18414108 NR Description: expressed protein
  misc_feature (1)..(66): Homolog of NCBI NO: 21553907 NR Description: unknown [Arabidopsis thaliana]

SEQ ID NO: 34394 - DNA, 703 bp, Arabidopsis thaliana; identical to SEQ ID NO: 30804
  misc_feature (1)..(703): Ceres Seq. ID no. 13489872
  misc_feature: MA Experiment ID: 108433 Result: Up-regulated in Transcription
  misc_feature: MA Experiment 108433 PARAMETER Experiment Name: At_rhl_Mutant2_cDNA_P Parameter: Age (day) Value: 7
  misc_feature: MA Experiment 108433 PARAMETER Experiment Name: At_rhl_Mutant2_cDNA_P Parameter: Organism Value: A. thaliana
  misc_feature: MA Experiment 108433 PARAMETER Experiment Name: At_rhl_Mutant2_cDNA_P Parameter: Plant Line Value: rhl Mutant vs. wt landsburg
  misc_feature: MA Experiment 108433 PARAMETER Experiment Name: At_rhl_Mutant2_cDNA_P Parameter: Tissue Value: Roots
  misc_feature: MA Experiment ID: 108434 Result: Down-regulated in Transcription
  misc_feature: MA Experiment 108434 PARAMETER Experiment Name: At_Root_Tips_cDNA_P Parameter: Tissue Value: Root Tips
  misc_feature: MA Experiment ID: 108462 Result: Up-regulated in Transcription
  misc_feature: MA Experiment 108462 PARAMETER Experiment Name: At_Germinating_Seeds_cDNA_P Parameter: Age (day) Value: 2 vs. 0
  misc_feature: MA Experiment 108462 PARAMETER Experiment Name: At_Germinating_Seeds_cDNA_P Parameter: Tissue Value: Germinating Seeds
  misc_feature: MA Experiment ID: 108464 Result: Up-regulated in Transcription
  misc_feature: MA Experiment 108464 PARAMETER Experiment Name: At_Germinating_Seeds_cDNA_P Parameter: Age (day) Value: 4 vs. 0
  misc_feature: MA Experiment 108464 PARAMETER Experiment Name: At_Germinating_Seeds_cDNA_P Parameter: Tissue Value: Germinating Seeds
  misc_feature: MA Experiment ID: 108488 Result: Down-regulated in Transcription
  misc_feature: MA Experiment ID: 108561 Result: Up-regulated in Transcription
  misc_feature: MA Experiment 108561 PARAMETER Experiment Name: At_100uM_ABA_cDNA_P Parameter: Timepoint (hr) Value: 6
  misc_feature: MA Experiment 108561 PARAMETER Experiment Name: At_100uM_ABA_cDNA_P Parameter: Tissue Value: Aerial
  misc_feature: MA Experiment 108561 PARAMETER Experiment Name: At_100uM_ABA_cDNA_P Parameter: Treatment Value: 100uM ABA vs. No Treatment
  misc_feature: MA Experiment ID: 108579 Result: Down-regulated in Transcription
  misc_feature: MA Experiment 108579 PARAMETER Experiment Name: At_4deg_Cold_cDNA_P Parameter: Temperature (deg C) Value: 4 vs. 22
  misc_feature: MA Experiment 108579 PARAMETER Experiment Name: At_4deg_Cold_cDNA_P Parameter: Timepoint (hr) Value: 6
  misc_feature: MA Experiment 108579 PARAMETER Experiment Name: At_4deg_Cold_cDNA_P Parameter: Tissue Value: Aerial
  misc_feature: MA Experiment ID: 20000214 Result: Down-regulated in Transcription
  misc_feature: MA Experiment 20000214 PARAMETER Experiment Name: At_4deg_Cold_P Parameter: Timepoint (hr) Value: 6
  misc_feature: MA Experiment ID: 20000224 Result: Down-regulated in Transcription
  misc_feature: MA Experiment ID: 20000437 Result: Up-regulated in Transcription
  misc_feature: MA Experiment 20000437 PARAMETER Experiment Name: At_Drought_P Parameter: Age (day) Value: 8
  misc_feature: MA Experiment 20000437 PARAMETER Experiment Name: At_Drought_P Parameter: Organism Value: A. thaliana
  misc_feature: MA Experiment 20000437 PARAMETER Experiment Name: At_Drought_P Parameter: Plant Line Value: WS
  misc_feature: MA Experiment 20000437 PARAMETER Experiment Name: At_Drought_P Parameter: Timepoint (hr) Value: 24
  misc_feature: MA Experiment 20000437 PARAMETER Experiment Name: At_Drought_P Parameter: Tissue Value: Whole Plant
  misc_feature: MA Experiment 20000437 PARAMETER Experiment Name: At_Drought_P Parameter: Treatment Value: Drought vs. No Drought
  misc_feature: MA Experiment ID: 20001557 Result: Down-regulated in Transcription
  misc_feature: MA Experiment 20001557 PARAMETER Experiment Name: At_Drought_Soil_Dry_P Parameter: Age (day) Value: 27
  misc_feature: MA Experiment 20001557 PARAMETER Experiment Name: At_Drought_Soil_Dry_P Parameter: Organism Value: A. thaliana
  misc_feature: MA Experiment 20001557 PARAMETER Experiment Name: At_Drought_Soil_Dry_P Parameter: Plant Line Value: WS
  misc_feature: MA Experiment 20001557 PARAMETER Experiment Name: At_Drought_Soil_Dry_P Parameter: Post Timepoint (hr) Value: 3
  misc_feature: MA Experiment 20001557 PARAMETER Experiment Name: At_Drought_Soil_Dry_P Parameter: Post-Treatment Value: Re-Water vs. No Drought
  misc_feature: MA Experiment 20001557 PARAMETER Experiment Name: At_Drought_Soil_Dry_P Parameter: Timepoint (day) Value: 13
  misc_feature: MA Experiment 20001557 PARAMETER Experiment Name: At_Drought_Soil_Dry_P Parameter: Treatment Value: Drought vs. No Drought
  misc_feature: MA Experiment ID: 20001905 Result: Up-regulated in Transcription
  misc_feature: MA Experiment 20001905 PARAMETER Experiment Name: At_Drought_Reproduction_P Parameter: Age (day) Value: 40
  misc_feature: MA Experiment 20001905 PARAMETER Experiment Name: At_Drought_Reproduction_P Parameter: Organism Value: A. thaliana
  misc_feature: MA Experiment 20001905 PARAMETER Experiment Name: At_Drought_Reproduction_P Parameter: Plant Line Value: WS
  misc_feature: MA Experiment 20001905 PARAMETER Experiment Name: At_Drought_Reproduction_P Parameter: Timepoint (day) Value: 10
  misc_feature: MA Experiment 20001905 PARAMETER Experiment Name: At_Drought_Reproduction_P Parameter: Tissue Value: Rosettes
  misc_feature: MA Experiment 20001905 PARAMETER Experiment Name: At_Drought_Reproduction_P Parameter: Treatment Value: Drought vs. No Drought

SEQ ID NO: 34395 - protein, 119 aa, Arabidopsis thaliana; identical to SEQ ID NO: 30805
  peptide (1)..(119): Ceres Seq. ID no. 13489873
  misc_feature (14)..(117): Pfam Name: Microtubule associated protein 1A/1B, light chain 3 Pfam Description: Microtubule associated protein 1A/1B, light
  misc_feature (1)..(117): Homolog of NCBI NO: 21553487 NR Description: symbiosis-related like protein [Arabidopsis
  misc_feature (1)..(117): Homolog of NCBI NO: 18415813 NR Description: symbiosis-related like protein [Arabidopsis
  misc_feature (1)..(118): Homolog of NCBI NO: 15224577 NR Description: microtubule-associated protein -related
  misc_feature (1)..(118): Homolog of NCBI NO: 21592920 NR Description: putative microtubule-associated protein
  misc_feature (1)..(117): Homolog of NCBI NO: 33146967 NR Description: putative microtubule associated protein
  misc_feature (1)..(119): Homolog of NCBI NO: 38344173 NR Description: OSJNBa0053K19.12 [Oryza sativa (japonica
  misc_feature (1)..(117): Homolog of NCBI NO: 34595981 NR Description: microtubule-associated protein 1 light chain 3
  misc_feature (1)..(118): Homolog of NCBI NO: 40253647 NR Description: putative microtubial binding protein
  misc_feature (1)..(119): Homolog of NCBI NO: 15220686 NR Description: symbiosis-related protein -related [Arabidopsis
  misc_feature (1)..(118): Homolog of NCBI NO: 7446944 NR Description: hypothetical protein F8K4.23 - Arabidopsis

SEQ ID NO: 34396 - DNA, 705 bp, Arabidopsis thaliana; identical to SEQ ID NO: 30806
  misc_feature (1)..(705): Ceres Seq. ID no. 12332216
  misc_feature: MA Experiment ID: 108488 Result: Down-regulated in Transcription
  misc_feature: MA Experiment ID: 20000496 Result: Down-regulated in Transcription
  misc_feature: MA Experiment 20000496 PARAMETER Experiment Name: At_Guard_Cells_P Parameter: Harvest Date Value: 7/19/2002
  misc_feature: MA Experiment 20000496 PARAMETER Experiment Name: At_Guard_Cells_P Parameter: Organism Value: Canola
  misc_feature: MA Experiment 20000496 PARAMETER Experiment Name: At_Guard_Cells_P Parameter: Tissue Value: Guard Cells vs. Leaves

SEQ ID NO: 34397 - protein, 150 aa, Arabidopsis thaliana; identical to SEQ ID NO: 30807
  peptide (1)..(150): Ceres Seq. ID no. 12332217
  misc_feature (21)..(145): Pfam Name: Profilin Pfam Description: Profilin
  misc_feature (20)..(150): Homolog of NCBI NO: 16555785 NR Description: profilin [Capsicum annuum]
  misc_feature (20)..(150): Homolog of NCBI NO: 34922934 NR Description: Profilin (Allergen Pru p 4.02)
  misc_feature (20)..(150): Homolog of NCBI NO: 15809696 NR Description: profilin [Litchi chinensis]
  misc_feature (20)..(150): Homolog of NCBI NO: 12230421 NR Description: Profilin 1
  misc_feature (20)..(150): Homolog of NCBI NO: 1346802 NR Description: PROFILIN 1
  misc_feature (21)..(150): Homolog of NCBI NO: 2781152 NR Description: Profilin I From Arabidopsis Thaliana
  misc_feature (20)..(150): Homolog of NCBI NO: 15224838 NR Description: profilin 1
  misc_feature (20)..(150): Homolog of NCBI NO: 9965571 NR Description: profilin [Arabidopsis thaliana]
  misc_feature (20)..(150): Homolog of NCBI NO: 21554627 NR Description: profilin 2 [Arabidopsis thaliana]
  misc_feature (20)..(150): Homolog of NCBI NO: 15233538 NR Description: profilin 2

SEQ ID NO: 34398 - protein, 131 aa, Arabidopsis thaliana; identical to SEQ ID NO: 30808
  peptide (1)..(131): Ceres Seq. ID no. 12332218
  misc_feature (2)..(126): Pfam Name: Profilin Pfam Description: Profilin
  misc_feature (1)..(131): Homolog of NCBI NO: 16555785 NR Description: profilin [Capsicum annuum]
  misc_feature (1)..(131): Homolog of NCBI NO: 34922934 NR Description: Profilin (Allergen Pru p 4.02)
  misc_feature (1)..(131): Homolog of NCBI NO: 15809696 NR Description: profilin [Litchi chinensis]
  misc_feature (1)..(131): Homolog of NCBI NO: 12230421 NR Description: Profilin 1
  misc_feature (1)..(131): Homolog of NCBI NO: 1346802 NR Description: PROFILIN 1
  misc_feature (2)..(131): Homolog of NCBI NO: 2781152 NR Description: Profilin I From Arabidopsis Thaliana
  misc_feature (1)..(131): Homolog of NCBI NO: 15224838 NR Description: profilin 1
  misc_feature (1)..(131): Homolog of NCBI NO: 9965571 NR Description: profilin [Arabidopsis thaliana]
  misc_feature (1)..(131): Homolog of NCBI NO: 21554627 NR Description: profilin 2 [Arabidopsis thaliana]
  misc_feature (1)..(131): Homolog of NCBI NO: 15233538 NR Description: profilin 2

SEQ ID NO: 34399 - protein, 120 aa, Arabidopsis thaliana; identical to SEQ ID NO: 30809
  peptide (1)..(120): Ceres Seq. ID no. 12332219
  misc_feature (1)..(115): Pfam Name: Profilin Pfam Description: Profilin
  misc_feature (1)..(120): Homolog of NCBI NO: 16555785 NR Description: profilin [Capsicum annuum]
  misc_feature (1)..(120): Homolog of NCBI NO: 34922934 NR Description: Profilin (Allergen Pru p 4.02)
  misc_feature (1)..(120): Homolog of NCBI NO: 15809696 NR Description: profilin [Litchi chinensis]
  misc_feature (1)..(120): Homolog of NCBI NO: 12230421 NR Description: Profilin 1
  misc_feature (1)..(120): Homolog of NCBI NO: 1346802 NR Description: PROFILIN 1
  misc_feature (1)..(120): Homolog of NCBI NO: 2781152 NR Description: Profilin I From Arabidopsis Thaliana
  misc_feature (1)..(120): Homolog of NCBI NO: 15224838 NR Description: profilin 1
  misc_feature (1)..(120): Homolog of NCBI NO: 9965571 NR Description: profilin [Arabidopsis thaliana]
  misc_feature (1)..(120): Homolog of NCBI NO: 21554627 NR Description: profilin 2 [Arabidopsis thaliana]
  misc_feature (1)..(120): Homolog of NCBI NO: 15233538 NR Description: profilin 2

SEQ ID NO: 34400 - DNA, 1020 bp, Arabidopsis thaliana; identical to SEQ ID NO: 30810
  misc_feature (1)..(1020): Ceres Seq. ID no. 12489584
  misc_feature: MA Experiment ID: 108434 Result: Down-regulated in Transcription
  misc_feature: MA Experiment 108434 PARAMETER Experiment Name: At_Root_Tips_cDNA_P Parameter: Tissue Value: Root Tips
  misc_feature: MA Experiment ID: 108595 Result: Up-regulated in Transcription
  misc_feature: MA Experiment 108595 PARAMETER Experiment Name: At_Ler-pi_Ovule_cDNA_P Parameter: Plant Line Value: null
  misc_feature: MA Experiment ID: 108668 Result: Up-regulated in Transcription
  misc_feature: MA Experiment 108668 PARAMETER Experiment Name: At_2mM_SA_cDNA_P Parameter: Plant Line Value: WS
  misc_feature: MA Experiment 108668 PARAMETER Experiment Name: At_2mM_SA_cDNA_P Parameter: Timepoint (hr) Value: 6
  misc_feature: MA Experiment 108668 PARAMETER Experiment Name: At_2mM_SA_cDNA_P Parameter: Treatment Value: 2mM SA vs. No Treatment

SEQ ID NO: 34401 - protein, 271 aa, Arabidopsis thaliana; identical to SEQ ID NO: 30811
  peptide (1)..(271): Ceres Seq. ID no. 12489585
  misc_feature (57)..(257): Pfam Name: Putative cyclase Pfam Description: Putative cyclase
  misc_feature (57)..(269): Homolog of NCBI NO: 23056289 NR Description: hypothetical protein [Geobacter metallireducens]
  misc_feature (56)..(269): Homolog of NCBI NO: 39998438 NR Description: cyclase, putative [Geobacter sulfurreducens PCA]
  misc_feature (57)..(269): Homolog of NCBI NO: 16330650 NR Description: hypothetical protein [Synechocystis sp. PCC 6803]
  misc_feature (58)..(271): Homolog of NCBI NO: 23016903 NR Description: hypothetical protein [Magnetospirillum
  misc_feature (4)..(149): Homolog of NCBI NO: 7486023 NR Description: hypothetical protein F23E12.220 - Arabidopsis
  misc_feature (42)..(230): Homolog of NCBI NO: 7486287 NR Description: hypothetical protein F28A23.60 - Arabidopsis
  misc_feature (1)..(271): Homolog of NCBI NO: 35215089 NR Description: hypothetical protein [Oryza sativa (japonica
  misc_feature (4)..(270): Homolog of NCBI NO: 18418598 NR Description: putative protein
  misc_feature (42)..(271): Homolog of NCBI NO: 18418393 NR Description: putative protein
  misc_feature (1)..(271): Homolog of NCBI NO: 15219416 NR Description: hypothetical protein; protein id: At1g44542.1

SEQ ID NO: 34402 - protein, 185 aa, Arabidopsis thaliana; identical to SEQ ID NO: 30812
  peptide (1)..(185): Ceres Seq. ID no. 12489586
  misc_feature (1)..(171): Pfam Name: Putative cyclase Pfam Description: Putative cyclase
  misc_feature (1)..(183): Homolog of NCBI NO: 23056289 NR Description: hypothetical protein [Geobacter metallireducens]
  misc_feature (1)..(183): Homolog of NCBI NO: 39998438 NR Description: cyclase, putative [Geobacter sulfurreducens PCA]
  misc_feature (1)..(183): Homolog of NCBI NO: 16330650 NR Description: hypothetical protein [Synechocystis sp. PCC 6803]
  misc_feature (1)..(185): Homolog of NCBI NO: 23016903 NR Description: hypothetical protein [Magnetospirillum
  misc_feature (1)..(63): Homolog of NCBI NO: 7486023 NR Description: hypothetical protein F23E12.220 - Arabidopsis
  misc_feature (1)..(144): Homolog of NCBI NO: 7486287 NR Description: hypothetical protein F28A23.60 - Arabidopsis
  misc_feature (1)..(185): Homolog of NCBI NO: 35215089 NR Description: hypothetical protein [Oryza sativa (japonica
  misc_feature (1)..(184): Homolog of NCBI NO: 18418598 NR Description: putative protein
  misc_feature (1)..(185): Homolog of NCBI NO: 18418393 NR Description: putative protein
  misc_feature (1)..(185): Homolog of NCBI NO: 15219416 NR Description: hypothetical protein; protein id: At1g44542.1

SEQ ID NO: 34403 - protein, 174 aa, Arabidopsis thaliana; identical to SEQ ID NO: 30813
  peptide (1)..(174): Ceres Seq. ID no. 12489587
  misc_feature (1)..(160): Pfam Name: Putative cyclase Pfam Description: Putative cyclase
  misc_feature (1)..(172): Homolog of NCBI NO: 23056289 NR Description: hypothetical protein [Geobacter metallireducens]
  misc_feature (1)..(172): Homolog of NCBI NO: 39998438 NR Description: cyclase, putative [Geobacter sulfurreducens PCA]
  misc_feature (1)..(172): Homolog of NCBI NO: 16330650 NR Description: hypothetical protein [Synechocystis sp. PCC 6803]
  misc_feature (1)..(174): Homolog of NCBI NO: 23016903 NR Description: hypothetical protein [Magnetospirillum
  misc_feature (1)..(52): Homolog of NCBI NO: 7486023 NR Description: hypothetical protein F23E12.220 - Arabidopsis
  misc_feature (1)..(133): Homolog of NCBI NO: 7486287 NR Description: hypothetical protein F28A23.60 - Arabidopsis
  misc_feature (1)..(174): Homolog of NCBI NO: 35215089 NR Description: hypothetical protein [Oryza sativa (japonica
  misc_feature (1)..(173): Homolog of NCBI NO: 18418598 NR Description: putative protein
  misc_feature (1)..(174): Homolog of NCBI NO: 18418393 NR Description: putative protein
  misc_feature (1)..(174): Homolog of NCBI NO: 15219416 NR Description: hypothetical protein; protein id: At1g44542.1

SEQ ID NO: 34404 - DNA, 1081 bp, Arabidopsis thaliana; identical to SEQ ID NO: 30814
  misc_feature (1)..(1081): Ceres Seq. ID no. 13489874
  misc_feature: MA Experiment ID: 108435 Result: Down-regulated in Transcription
  misc_feature: MA Experiment 108435 PARAMETER Experiment Name: At_stm_Mutants_cDNA_P Parameter: Plant Line Value: wt Landsburg vs stm
  misc_feature: MA Experiment 108435 PARAMETER Experiment Name: At_stm_Mutants_cDNA_P Parameter: Tissue Value: Shoot Apical Meristem Region
  misc_feature: MA Experiment ID: 108501 Result: Down-regulated in Transcription
  misc_feature: MA Experiment 108501 PARAMETER Experiment Name: At_ap2_floral_buds_cDNA_P Parameter: Plant Line Value: ap2 (Ler.)
  misc_feature: MA Experiment 108501 PARAMETER Experiment Name: At_ap2_floral_buds_cDNA_P Parameter: Tissue Value: Closed Flower
  misc_feature: MA Experiment ID: 108577 Result: Up-regulated in Transcription
  misc_feature: MA Experiment 108577 PARAMETER Experiment Name: At_42deg_Heat_cDNA_P Parameter: Temperature (deg C) Value: 42 vs. 22
  misc_feature: MA Experiment 108577 PARAMETER Experiment Name: At_42deg_Heat_cDNA_P Parameter: Timepoint (hr) Value: 6
  misc_feature: MA Experiment 108577 PARAMETER Experiment Name: At_42deg_Heat_cDNA_P Parameter: Tissue Value: Aerial
  misc_feature: MA Experiment ID: 20000179 Result: Up-regulated in Transcription
  misc_feature: MA Experiment 20000179 PARAMETER Experiment Name: At_Germinating_Seeds_P Parameter: Age (hr) Value: 6 vs. 0
  misc_feature: MA Experiment 20000179 PARAMETER Experiment Name: At_Germinating_Seeds_P Parameter: Tissue Value: Germinating Seeds
  misc_feature: MA Experiment ID: 20000184 Result: Down-regulated in Transcription
  misc_feature: MA Experiment 20000184 PARAMETER Experiment Name: At_Shoots__P Parameter: Age (day) Value: 7
  misc_feature: MA Experiment 20000184 PARAMETER Experiment Name: At_Shoots__P Parameter: Tissue Value: Shoots vs. Whole Plant
  misc_feature: MA Experiment ID: 20000224 Result: Up-regulated in Transcription
  misc_feature: MA Experiment ID: 20000234 Result: Down-regulated in Transcription
  misc_feature: MA Experiment 20000234 PARAMETER Experiment Name: At_Siliques_P Parameter: Age (day) Value: 21
  misc_feature: MA Experiment 20000234 PARAMETER Experiment Name: At_Siliques_P Parameter: Organism Value: A. thaliana
  misc_feature: MA Experiment 20000234 PARAMETER Experiment Name: At_Siliques_P Parameter: Plant Line Value: WS
  misc_feature: MA Experiment 20000234 PARAMETER Experiment Name: At_Siliques_P Parameter: Tissue Value: Less Than 5mm Siliques vs. Whole Plant
  misc_feature: MA Experiment ID: 20000264 Result: Down-regulated in Transcription
  misc_feature: MA Experiment 20000264 PARAMETER Experiment Name: At_Open_Flower_P Parameter: Age (day) Value: 21
  misc_feature: MA Experiment 20000264 PARAMETER Experiment Name: At_Open_Flower_P Parameter: Plant Line Value: WS
  misc_feature: MA Experiment 20000264 PARAMETER Experiment Name: At_Open_Flower_P Parameter: Tissue Value: Open Flower vs. Whole Plant
  misc_feature: MA Experiment ID: 20000265 Result: Down-regulated in Transcription
  misc_feature: MA Experiment 20000265 PARAMETER Experiment Name: At_Open_Flower_P Parameter: Age (day) Value: 21
  misc_feature: MA Experiment 20000265 PARAMETER Experiment Name: At_Open_Flower_P Parameter: Plant Line Value: WS
  misc_feature: MA Experiment 20000265 PARAMETER Experiment Name: At_Open_Flower_P Parameter: Tissue Value: Closed Flower vs. Whole Plant
  misc_feature: MA Experiment ID: 20000437 Result: Up-regulated in Transcription
  misc_feature: MA Experiment 20000437 PARAMETER Experiment Name: At_Drought_P Parameter: Age (day) Value: 8
  misc_feature: MA Experiment 20000437 PARAMETER Experiment Name: At_Drought_P Parameter: Organism Value: A. thaliana
  misc_feature: MA Experiment 20000437 PARAMETER Experiment Name: At_Drought_P Parameter: Plant Line Value: WS
  misc_feature: MA Experiment 20000437 PARAMETER Experiment Name: At_Drought_P Parameter: Timepoint (hr) Value: 24
  misc_feature: MA Experiment 20000437 PARAMETER Experiment Name: At_Drought_P Parameter: Tissue Value: Whole Plant
  misc_feature: MA Experiment 20000437 PARAMETER Experiment Name: At_Drought_P Parameter: Treatment Value: Drought vs. No Drought
  misc_feature: MA Experiment ID: 20000496 Result: Down-regulated in Transcription
  misc_feature: MA Experiment 20000496 PARAMETER Experiment Name: At_Guard_Cells_P Parameter: Harvest Date Value: 7/19/2002
  misc_feature: MA Experiment 20000496 PARAMETER Experiment Name: At_Guard_Cells_P Parameter: Organism Value: Canola
  misc_feature: MA Experiment 20000496 PARAMETER Experiment Name: At_Guard_Cells_P Parameter: Tissue Value: Guard Cells vs. Leaves
  misc_feature: MA Experiment ID: 20001557 Result: Down-regulated in Transcription
  misc_feature: MA Experiment 20001557 PARAMETER Experiment Name: At_Drought_Soil_Dry_P Parameter: Age (day) Value: 27
  misc_feature: MA Experiment 20001557 PARAMETER Experiment Name: At_Drought_Soil_Dry_P Parameter: Organism Value: A. thaliana
  misc_feature: MA Experiment 20001557 PARAMETER Experiment Name: At_Drought_Soil_Dry_P Parameter: Plant Line Value: WS
  misc_feature: MA Experiment 20001557 PARAMETER Experiment Name: At_Drought_Soil_Dry_P Parameter: Post Timepoint (hr) Value: 3
  misc_feature: MA Experiment 20001557 PARAMETER Experiment Name: At_Drought_Soil_Dry_P Parameter: Post-Treatment Value: Re-Water vs. No Drought
  misc_feature: MA Experiment 20001557 PARAMETER Experiment Name: At_Drought_Soil_Dry_P Parameter: Timepoint (day) Value: 13
  misc_feature: MA Experiment 20001557 PARAMETER Experiment Name: At_Drought_Soil_Dry_P Parameter: Treatment Value: Drought vs. No Drought
  misc_feature: MA Experiment ID: 20001558 Result: Down-regulated in Transcription
  misc_feature: MA Experiment 20001558 PARAMETER Experiment Name: At_Drought_Soil_Dry_P Parameter: Age (day) Value: 27
  misc_feature: MA Experiment 20001558 PARAMETER Experiment Name: At_Drought_Soil_Dry_P Parameter: Organism Value: A. thaliana
  misc_feature: MA Experiment 20001558 PARAMETER Experiment Name: At_Drought_Soil_Dry_P Parameter: Plant Line Value: WS
  misc_feature: MA Experiment 20001558 PARAMETER Experiment Name: At_Drought_Soil_Dry_P Parameter: Post Timepoint (hr) Value: 6
  misc_feature: MA Experiment 20001558 PARAMETER Experiment Name: At_Drought_Soil_Dry_P Parameter: Post-Treatment Value: Re-Water vs. No Drought
  misc_feature: MA Experiment 20001558 PARAMETER Experiment Name: At_Drought_Soil_Dry_P Parameter: Timepoint (day) Value: 13
  misc_feature: MA Experiment 20001558 PARAMETER Experiment Name: At_Drought_Soil_Dry_P Parameter: Treatment Value: Drought vs. No Drought

SEQ ID NO: 34405 - protein, 222 aa, Arabidopsis thaliana; identical to SEQ ID NO: 30815
  peptide (1)..(222): Ceres Seq. ID no. 13489875
  misc_feature (126)..(222): Homolog of NCBI NO: 26451851 NR Description: putative v-SNARE AtVTI1b [Arabidopsis thaliana]
  misc_feature (56)..(221): Homolog of NCBI NO: 26451552 NR Description: putative vesicle transport protein [Arabidopsis
  misc_feature (1)..(222): Homolog of NCBI NO: 34914100 NR Description: similar to vesicle transport protein
  misc_feature (1)..(221): Homolog of NCBI NO: 15228600 NR Description: SNARE protein AtVTI13 [Arabidopsis thaliana]
  misc_feature (1)..(221): Homolog of NCBI NO: 6690274 NR Description: v-SNARE AtVTI1a [Arabidopsis thaliana]
  misc_feature (1)..(221): Homolog of NCBI NO: 15241780 NR Description: v-SNARE AtVTI1a (ZIG) [Arabidopsis thaliana]
  misc_feature (1)..(222): Homolog of NCBI NO: 34910406 NR Description: putative vesicle transport v-SNARE protein
  misc_feature (1)..(222): Homolog of NCBI NO: 27805772 NR Description: Vesicle transport v-SNARE 12 (AtVTI12) (Vesicle v-SNARE protein VTI1b) (Vesicle soluble NSF attachment protein
  misc_feature (1)..(222): Homolog of NCBI NO: 18396008 NR Description: v-SNARE protein AtVTI1b, putative [Arabidopsis
  misc_feature (1)..(222): Homolog of NCBI NO: 6690276 NR Description: v-SNARE AtVTI1b [Arabidopsis thaliana]

SEQ ID NO: 34406 - protein, 167 aa, Arabidopsis thaliana; identical to SEQ ID NO: 30816
  peptide (1)..(167): Ceres Seq. ID no. 13489876
  misc_feature (71)..(167): Homolog of NCBI NO: 26451851 NR Description: putative v-SNARE AtVTI1b [Arabidopsis thaliana]
  misc_feature (1)..(166): Homolog of NCBI NO: 26451552 NR Description: putative vesicle transport protein [Arabidopsis
  misc_feature (1)..(167): Homolog of NCBI NO: 34914100 NR Description: similar to vesicle transport protein
  misc_feature (1)..(166): Homolog of NCBI NO: 15228600 NR Description: SNARE protein AtVTI13 [Arabidopsis thaliana]
  misc_feature (1)..(166): Homolog of NCBI NO: 6690274 NR Description: v-SNARE AtVTI1a [Arabidopsis thaliana]
  misc_feature (1)..(166): Homolog of NCBI NO: 15241780 NR Description: v-SNARE AtVTI1a (ZIG) [Arabidopsis thaliana]
  misc_feature (1)..(167): Homolog of NCBI NO: 34910406 NR Description: putative vesicle transport v-SNARE protein
  misc_feature (1)..(167): Homolog of NCBI NO: 27805772 NR Description: Vesicle transport v-SNARE 12 (AtVTI12) (Vesicle v-SNARE protein VTI1b) (Vesicle soluble NSF attachment protein
  misc_feature (1)..(167): Homolog of NCBI NO: 18396008 NR Description: v-SNARE protein AtVTI1b, putative [Arabidopsis
  misc_feature (1)..(167): Homolog of NCBI NO: 6690276 NR Description: v-SNARE AtVTI1b [Arabidopsis thaliana]

SEQ ID NO: 34407 - protein, 117 aa, Arabidopsis thaliana; identical to SEQ ID NO: 30817
  peptide (1)..(117): Ceres Seq. ID no. 13489877
  misc_feature (21)..(117): Homolog of NCBI NO: 26451851 NR Description: putative v-SNARE AtVTI1b [Arabidopsis thaliana]
  misc_feature (1)..(116): Homolog of NCBI NO: 26451552 NR Description: putative vesicle transport protein [Arabidopsis
  misc_feature (1)..(117): Homolog of NCBI NO: 34914100 NR Description: similar to vesicle transport protein
  misc_feature (1)..(116): Homolog of NCBI NO: 15228600 NR Description: SNARE protein AtVTI13 [Arabidopsis thaliana]
  misc_feature (1)..(116): Homolog of NCBI NO: 6690274 NR Description: v-SNARE AtVTI1a [Arabidopsis thaliana]
  misc_feature (1)..(116): Homolog of NCBI NO: 15241780 NR Description: v-SNARE AtVTI1a (ZIG) [Arabidopsis thaliana]
  misc_feature (1)..(117): Homolog of NCBI NO: 34910406 NR Description: putative vesicle transport v-SNARE protein
  misc_feature (1)..(117): Homolog of NCBI NO: 27805772 NR Description: Vesicle transport v-SNARE 12 (AtVTI12) (Vesicle v-SNARE protein VTI1b) (Vesicle soluble NSF attachment protein
  misc_feature (1)..(117): Homolog of NCBI NO: 18396008 NR Description: v-SNARE protein AtVTI1b, putative [Arabidopsis
  misc_feature (1)..(117): Homolog of NCBI NO: 6690276 NR Description: v-SNARE AtVTI1b [Arabidopsis thaliana]

SEQ ID NO: 34408 - DNA, 782 bp, Arabidopsis thaliana; identical to SEQ ID NO: 30818
  misc_feature (1)..(782): Ceres Seq. ID no. 12323507
  misc_feature: MA Experiment ID: 108462 Result: Up-regulated in Transcription
  misc_feature: MA Experiment 108462 PARAMETER Experiment Name: At_Germinating_Seeds_cDNA_P Parameter: Age (day) Value: 2 vs. 0
  misc_feature: MA Experiment 108462 PARAMETER Experiment Name: At_Germinating_Seeds_cDNA_P Parameter: Tissue Value: Germinating Seeds
  misc_feature: MA Experiment ID: 20000113 Result: Down-regulated in Transcription
  misc_feature: MA Experiment 20000113 PARAMETER Experiment Name: At_42deg_Heat_cDNA_P Parameter: Temperature (deg C) Value: 42 vs. 22
  misc_feature: MA Experiment 20000113 PARAMETER Experiment Name: At_42deg_Heat_cDNA_P Parameter: Timepoint (hr) Value: 8
  misc_feature: MA Experiment 20000113 PARAMETER Experiment Name: At_42deg_Heat_cDNA_P Parameter: Tissue Value: Aerial
  misc_feature: MA Experiment ID: 20000179 Result: Up-regulated in Transcription
  misc_feature: MA Experiment 20000179 PARAMETER Experiment Name: At_Germinating_Seeds_P Parameter: Age (hr) Value: 6 vs. 0
  misc_feature: MA Experiment 20000179 PARAMETER Experiment Name: At_Germinating_Seeds_P Parameter: Tissue Value: Germinating Seeds
  misc_feature: MA Experiment ID: 20000185 Result: Up-regulated in Transcription
  misc_feature: MA Experiment 20000185 PARAMETER Experiment Name: At_Roots__P Parameter: Age (day) Value: 7 vs. 21
  misc_feature: MA Experiment 20000185 PARAMETER Experiment Name: At_Roots__P Parameter: Organism Value: A. thaliana
  misc_feature: MA Experiment 20000185 PARAMETER Experiment Name: At_Roots__P Parameter: Tissue Value: Roots vs. Whole Plant
  misc_feature: MA Experiment ID: 20000234 Result: Up-regulated in Transcription
  misc_feature: MA Experiment 20000234 PARAMETER Experiment Name: At_Siliques_P Parameter: Age (day) Value: 21
  misc_feature: MA Experiment 20000234 PARAMETER Experiment Name: At_Siliques_P Parameter: Organism Value: A. thaliana
  misc_feature: MA Experiment 20000234 PARAMETER Experiment Name: At_Siliques_P Parameter: Plant Line Value: WS
  misc_feature: MA Experiment 20000234 PARAMETER Experiment Name: At_Siliques_P Parameter: Tissue Value: Less Than 5mm Siliques vs. Whole Plant
  misc_feature: MA Experiment ID: 20000235 Result: Up-regulated in Transcription
  misc_feature: MA Experiment 20000235 PARAMETER Experiment Name: At_Siliques_P Parameter: Age (day) Value: 21
  misc_feature: MA Experiment 20000235 PARAMETER Experiment Name: At_Siliques_P Parameter: Organism Value: A. thaliana
  misc_feature: MA Experiment 20000235 PARAMETER Experiment Name: At_Siliques_P Parameter: Plant Line Value: WS
  misc_feature: MA Experiment 20000235 PARAMETER Experiment Name: At_Siliques_P Parameter: Tissue Value: 5-10mm Siliques vs. Whole Plant
  misc_feature: MA Experiment ID: 20000495 Result: Up-regulated in Transcription
  misc_feature: MA Experiment 20000495 PARAMETER Experiment Name: At_Guard_Cells_P Parameter: Harvest Date Value: 8/2/2002
  misc_feature: MA Experiment 20000495 PARAMETER Experiment Name: At_Guard_Cells_P Parameter: Organism Value: A. thaliana
  misc_feature: MA Experiment 20000495 PARAMETER Experiment Name: At_Guard_Cells_P Parameter: Tissue Value: Guard Cells vs. Leaves

SEQ ID NO: 34409 - protein, 218 aa, Arabidopsis thaliana; identical to SEQ ID NO: 30819
  peptide (1)..(218): Ceres Seq. ID no. 12323508
  misc_feature (51)..(216): Homolog of NCBI NO: 39582840 NR Description: Hypothetical protein CBG18578 [Caenorhabditis
  misc_feature (50)..(216): Homolog of NCBI NO: 1480465 NR Description: cyclophilin Ovcyp-2
  misc_feature (50)..(216): Homolog of NCBI NO: 863016 NR Description: cyclophilin
  misc_feature (50)..(216): Homolog of NCBI NO: 17566266 NR Description: CYcloPhilin family CYP-7 (18.4 kD) (cyp-7)
  misc_feature (20)..(216): Homolog of NCBI NO: 5731960 NR Description: cyclophilin B [Dictyostelium discoideum]
  misc_feature (39)..(218): Homolog of NCBI NO: 18410386 NR Description: cyclophilin-like protein
  misc_feature (18)..(218): Homolog of NCBI NO: 15237739 NR Description: cyclophilin ROC7
  misc_feature (18)..(218): Homolog of NCBI NO: 21554007 NR Description: cyclophilin [Arabidopsis thaliana]
  misc_feature (18)..(218): Homolog of NCBI NO: 11270326 NR Description: peptidylprolyl isomerase (EC 5.2.1.8) CYP5
  misc_feature (18)..(218): Homolog of NCBI NO: 15227674 NR Description: cyclophilin

SEQ ID NO: 34410 - protein, 201 aa, Arabidopsis thaliana; identical to SEQ ID NO: 30820
  peptide (1)..(201): Ceres Seq. ID no. 12323509
  misc_feature (34)..(199): Homolog of NCBI NO: 39582840 NR Description: Hypothetical protein CBG18578 [Caenorhabditis
  misc_feature (33)..(199): Homolog of NCBI NO: 1480465 NR Description: cyclophilin Ovcyp-2
  misc_feature (33)..(199): Homolog of NCBI NO: 863016 NR Description: cyclophilin
  misc_feature (33)..(199): Homolog of NCBI NO: 17566266 NR Description: CYcloPhilin family CYP-7 (18.4 kD) (cyp-7)
  misc_feature (3)..(199): Homolog of NCBI NO: 5731960 NR Description: cyclophilin B [Dictyostelium discoideum]
  misc_feature (22)..(201): Homolog of NCBI NO: 18410386 NR Description: cyclophilin-like protein
  misc_feature (1)..(201): Homolog of NCBI NO: 15237739 NR Description: cyclophilin ROC7
  misc_feature (1)..(201): Homolog of NCBI NO: 21554007 NR Description: cyclophilin [Arabidopsis thaliana]
  misc_feature (1)..(201): Homolog of NCBI NO: 11270326 NR Description: peptidylprolyl isomerase (EC 5.2.1.8) CYP5
  misc_feature (1)..(201): Homolog of NCBI NO: 15227674 NR Description: cyclophilin

SEQ ID NO: 34411 - DNA, 954 bp, Arabidopsis thaliana; identical to SEQ ID NO: 30821
  misc_feature (1)..(954): Ceres Seq. ID no. 12357683
  misc_feature: MA Experiment ID: 20000112 Result: Up-regulated in Transcription
  misc_feature: MA Experiment 20000112 PARAMETER Experiment Name: At_42deg_Heat_cDNA_P Parameter: Temperature (deg C) Value: 42 vs. 22
  misc_feature: MA Experiment 20000112 PARAMETER Experiment Name: At_42deg_Heat_cDNA_P Parameter: Timepoint (hr) Value: 2
  misc_feature: MA Experiment 20000112 PARAMETER Experiment Name: At_42deg_Heat_cDNA_P Parameter: Tissue Value: Aerial
  misc_feature: MA Experiment ID: 20000264 Result: Up-regulated in Transcription
  misc_feature: MA Experiment 20000264 PARAMETER Experiment Name: At_Open_Flower_P Parameter: Age (day) Value: 21
  misc_feature: MA Experiment 20000264 PARAMETER Experiment Name: At_Open_Flower_P Parameter: Plant Line Value: WS
  misc_feature: MA Experiment 20000264 PARAMETER Experiment Name: At_Open_Flower_P Parameter: Tissue Value: Open Flower vs. Whole Plant
  misc_feature: MA Experiment ID: 20000286 Result: Up-regulated in Transcription
  misc_feature: MA Experiment 20000286 PARAMETER Experiment Name: At_Open_Flower_P Parameter: Age (day) Value: 21
  misc_feature: MA Experiment 20000286 PARAMETER Experiment Name: At_Open_Flower_P Parameter: Plant Line Value: WS
  misc_feature: MA Experiment 20000286 PARAMETER Experiment Name: At_Open_Flower_P Parameter: Tissue Value: Half Open vs. Whole Plant

SEQ ID NO: 34412 - protein, 279 aa, Arabidopsis thaliana; identical to SEQ ID NO: 30822
  peptide (1)..(279): Ceres Seq. ID no. 12357684
  misc_feature (133)..(197): Pfam Name: AP2 domain Pfam Description: AP2 domain
  misc_feature (130)..(222): Homolog of NCBI NO: 10798644 NR Description: AP2 domain-containing transcription factor
  misc_feature (131)..(195): Homolog of NCBI NO: 2281637 NR Description: AP2 domain containing protein RAP2.6 [Arabidopsis
  misc_feature (67)..(197): Homolog of NCBI NO: 15240379 NR Description: putative protein; protein id: At5g61890.1
  misc_feature (102)..(209): Homolog of NCBI NO: 15226153 NR Description: putative AP2 domain transcription factor; protein
  misc_feature (63)..(196): Homolog of NCBI NO: 38347164 NR Description: OSJNBa0039C07.10 [Oryza sativa (japonica
  misc_feature (131)..(230): Homolog of NCBI NO: 15238232 NR Description: putative protein; protein id: At5g64750.1
  misc_feature (63)..(195): Homolog of NCBI NO: 15218275 NR Description: AP2 domain protein RAP2.6
  misc_feature (105)..(231): Homolog of NCBI NO: 34908616 NR Description: P0677H08.8 [Oryza sativa (japonica
  misc_feature (60)..(279): Homolog of NCBI NO: 15240610 NR Description: putative protein; protein id: At5g50080.1
  misc_feature (60)..(279): Homolog of NCBI NO: 34221731 NR Description: putative AP2 domain transcription factor

SEQ ID NO: 34413 - protein, 220 aa, Arabidopsis thaliana; identical to SEQ ID NO: 30823
  peptide (1)..(220): Ceres Seq. ID no. 12357685
  misc_feature (74)..(138): Pfam Name: AP2 domain Pfam Description: AP2 domain
  misc_feature (71)..(163): Homolog of NCBI NO: 10798644 NR Description: AP2 domain-containing transcription factor
  misc_feature (72)..(136): Homolog of NCBI NO: 2281637 NR Description: AP2 domain containing protein RAP2.6 [Arabidopsis
  misc_feature (8)..(138): Homolog of NCBI NO: 15240379 NR Description: putative protein; protein id: At5g61890.1
  misc_feature (43)..(150): Homolog of NCBI NO: 15226153 NR Description: putative AP2 domain transcription factor; protein
  misc_feature (4)..(137): Homolog of NCBI NO: 38347164 NR Description: OSJNBa0039C07.10 [Oryza sativa (japonica
  misc_feature (72)..(171): Homolog of NCBI NO: 15238232 NR Description: putative protein; protein id: At5g64750.1
  misc_feature (4)..(136): Homolog of NCBI NO: 15218275 NR Description: AP2 domain protein RAP2.6
  misc_feature (46)..(172): Homolog of NCBI NO: 34908616 NR Description: P0677H08.8 [Oryza sativa (japonica
  misc_feature (1)..(220): Homolog of NCBI NO: 15240610 NR Description: putative protein; protein id: At5g50080.1
  misc_feature (1)..(220): Homolog of NCBI NO: 34221731 NR Description: putative AP2 domain transcription factor

SEQ ID NO: 34414 - protein, 217 aa, Arabidopsis thaliana; identical to SEQ ID NO: 30824
  peptide (1)..(217): Ceres Seq. ID no. 12357686
  misc_feature (71)..(135): Pfam Name: AP2 domain Pfam Description: AP2 domain
  misc_feature (68)..(160): Homolog of NCBI NO: 10798644 NR Description: AP2 domain-containing transcription factor
  misc_feature (69)..(133): Homolog of NCBI NO: 2281637 NR Description: AP2 domain containing protein RAP2.6 [Arabidopsis
  misc_feature (5)..(135): Homolog of NCBI NO: 15240379 NR Description: putative protein; protein id: At5g61890.1
  misc_feature (40)..(147): Homolog of NCBI NO: 15226153 NR Description: putative AP2 domain transcription factor; protein
  misc_feature (1)..(134): Homolog of NCBI NO: 38347164 NR Description: OSJNBa0039C07.10 [Oryza sativa (japonica
  misc_feature (69)..(168): Homolog of NCBI NO: 15238232 NR Description: putative protein; protein id: At5g64750.1
  misc_feature (1)..(133): Homolog of NCBI NO: 15218275 NR Description: AP2 domain protein RAP2.6
  misc_feature (43)..(169): Homolog of NCBI NO: 34908616 NR Description: P0677H08.8 [Oryza sativa (japonica
  misc_feature (1)..(217): Homolog of NCBI NO: 15240610 NR Description: putative protein; protein id: At5g50080.1
  misc_feature (1)..(217): Homolog of NCBI NO: 34221731 NR Description: putative AP2 domain transcription factor

SEQ ID NO: 34415 - DNA, 1157 bp, Arabidopsis thaliana; identical to SEQ ID NO: 30825
  misc_feature (1)..(1157): Ceres Seq. ID no. 12423136
  misc_feature: MA Experiment ID: 20000173 Result: Down-regulated in Transcription
  misc_feature: MA Experiment 20000173 PARAMETER Experiment Name: At_42deg_Heat_P Parameter: Age (day) Value: 14
  misc_feature: MA Experiment 20000173 PARAMETER Experiment Name: At_42deg_Heat_P Parameter: Organism Value: A. thaliana
  misc_feature: MA Experiment 20000173 PARAMETER Experiment Name: At_42deg_Heat_P Parameter: Plant Line Value: WS
  misc_feature: MA Experiment 20000173 PARAMETER Experiment Name: At_42deg_Heat_P Parameter: Temperature (deg C) Value: 42 vs. 22
  misc_feature: MA Experiment 20000173 PARAMETER Experiment Name: At_42deg_Heat_P Parameter: Timepoint (hr) Value: 6
  misc_feature: MA Experiment 20000173 PARAMETER Experiment Name: At_42deg_Heat_P Parameter: Tissue Value: Aerial
  misc_feature: MA Experiment ID: 20000179 Result: Down-regulated in Transcription
  misc_feature: MA Experiment 20000179 PARAMETER Experiment Name: At_Germinating_Seeds_P Parameter: Age (hr) Value: 6 vs. 0
  misc_feature: MA Experiment 20000179 PARAMETER Experiment Name: At_Germinating_Seeds_P Parameter: Tissue Value: Germinating Seeds
  misc_feature: MA Experiment ID: 20000185 Result: Up-regulated in Transcription
  misc_feature: MA Experiment 20000185 PARAMETER Experiment Name: At_Roots__P Parameter: Age (day) Value: 7 vs. 21
  misc_feature: MA Experiment 20000185 PARAMETER Experiment Name: At_Roots__P Parameter: Organism Value: A. thaliana
  misc_feature: MA Experiment 20000185 PARAMETER Experiment Name: At_Roots__P Parameter: Tissue Value: Roots vs. Whole Plant
  misc_feature: MA Experiment ID: 20000234 Result: Up-regulated in Transcription
  misc_feature: MA Experiment 20000234 PARAMETER Experiment Name: At_Siliques_P Parameter: Age (day) Value: 21
  misc_feature: MA Experiment 20000234 PARAMETER Experiment Name: At_Siliques_P Parameter: Organism Value: A. thaliana
  misc_feature: MA Experiment 20000234 PARAMETER Experiment Name: At_Siliques_P Parameter: Plant Line Value: WS
  misc_feature: MA Experiment 20000234 PARAMETER Experiment Name: At_Siliques_P Parameter: Tissue Value: Less Than 5mm Siliques vs. Whole Plant
  misc_feature: MA Experiment ID: 20000235 Result: Up-regulated in Transcription
  misc_feature: MA Experiment 20000235 PARAMETER Experiment Name: At_Siliques_P Parameter: Age (day) Value: 21
  misc_feature: MA Experiment 20000235 PARAMETER Experiment Name: At_Siliques_P Parameter: Organism Value: A. thaliana
  misc_feature: MA Experiment 20000235 PARAMETER Experiment Name: At_Siliques_P Parameter: Plant Line Value: WS
  misc_feature: MA Experiment 20000235 PARAMETER Experiment Name: At_Siliques_P Parameter: Tissue Value: 5-10mm Siliques vs. Whole Plant
  misc_feature: MA Experiment ID: 20000264 Result: Up-regulated in Transcription
  misc_feature: MA Experiment 20000264 PARAMETER Experiment Name: At_Open_Flower_P Parameter: Age (day) Value: 21
  misc_feature: MA Experiment 20000264 PARAMETER Experiment Name: At_Open_Flower_P Parameter: Plant Line Value: WS
  misc_feature: MA Experiment 20000264 PARAMETER Experiment Name: At_Open_Flower_P Parameter: Tissue Value: Open Flower vs. Whole Plant
  misc_feature: MA Experiment ID: 20000794 Result: Up-regulated in Transcription
  misc_feature: MA Experiment 20000794 PARAMETER Experiment Name: At_Petals_P Parameter: Age (day) Value: 23-25 days
  misc_feature: MA Experiment 20000794 PARAMETER Experiment Name: At_Petals_P Parameter: Plant Line Value: WS
  misc_feature: MA Experiment 20000794 PARAMETER Experiment Name: At_Petals_P Parameter: Tissue Value: Petals vs. Whole plant

SEQ ID NO: 34416 - protein, 117 aa, Arabidopsis thaliana; identical to SEQ ID NO: 30826
  peptide (1)..(117): Ceres Seq. ID no. 12423137
  misc_feature (1)..(107): Homolog of NCBI NO: 34856025 NR Description: similar to 2310044H10Rik protein [Rattus
  misc_feature (1)..(107): Homolog of NCBI NO: 13543832 NR Description: Unknown (protein for IMAGE:3591916) [Mus musculus]
  misc_feature (1)..(107): Homolog of NCBI NO: 37574074 NR Description: RIKEN cDNA 2310044H10 [Mus musculus]
  misc_feature (1)..(108): Homolog of NCBI NO: 21432049 NR Description: LOC284361 protein [Homo sapiens]
  misc_feature (1)..(107): Homolog of NCBI NO: 38181935 NR Description: Unknown (protein for MGC:76288) [Silurana
  misc_feature (1)..(109): Homolog of NCBI NO: 27503262 NR Description: Unknown (protein for IMAGE:5570892) [Xenopus
  misc_feature (1)..(117): Homolog of NCBI NO: 21594383 NR Description: unknown [Arabidopsis thaliana]
  misc_feature (1)..(117): Homolog of NCBI NO: 18408239 NR Description: expressed protein

SEQ ID NO: 34417 - protein, 110 aa, Arabidopsis thaliana; identical to SEQ ID NO: 30827
  peptide (1)..(110): Ceres Seq. ID no. 12423138
  misc_feature (26)..(66): Homolog of NCBI NO: 21594383 NR Description: unknown [Arabidopsis thaliana]
  misc_feature (26)..(66): Homolog of NCBI NO: 18408239 NR Description: expressed protein

SEQ ID NO: 34418 - protein, 85 aa, Arabidopsis thaliana; identical to SEQ ID NO: 30828
  peptide (1)..(85): Ceres Seq. ID no. 12423139
  misc_feature (1)..(41): Homolog of NCBI NO: 21594383 NR Description: unknown [Arabidopsis thaliana]
  misc_feature (1)..(41): Homolog of NCBI NO: 18408239 NR Description: expressed protein

SEQ ID NO: 34419 - DNA, 636 bp, Arabidopsis thaliana; identical to SEQ ID NO: 30829
  misc_feature (1)..(636): Ceres Seq. ID no. 12325146
  misc_feature: MA Experiment ID: 108434 Result: Down-regulated in Transcription
  misc_feature: MA Experiment 108434 PARAMETER Experiment Name: At_Root_Tips_cDNA_P Parameter: Tissue Value: Root Tips
  misc_feature: MA Experiment ID: 108462 Result: Up-regulated in Transcription
  misc_feature: MA Experiment 108462 PARAMETER Experiment Name: At_Germinating_Seeds_cDNA_P Parameter: Age (day) Value: 2 vs. 0
  misc_feature: MA Experiment 108462 PARAMETER Experiment Name: At_Germinating_Seeds_cDNA_P Parameter: Tissue Value: Germinating Seeds
  misc_feature: MA Experiment ID: 108463 Result: Up-regulated in Transcription
  misc_feature: MA Experiment 108463 PARAMETER Experiment Name: At_Germinating_Seeds_cDNA_P Parameter: Age (day) Value: 3 vs. 0
  misc_feature: MA Experiment 108463 PARAMETER Experiment Name: At_Germinating_Seeds_cDNA_P Parameter: Tissue Value: Germinating Seeds
  misc_feature: MA Experiment ID: 108464 Result: Up-regulated in Transcription
  misc_feature: MA Experiment 108464 PARAMETER Experiment Name: At_Germinating_Seeds_cDNA_P Parameter: Age (day) Value: 4 vs. 0
  misc_feature: MA Experiment 108464 PARAMETER Experiment Name: At_Germinating_Seeds_cDNA_P Parameter: Tissue Value: Germinating Seeds
  misc_feature: MA Experiment ID: 108488 Result: Down-regulated in Transcription
  misc_feature: MA Experiment ID: 108501 Result: Down-regulated in Transcription
  misc_feature: MA Experiment 108501 PARAMETER Experiment Name: At_ap2_floral_buds_cDNA_P Parameter: Plant Line Value: ap2 (Ler.)
  misc_feature: MA Experiment 108501 PARAMETER Experiment Name: At_ap2_floral_buds_cDNA_P Parameter: Tissue Value: Closed Flower
  misc_feature: MA Experiment ID: 108561 Result: Up-regulated in Transcription
  misc_feature: MA Experiment 108561 PARAMETER Experiment Name: At_100uM_ABA_cDNA_P Parameter: Timepoint (hr) Value: 6
  misc_feature: MA Experiment 108561 PARAMETER Experiment Name: At_100uM_ABA_cDNA_P Parameter: Tissue Value: Aerial
  misc_feature: MA Experiment 108561 PARAMETER Experiment Name: At_100uM_ABA_cDNA_P Parameter: Treatment Value: 100uM ABA vs. No Treatment
  misc_feature: MA Experiment ID: 108572 Result: Up-regulated in Transcription
  misc_feature: MA Experiment 108572 PARAMETER Experiment Name: At_Drought_cDNA_P Parameter: Timepoint (hr) Value: 1
  misc_feature: MA Experiment 108572 PARAMETER Experiment Name: At_Drought_cDNA_P Parameter: Tissue Value: Aerial
  misc_feature: MA Experiment 108572 PARAMETER Experiment Name: At_Drought_cDNA_P Parameter: Treatment Value: Drought vs. No Drought
  misc_feature: MA Experiment ID: 108573 Result: Up-regulated in Transcription
  misc_feature: MA Experiment 108573 PARAMETER Experiment Name: At_Drought_cDNA_P Parameter: Timepoint (hr) Value: 6
  misc_feature: MA Experiment 108573 PARAMETER Experiment Name: At_Drought_cDNA_P Parameter: Tissue Value: Aerial
  misc_feature: MA Experiment 108573 PARAMETER Experiment Name: At_Drought_cDNA_P Parameter: Treatment Value: Drought vs. No Drought
  misc_feature: MA Experiment ID: 108579 Result: Down-regulated in Transcription
  misc_feature: MA Experiment 108579 PARAMETER Experiment Name: At_4deg_Cold_cDNA_P Parameter: Temperature (deg C) Value: 4 vs. 22
  misc_feature: MA Experiment 108579 PARAMETER Experiment Name: At_4deg_Cold_cDNA_P Parameter: Timepoint (hr) Value: 6
  misc_feature: MA Experiment 108579 PARAMETER Experiment Name: At_4deg_Cold_cDNA_P Parameter: Tissue Value: Aerial
  misc_feature: MA Experiment ID: 108605 Result: Up-regulated in Transcription
  misc_feature: MA Experiment 108605 PARAMETER Experiment Name: At_100uM_ABA_cDNA_P Parameter: Timepoint (hr) Value: 6
  misc_feature: MA Experiment 108605 PARAMETER Experiment Name: At_100uM_ABA_cDNA_P Parameter: Tissue Value: Aerial
  misc_feature: MA Experiment 108605 PARAMETER Experiment Name: At_100uM_ABA_cDNA_P Parameter: Treatment Value: 100uM ABA vs. No Treatment
  misc_feature: MA Experiment ID: 108607 Result: Up-regulated in Transcription
  misc_feature: MA Experiment 108607 PARAMETER Experiment Name: At_100uM_ABA_cDNA_P Parameter: Timepoint (hr) Value: 4
  misc_feature: MA Experiment 108607 PARAMETER Experiment Name: At_100uM_ABA_cDNA_P Parameter: Tissue Value: Aerial
  misc_feature: MA Experiment 108607 PARAMETER Experiment Name: At_100uM_ABA_cDNA_P Parameter: Treatment Value: 100uM ABA vs. No Treatment
  misc_feature: MA Experiment ID: 108609 Result: Up-regulated in Transcription
  misc_feature: MA Experiment 108609 PARAMETER Experiment Name: At_100uM_ABA_cDNA_P Parameter: Timepoint (hr) Value: 24
  misc_feature: MA Experiment 108609 PARAMETER Experiment Name: At_100uM_ABA_cDNA_P Parameter: Tissue Value: Aerial
  misc_feature: MA Experiment 108609 PARAMETER Experiment Name: At_100uM_ABA_cDNA_P Parameter: Treatment Value: 100uM ABA vs. No Treatment
  misc_feature: MA Experiment ID: 20000069 Result: Up-regulated in Transcription
  misc_feature: MA Experiment 20000069 PARAMETER Experiment Name: At_100uM_ABA_Mutants_cDNA_P Parameter: Plant Line Value: CS23
  misc_feature: MA Experiment 20000069 PARAMETER Experiment Name: At_100uM_ABA_Mutants_cDNA_P Parameter: Timepoint (hr) Value: 6
  misc_feature: MA Experiment 20000069 PARAMETER Experiment Name: At_100uM_ABA_Mutants_cDNA_P Parameter: Tissue Value: Aerial
  misc_feature: MA Experiment 20000069 PARAMETER Experiment Name: At_100uM_ABA_Mutants_cDNA_P Parameter: Treatment Value: 100uM ABA vs. No Treatment
  misc_feature: MA Experiment ID: 20000070 Result: Up-regulated in Transcription
  misc_feature: MA Experiment 20000070 PARAMETER Experiment Name: At_100uM_ABA_Mutants_cDNA_P Parameter: Plant Line Value: CS24
  misc_feature: MA Experiment 20000070 PARAMETER Experiment Name: At_100uM_ABA_Mutants_cDNA_P Parameter: Timepoint (hr) Value: 6
  misc_feature: MA Experiment 20000070 PARAMETER Experiment Name: At_100uM_ABA_Mutants_cDNA_P Parameter: Tissue Value: Aerial
  misc_feature: MA Experiment 20000070 PARAMETER Experiment Name: At_100uM_ABA_Mutants_cDNA_P Parameter: Treatment Value: 100uM ABA vs. No Treatment
  misc_feature: MA Experiment ID: 20000072 Result: Up-regulated in Transcription
  misc_feature: MA Experiment 20000072 PARAMETER Experiment Name: At_100uM_ABA_Mutants_cDNA_P Parameter: Plant Line Value: CS8105
  misc_feature: MA Experiment 20000072 PARAMETER Experiment Name: At_100uM_ABA_Mutants_cDNA_P Parameter: Timepoint (hr) Value: 6
  misc_feature: MA Experiment 20000072 PARAMETER Experiment Name: At_100uM_ABA_Mutants_cDNA_P Parameter: Tissue Value: Aerial
  misc_feature: MA Experiment 20000072 PARAMETER Experiment Name: At_100uM_ABA_Mutants_cDNA_P Parameter: Treatment Value: 100uM ABA vs. No Treatment
  misc_feature: MA Experiment ID: 20000087 Result: Up-regulated in Transcription
  misc_feature: MA Experiment 20000087 PARAMETER Experiment Name: At_100uM_ABA_Mutants_cDNA_P Parameter: Plant Line Value: WS
  misc_feature: MA Experiment 20000087 PARAMETER Experiment Name: At_100uM_ABA_Mutants_cDNA_P Parameter: Timepoint (hr) Value: 6
  misc_feature: MA Experiment 20000087 PARAMETER Experiment Name: At_100uM_ABA_Mutants_cDNA_P Parameter: Tissue Value: Aerial
  misc_feature: MA Experiment 20000087 PARAMETER Experiment Name: At_100uM_ABA_Mutants_cDNA_P Parameter: Treatment Value: 100uM ABA vs. No Treatment
  misc_feature: MA Experiment ID: 20000117 Result: Up-regulated in Transcription
  misc_feature: MA Experiment 20000117 PARAMETER Experiment Name: At_100uM_ABA_Mutants_cDNA_P Parameter: Plant Line Value: Columbia
  misc_feature: MA Experiment 20000117 PARAMETER Experiment Name: At_100uM_ABA_Mutants_cDNA_P Parameter: Timepoint (hr) Value: 6
  misc_feature: MA Experiment 20000117 PARAMETER Experiment Name: At_100uM_ABA_Mutants_cDNA_P Parameter: Tissue Value: Aerial
  misc_feature: MA Experiment 20000117 PARAMETER Experiment Name: At_100uM_ABA_Mutants_cDNA_P Parameter: Treatment Value: 100uM ABA vs. No Treatment
  misc_feature: MA Experiment ID: 20000169 Result: Up-regulated in Transcription
  misc_feature: MA Experiment 20000169 PARAMETER Experiment Name: At_100uM_ABA_P Parameter: Age (day) Value: 14
  misc_feature: MA Experiment 20000169 PARAMETER Experiment Name: At_100uM_ABA_P Parameter: Organism Value: A. thaliana
  misc_feature: MA Experiment 20000169 PARAMETER Experiment Name: At_100uM_ABA_P Parameter: Plant Line Value: WS
  misc_feature: MA Experiment 20000169 PARAMETER Experiment Name: At_100uM_ABA_P Parameter: Timepoint (hr) Value: 6
  misc_feature: MA Experiment 20000169 PARAMETER Experiment Name: At_100uM_ABA_P Parameter: Tissue Value: Aerial
  misc_feature: MA Experiment 20000169 PARAMETER Experiment Name: At_100uM_ABA_P Parameter: Treatment Value: 100uM ABA vs. No Treatment
  misc_feature: MA Experiment ID: 20000437 Result: Up-regulated in Transcription
  misc_feature: MA Experiment 20000437 PARAMETER Experiment Name: At_Drought_P Parameter: Age (day) Value: 8
  misc_feature: MA Experiment 20000437 PARAMETER Experiment Name: At_Drought_P Parameter: Organism Value: A. thaliana
  misc_feature: MA Experiment 20000437 PARAMETER Experiment Name: At_Drought_P Parameter: Plant Line Value: WS
  misc_feature: MA Experiment 20000437 PARAMETER Experiment Name: At_Drought_P Parameter: Timepoint (hr) Value: 24
  misc_feature: MA Experiment 20000437 PARAMETER Experiment Name: At_Drought_P Parameter: Tissue Value: Whole Plant
  misc_feature: MA Experiment 20000437 PARAMETER Experiment Name: At_Drought_P Parameter: Treatment Value: Drought vs. No Drought
  misc_feature: MA Experiment ID: 20000439 Result: Down-regulated in Transcription
  misc_feature: MA Experiment 20000439 PARAMETER Experiment Name: At_Roots__P Parameter: Age (day) Value: 14 vs. 21
  misc_feature: MA Experiment 20000439 PARAMETER Experiment Name: At_Roots__P Parameter: Organism Value: A. thaliana
  misc_feature: MA Experiment 20000439 PARAMETER Experiment Name: At_Roots__P Parameter: Tissue Value: Roots vs. Whole Plant
  misc_feature: MA Experiment ID: 20000794 Result: Up-regulated in Transcription
  misc_feature: MA Experiment 20000794 PARAMETER Experiment Name: At_Petals_P Parameter: Age (day) Value: 23-25 days
  misc_feature: MA Experiment 20000794 PARAMETER Experiment Name: At_Petals_P Parameter: Plant Line Value: WS
  misc_feature: MA Experiment 20000794 PARAMETER Experiment Name: At_Petals_P Parameter: Tissue Value: Petals vs. Whole plant
  misc_feature: MA Experiment ID: 20001557 Result: Down-regulated in Transcription
  misc_feature: MA Experiment 20001557 PARAMETER Experiment Name: At_Drought_Soil_Dry_P Parameter: Age (day) Value: 27
  misc_feature: MA Experiment 20001557 PARAMETER Experiment Name: At_Drought_Soil_Dry_P Parameter: Organism Value: A. thaliana
  misc_feature: MA Experiment 20001557 PARAMETER Experiment Name: At_Drought_Soil_Dry_P Parameter: Plant Line Value: WS
  misc_feature: MA Experiment 20001557 PARAMETER Experiment Name: At_Drought_Soil_Dry_P Parameter: Post Timepoint (hr) Value: 3
  misc_feature: MA Experiment 20001557 PARAMETER Experiment Name: At_Drought_Soil_Dry_P Parameter: Post-Treatment Value: Re-Water vs. No Drought
  misc_feature: MA Experiment 20001557 PARAMETER Experiment Name: At_Drought_Soil_Dry_P Parameter: Timepoint (day) Value: 13
  misc_feature: MA Experiment 20001557 PARAMETER Experiment Name: At_Drought_Soil_Dry_P Parameter: Treatment Value: Drought vs. No Drought
  misc_feature: MA Experiment ID: 20001558 Result: Down-regulated in Transcription
  misc_feature: MA Experiment 20001558 PARAMETER Experiment Name: At_Drought_Soil_Dry_P Parameter: Age (day) Value: 27
  misc_feature: MA Experiment 20001558 PARAMETER Experiment Name: At_Drought_Soil_Dry_P Parameter: Organism Value: A. thaliana
  misc_feature: MA Experiment 20001558 PARAMETER Experiment Name: At_Drought_Soil_Dry_P Parameter: Plant Line Value: WS
  misc_feature: MA Experiment 20001558 PARAMETER Experiment Name: At_Drought_Soil_Dry_P Parameter: Post Timepoint (hr) Value: 6
  misc_feature: MA Experiment 20001558 PARAMETER Experiment Name: At_Drought_Soil_Dry_P Parameter: Post-Treatment Value: Re-Water vs. No Drought
  misc_feature: MA Experiment 20001558 PARAMETER Experiment Name: At_Drought_Soil_Dry_P Parameter: Timepoint (day) Value: 13
  misc_feature: MA Experiment 20001558 PARAMETER Experiment Name: At_Drought_Soil_Dry_P Parameter: Treatment Value: Drought vs. No Drought

SEQ ID NO: 34420 - protein, 160 aa, Arabidopsis thaliana; identical to SEQ ID NO: 30830
  peptide (1)..(160): Ceres Seq. ID no. 12325147
  misc_feature (40)..(160): Homolog of NCBI NO: 21554784 NR Description: unknown [Arabidopsis thaliana]
  misc_feature (40)..(160): Homolog of NCBI NO: 18400450 NR Description: Expressed protein
  misc_feature (23)..(140): Homolog of NCBI NO: 25518134 NR Description: probable 60S ribosomal protein L18A - Arabidopsis
  misc_feature (23)..(159): Homolog of NCBI NO: 21593837 NR Description: 60S ribosomal protein L18A, putative [Arabidopsis
  misc_feature (23)..(159): Homolog of NCBI NO: 18397305 NR Description: 60S ribosomal protein L18A, putative
  misc_feature (8)..(159): Homolog of NCBI NO: 18394436 NR Description: expressed protein
  misc_feature (8)..(160): Homolog of NCBI NO: 21554011 NR Description: unknown [Arabidopsis thaliana]
  misc_feature (8)..(160): Homolog of NCBI NO: 18404524 NR Description: expressed protein

SEQ ID NO: 34421 - protein, 153 aa, Arabidopsis thaliana; identical to SEQ ID NO: 30831
  peptide (1)..(153): Ceres Seq. ID no. 12325148
  misc_feature (33)..(153): Homolog of NCBI NO: 21554784 NR Description: unknown [Arabidopsis thaliana]
  misc_feature (33)..(153): Homolog of NCBI NO: 18400450 NR Description: Expressed protein
  misc_feature (16)..(133): Homolog of NCBI NO: 25518134 NR Description: probable 60S ribosomal protein L18A - Arabidopsis
  misc_feature (16)..(152): Homolog of NCBI NO: 21593837 NR Description: 60S ribosomal protein L18A, putative [Arabidopsis
  misc_feature (16)..(152): Homolog of NCBI NO: 18397305 NR Description: 60S ribosomal protein L18A, putative
  misc_feature (1)..(152): Homolog of NCBI NO: 18394436 NR Description: expressed protein
  misc_feature (1)..(153): Homolog of NCBI NO: 21554011 NR Description: unknown [Arabidopsis thaliana]
  misc_feature (1)..(153): Homolog of NCBI NO: 18404524 NR Description: expressed protein

SEQ ID NO: 34422 - protein, 123 aa, Arabidopsis thaliana; identical to SEQ ID NO: 30832
  peptide (1)..(123): Ceres Seq. ID no. 12325149

SEQ ID NO: 34423 - DNA, 818 bp, Arabidopsis thaliana; identical to SEQ ID NO: 30833
  misc_feature (1)..(818): Ceres Seq. ID no. 12466495
  misc_feature: MA Experiment ID: 108464 Result: Up-regulated in Transcription
  misc_feature: MA Experiment 108464 PARAMETER Experiment Name: At_Germinating_Seeds_cDNA_P Parameter: Age (day) Value: 4 vs. 0
  misc_feature: MA Experiment 108464 PARAMETER Experiment Name: At_Germinating_Seeds_cDNA_P Parameter: Tissue Value: Germinating Seeds
  misc_feature: MA Experiment ID: 108576 Result: Down-regulated in Transcription
  misc_feature: MA Experiment 108576 PARAMETER Experiment Name: At_42deg_Heat_cDNA_P Parameter: Temperature (deg C) Value: 42 vs. 22
  misc_feature: MA Experiment 108576 PARAMETER Experiment Name: At_42deg_Heat_cDNA_P Parameter: Timepoint (hr) Value: 1
  misc_feature: MA Experiment 108576 PARAMETER Experiment Name: At_42deg_Heat_cDNA_P Parameter: Tissue Value: Aerial
  misc_feature: MA Experiment ID: 108595 Result: Up-regulated in Transcription
  misc_feature: MA Experiment 108595 PARAMETER Experiment Name: At_Ler-pi_Ovule_cDNA_P Parameter: Plant Line Value: null
  misc_feature: MA Experiment ID: 20000112 Result: Down-regulated in Transcription
  misc_feature: MA Experiment 20000112 PARAMETER Experiment Name: At_42deg_Heat_cDNA_P Parameter: Temperature (deg C) Value: 42 vs. 22
  misc_feature: MA Experiment 20000112 PARAMETER Experiment Name: At_42deg_Heat_cDNA_P Parameter: Timepoint (hr) Value: 2
  misc_feature: MA Experiment 20000112 PARAMETER Experiment Name: At_42deg_Heat_cDNA_P Parameter: Tissue Value: Aerial
  misc_feature: MA Experiment ID: 20000113 Result: Down-regulated in Transcription
  misc_feature: MA Experiment 20000113 PARAMETER Experiment Name: At_42deg_Heat_cDNA_P Parameter: Temperature (deg C) Value: 42 vs. 22
  misc_feature: MA Experiment 20000113 PARAMETER Experiment Name: At_42deg_Heat_cDNA_P Parameter: Timepoint (hr) Value: 8
  misc_feature: MA Experiment 20000113 PARAMETER Experiment Name: At_42deg_Heat_cDNA_P Parameter: Tissue Value: Aerial
  misc_feature: MA Experiment ID: 20000144 Result: Down-regulated in Transcription
  misc_feature: MA Experiment 20000144 PARAMETER Experiment Name: At_42deg_Heat_cDNA_P Parameter: Temperature (deg C) Value: 42 vs. 22
  misc_feature: MA Experiment 20000144 PARAMETER Experiment Name: At_42deg_Heat_cDNA_P Parameter: Timepoint (hr) Value: 1
  misc_feature: MA Experiment 20000144 PARAMETER Experiment Name: At_42deg_Heat_cDNA_P Parameter: Tissue Value: Aerial
  misc_feature: MA Experiment ID: 20000171 Result: Down-regulated in Transcription
  misc_feature: MA Experiment 20000171 PARAMETER Experiment Name: At_42deg_Heat_P Parameter: Age (day) Value: 14
  misc_feature: MA Experiment 20000171 PARAMETER Experiment Name: At_42deg_Heat_P Parameter: Organism Value: A. thaliana
  misc_feature: MA Experiment 20000171 PARAMETER Experiment Name: At_42deg_Heat_P Parameter: Plant Line Value: WS
  misc_feature: MA Experiment 20000171 PARAMETER Experiment Name: At_42deg_Heat_P Parameter: Temperature (deg C) Value: 42 vs. 22
  misc_feature: MA Experiment 20000171 PARAMETER Experiment Name: At_42deg_Heat_P Parameter: Timepoint (hr) Value: 1
  misc_feature: MA Experiment 20000171 PARAMETER Experiment Name: At_42deg_Heat_P Parameter: Tissue Value: Aerial
  misc_feature: MA Experiment ID: 20000173 Result: Down-regulated in Transcription
  misc_feature: MA Experiment 20000173 PARAMETER Experiment Name: At_42deg_Heat_P Parameter: Age (day) Value: 14
  misc_feature: MA Experiment 20000173 PARAMETER Experiment Name: At_42deg_Heat_P Parameter: Organism Value: A. thaliana
  misc_feature: MA Experiment 20000173 PARAMETER Experiment Name: At_42deg_Heat_P Parameter: Plant Line Value: WS
  misc_feature: MA Experiment 20000173 PARAMETER Experiment Name: At_42deg_Heat_P Parameter: Temperature (deg C) Value: 42 vs. 22
  misc_feature: MA Experiment 20000173 PARAMETER Experiment Name: At_42deg_Heat_P Parameter: Timepoint (hr) Value: 6
  misc_feature: MA Experiment 20000173 PARAMETER Experiment Name: At_42deg_Heat_P Parameter: Tissue Value: Aerial
  misc_feature: MA Experiment ID: 20000180 Result: Up-regulated in Transcription
  misc_feature: MA Experiment 20000180 PARAMETER Experiment Name: At_Germinating_Seeds_P Parameter: Age (hr) Value: 24 vs. 0
  misc_feature: MA Experiment 20000180 PARAMETER Experiment Name: At_Germinating_Seeds_P Parameter: Tissue Value: Germinating Seeds
  misc_feature: MA Experiment ID: 20000184 Result: Up-regulated in Transcription
  misc_feature: MA Experiment 20000184 PARAMETER Experiment Name: At_Shoots__P Parameter: Age (day) Value: 7
  misc_feature: MA Experiment 20000184 PARAMETER Experiment Name: At_Shoots__P Parameter: Tissue Value: Shoots vs. Whole Plant
  misc_feature: MA Experiment ID: 20000437 Result: Down-regulated in Transcription
  misc_feature: MA Experiment 20000437 PARAMETER Experiment Name: At_Drought_P Parameter: Age (day) Value: 8
  misc_feature: MA Experiment 20000437 PARAMETER Experiment Name: At_Drought_P Parameter: Organism Value: A. thaliana
  misc_feature: MA Experiment 20000437 PARAMETER Experiment Name: At_Drought_P Parameter: Plant Line Value: WS
  misc_feature: MA Experiment 20000437 PARAMETER Experiment Name: At_Drought_P Parameter: Timepoint (hr) Value: 24
  misc_feature: MA Experiment 20000437 PARAMETER Experiment Name: At_Drought_P Parameter: Tissue Value: Whole Plant
  misc_feature: MA Experiment 20000437 PARAMETER Experiment Name: At_Drought_P Parameter: Treatment Value: Drought vs. No Drought
  misc_feature: MA Experiment ID: 20000495 Result: Up-regulated in Transcription
  misc_feature: MA Experiment 20000495 PARAMETER Experiment Name: At_Guard_Cells_P Parameter: Harvest Date Value: 8/2/2002
  misc_feature: MA Experiment 20000495 PARAMETER Experiment Name: At_Guard_Cells_P Parameter: Organism Value: A. thaliana
  misc_feature: MA Experiment 20000495 PARAMETER Experiment Name: At_Guard_Cells_P Parameter: Tissue Value: Guard Cells vs. Leaves
  misc_feature: MA Experiment ID: 20000496 Result: Up-regulated in Transcription
  misc_feature: MA Experiment 20000496 PARAMETER Experiment Name: At_Guard_Cells_P Parameter: Harvest Date Value: 7/19/2002
  misc_feature: MA Experiment 20000496 PARAMETER Experiment Name: At_Guard_Cells_P Parameter: Organism Value: Canola
  misc_feature: MA Experiment 20000496 PARAMETER Experiment Name: At_Guard_Cells_P Parameter: Tissue Value: Guard Cells vs. Leaves
  misc_feature: MA Experiment ID: 20000794 Result: Down-regulated in Transcription
  misc_feature: MA Experiment 20000794 PARAMETER Experiment Name: At_Petals_P Parameter: Age (day) Value: 23-25 days
  misc_feature: MA Experiment 20000794 PARAMETER Experiment Name: At_Petals_P Parameter: Plant Line Value: WS
  misc_feature: MA Experiment 20000794 PARAMETER Experiment Name: At_Petals_P Parameter: Tissue Value: Petals vs. Whole plant
  misc_feature: MA Experiment ID: 20001248 Result: Down-regulated in Transcription
  misc_feature: MA Experiment 20001248 PARAMETER Experiment Name: At_Far-red-induction_P Parameter: Age (day) Value: 7
  misc_feature: MA Experiment 20001248 PARAMETER Experiment Name: At_Far-red-induction_P Parameter: Light Value: Far-red vs. White
  misc_feature: MA Experiment 20001248 PARAMETER Experiment Name: At_Far-red-induction_P Parameter: Organism Value: A. thaliana
  misc_feature: MA Experiment 20001248 PARAMETER Experiment Name: At_Far-red-induction_P Parameter: Plant Line Value: Columbia
  misc_feature: MA Experiment 20001248 PARAMETER Experiment Name: At_Far-red-induction_P Parameter: Timepoint (hr) Value: 4
  misc_feature: MA Experiment 20001248 PARAMETER Experiment Name: At_Far-red-induction_P Parameter: Tissue Value: Whole Plant
  misc_feature: MA Experiment ID: 20001555 Result: Down-regulated in Transcription
  misc_feature: MA Experiment 20001555 PARAMETER Experiment Name: At_Drought_Soil_Dry_P Parameter: Age (day) Value: 24
  misc_feature: MA Experiment 20001555 PARAMETER Experiment Name: At_Drought_Soil_Dry_P Parameter: Organism Value: A. thaliana
  misc_feature: MA Experiment 20001555 PARAMETER Experiment Name: At_Drought_Soil_Dry_P Parameter: Plant Line Value: WS
  misc_feature: MA Experiment 20001555 PARAMETER Experiment Name: At_Drought_Soil_Dry_P Parameter: Post Timepoint (hr) Value: None
  misc_feature: MA Experiment 20001555 PARAMETER Experiment Name: At_Drought_Soil_Dry_P Parameter: Post-Treatment Value: None
  misc_feature: MA Experiment 20001555 PARAMETER Experiment Name: At_Drought_Soil_Dry_P Parameter: Timepoint (day) Value: 10
  misc_feature: MA Experiment 20001555 PARAMETER Experiment Name: At_Drought_Soil_Dry_P Parameter: Treatment Value: Drought vs. No Drought
  misc_feature: MA Experiment ID: 20001556 Result: Down-regulated in Transcription
  misc_feature: MA Experiment 20001556 PARAMETER Experiment Name: At_Drought_Soil_Dry_P Parameter: Age (day) Value: 26
  misc_feature: MA Experiment 20001556 PARAMETER Experiment Name: At_Drought_Soil_Dry_P Parameter: Organism Value: A. thaliana
  misc_feature: MA Experiment 20001556 PARAMETER Experiment Name: At_Drought_Soil_Dry_P Parameter: Plant Line Value: WS
  misc_feature: MA Experiment 20001556 PARAMETER Experiment Name: At_Drought_Soil_Dry_P Parameter: Post Timepoint (hr) Value: None
  misc_feature: MA Experiment 20001556 PARAMETER Experiment Name: At_Drought_Soil_Dry_P Parameter: Post-Treatment Value: None
  misc_feature: MA Experiment 20001556 PARAMETER Experiment Name: At_Drought_Soil_Dry_P Parameter: Timepoint (day) Value: 12
  misc_feature: MA Experiment 20001556 PARAMETER Experiment Name: At_Drought_Soil_Dry_P Parameter: Treatment Value: Drought vs. No Drought
  misc_feature: MA Experiment ID: 20001557 Result: Down-regulated in Transcription
  misc_feature: MA Experiment 20001557 PARAMETER Experiment Name: At_Drought_Soil_Dry_P Parameter: Age (day) Value: 27
  misc_feature: MA Experiment 20001557 PARAMETER Experiment Name: At_Drought_Soil_Dry_P Parameter: Organism Value: A. thaliana
  misc_feature: MA Experiment 20001557 PARAMETER Experiment Name: At_Drought_Soil_Dry_P Parameter: Plant Line Value: WS
  misc_feature: MA Experiment 20001557 PARAMETER Experiment Name: At_Drought_Soil_Dry_P Parameter: Post Timepoint (hr) Value: 3
  misc_feature: MA Experiment 20001557 PARAMETER Experiment Name: At_Drought_Soil_Dry_P Parameter: Post-Treatment Value: Re-Water vs. No Drought
  misc_feature: MA Experiment 20001557 PARAMETER Experiment Name: At_Drought_Soil_Dry_P Parameter: Timepoint (day) Value: 13
  misc_feature: MA Experiment 20001557 PARAMETER Experiment Name: At_Drought_Soil_Dry_P Parameter: Treatment Value: Drought vs. No Drought
  misc_feature: MA Experiment ID: 20001558 Result: Down-regulated in Transcription
  misc_feature: MA Experiment 20001558 PARAMETER Experiment Name: At_Drought_Soil_Dry_P Parameter: Age (day) Value: 27
  misc_feature: MA Experiment 20001558 PARAMETER Experiment Name: At_Drought_Soil_Dry_P Parameter: Organism Value: A. thaliana
  misc_feature: MA Experiment 20001558 PARAMETER Experiment Name: At_Drought_Soil_Dry_P Parameter: Plant Line Value: WS
  misc_feature: MA Experiment 20001558 PARAMETER Experiment Name: At_Drought_Soil_Dry_P Parameter: Post Timepoint (hr) Value: 6
  misc_feature: MA Experiment 20001558 PARAMETER Experiment Name: At_Drought_Soil_Dry_P Parameter: Post-Treatment Value: Re-Water vs. No Drought
  misc_feature: MA Experiment 20001558 PARAMETER Experiment Name: At_Drought_Soil_Dry_P Parameter: Timepoint (day) Value: 13
  misc_feature: MA Experiment 20001558 PARAMETER Experiment Name: At_Drought_Soil_Dry_P Parameter: Treatment Value: Drought vs. No Drought
  misc_feature: MA Experiment ID: 20001906 Result: Down-regulated in Transcription
  misc_feature: MA Experiment 20001906 PARAMETER Experiment Name: At_Drought_Reproduction_P Parameter: Age (day) Value: 35
  misc_feature: MA Experiment 20001906 PARAMETER Experiment Name: At_Drought_Reproduction_P Parameter: Organism Value: A. thaliana
  misc_feature: MA Experiment 20001906 PARAMETER Experiment Name: At_Drought_Reproduction_P Parameter: Plant Line Value: WS
  misc_feature: MA Experiment 20001906 PARAMETER Experiment Name: At_Drought_Reproduction_P Parameter: Timepoint (day) Value: 5
  misc_feature: MA Experiment 20001906 PARAMETER Experiment Name: At_Drought_Reproduction_P Parameter: Tissue Value: Siliques
  misc_feature: MA Experiment 20001906 PARAMETER Experiment Name: At_Drought_Reproduction_P Parameter: Treatment Value: Drought vs. No Drought

SEQ ID NO: 34424 - protein, 233 aa, Arabidopsis thaliana; identical to SEQ ID NO: 30834
  peptide (1)..(233): Ceres Seq. ID no. 12466496
  misc_feature (74)..(219): Pfam Name: Cupin Pfam Description: Cupin
  misc_feature (7)..(225): Homolog of NCBI NO: 18202910 NR Description: Germin-like protein subfamily 1 member 11
  misc_feature (9)..(225): Homolog of NCBI NO: 7447333 NR Description: germin protein type 1 - rice
  misc_feature (7)..(225): Homolog of NCBI NO: 38175449 NR Description: putative germin protein type 1
  misc_feature (5)..(225): Homolog of NCBI NO: 25044823 NR Description: germin-like protein [Ananas comosus]
  misc_feature (35)..(218): Homolog of NCBI NO: 29836437 NR Description: putative germin E protein precursor [Gossypium
  misc_feature (7)..(225): Homolog of NCBI NO: 15230587 NR Description: germin-like protein; protein id: At3g05950.1
  misc_feature (7)..(225): Homolog of NCBI NO: 27529869 NR Description: germin-like protein [Barbula unguiculata]
  misc_feature (7)..(233): Homolog of NCBI NO: 7447338 NR Description: probable germin protein type 2 - rice
  misc_feature (18)..(225): Homolog of NCBI NO: 15221902 NR Description: germin, putative
  misc_feature (7)..(233): Homolog of NCBI NO: 15232830 NR Description: germin-like protein

SEQ ID NO: 34425 - protein, 227 aa, Arabidopsis thaliana; identical to SEQ ID NO: 30835
  peptide (1)..(227): Ceres Seq. ID no. 12466497
  misc_feature (68)..(213): Pfam Name: Cupin Pfam Description: Cupin
  misc_feature (1)..(219): Homolog of NCBI NO: 18202910 NR Description: Germin-like protein subfamily 1 member 11
  misc_feature (3)..(219): Homolog of NCBI NO: 7447333 NR Description: germin protein type 1 - rice
  misc_feature (1)..(219): Homolog of NCBI NO: 38175449 NR Description: putative germin protein type 1
  misc_feature (1)..(219): Homolog of NCBI NO: 25044823 NR Description: germin-like protein [Ananas comosus]
  misc_feature (29)..(212): Homolog of NCBI NO: 29836437 NR Description: putative germin E protein precursor [Gossypium
  misc_feature (1)..(219): Homolog of NCBI NO: 15230587 NR Description: germin-like protein; protein id: At3g05950.1
  misc_feature (1)..(219): Homolog of NCBI NO: 27529869 NR Description: germin-like protein [Barbula unguiculata]
  misc_feature (1)..(227): Homolog of NCBI NO: 7447338 NR Description: probable germin protein type 2 - rice
  misc_feature (12)..(219): Homolog of NCBI NO: 15221902 NR Description: germin, putative
  misc_feature (1)..(227): Homolog of NCBI NO: 15232830 NR Description: germin-like protein

SEQ ID NO: 34426 - DNA, 1041 bp, Arabidopsis thaliana; identical to SEQ ID NO: 30836
  misc_feature (1)..(1041): Ceres Seq. ID no. 13490044
  misc_feature: MA Experiment ID: 108434 Result: Up-regulated in Transcription
  misc_feature: MA Experiment 108434 PARAMETER Experiment Name: At_Root_Tips_cDNA_P Parameter: Tissue Value: Root Tips
  misc_feature: MA Experiment ID: 108595 Result: Up-regulated in Transcription
  misc_feature: MA Experiment 108595 PARAMETER Experiment Name: At_Ler-pi_Ovule_cDNA_P Parameter: Plant Line Value: null
  misc_feature: MA Experiment ID: 20000184 Result: Down-regulated in Transcription
  misc_feature: MA Experiment 20000184 PARAMETER Experiment Name: At_Shoots__P Parameter: Age (day) Value: 7
  misc_feature: MA Experiment 20000184 PARAMETER Experiment Name: At_Shoots__P Parameter: Tissue Value: Shoots vs. Whole Plant
  misc_feature: MA Experiment ID: 20001451 Result: Up-regulated in Transcription
  misc_feature: MA Experiment 20001451 PARAMETER Experiment Name: At_Far-red-induction_P Parameter: Age (day) Value: 7
  misc_feature: MA Experiment 20001451 PARAMETER Experiment Name: At_Far-red-induction_P Parameter: Light Value: Far-red vs. White
  misc_feature: MA Experiment 20001451 PARAMETER Experiment Name: At_Far-red-induction_P Parameter: Organism Value: A. thaliana
  misc_feature: MA Experiment 20001451 PARAMETER Experiment Name: At_Far-red-induction_P Parameter: Plant Line Value: Columbia
  misc_feature: MA Experiment 20001451 PARAMETER Experiment Name: At_Far-red-induction_P Parameter: Timepoint (hr) Value: 24
  misc_feature: MA Experiment 20001451 PARAMETER Experiment Name: At_Far-red-induction_P Parameter: Tissue Value: Whole Plant

SEQ ID NO: 34427 - protein, 198 aa, Arabidopsis thaliana; identical to SEQ ID NO: 30837
  peptide (1)..(198): Ceres Seq. ID no. 13490045
  misc_feature (8)..(179): Pfam Name: Ras family Pfam Description: Ras family
  misc_feature (1)..(198): Homolog of NCBI NO: 2117168 NR Description: RAC1 [Lotus japonicus]
  misc_feature (1)..(198): Homolog of NCBI NO: 4097565 NR Description: ATGP3 [Arabidopsis thaliana]
  misc_feature (1)..(198): Homolog of NCBI NO: 4097583 NR Description: NTGP3 [Nicotiana tabacum]
  misc_feature (1)..(198): Homolog of NCBI NO: 6822324 NR Description: small GTP binding protein RACDP [Oryza sativa
  misc_feature (1)..(198): Homolog of NCBI NO: 34421680 NR Description: RAC-like G-protein Rac1 [Gossypium hirsutum]
  misc_feature (1)..(198): Homolog of NCBI NO: 38524283 NR Description: putative RACD protein [Hordeum vulgare subsp.
  misc_feature (1)..(198): Homolog of NCBI NO: 7438393 NR Description: small GTP binding protein, rac-type - turnip
  misc_feature (1)..(198): Homolog of NCBI NO: 1732519 NR Description: Rho1Ps homolog [Arabidopsis thaliana]
  misc_feature (1)..(198): Homolog of NCBI NO: 28393687 NR Description: putative Rho1Ps homolog Rac protein [Arabidopsis
  misc_feature (1)..(198): Homolog of NCBI NO: 15236247 NR Description: Rho1Ps homolog Rac-like protein [Arabidopsis

SEQ ID NO: 34428 - DNA, 784 bp, Arabidopsis thaliana; identical to SEQ ID NO: 30838
  misc_feature (1)..(784): Ceres Seq. ID no. 12332255
  misc_feature: MA Experiment ID: 108434 Result: Down-regulated in Transcription
  misc_feature: MA Experiment 108434 PARAMETER Experiment Name: At_Root_Tips_cDNA_P Parameter: Tissue Value: Root Tips
  misc_feature: MA Experiment ID: 108462 Result: Up-regulated in Transcription
  misc_feature: MA Experiment 108462 PARAMETER Experiment Name: At_Germinating_Seeds_cDNA_P Parameter: Age (day) Value: 2 vs. 0
  misc_feature: MA Experiment 108462 PARAMETER Experiment Name: At_Germinating_Seeds_cDNA_P Parameter: Tissue Value: Germinating Seeds
  misc_feature: MA Experiment ID: 108463 Result: Up-regulated in Transcription
  misc_feature: MA Experiment 108463 PARAMETER Experiment Name: At_Germinating_Seeds_cDNA_P Parameter: Age (day) Value: 3 vs. 0
  misc_feature: MA Experiment 108463 PARAMETER Experiment Name: At_Germinating_Seeds_cDNA_P Parameter: Tissue Value: Germinating Seeds
  misc_feature: MA Experiment ID: 108464 Result: Up-regulated in Transcription
  misc_feature: MA Experiment 108464 PARAMETER Experiment Name: At_Germinating_Seeds_cDNA_P Parameter: Age (day) Value: 4 vs. 0
  misc_feature: MA Experiment 108464 PARAMETER Experiment Name: At_Germinating_Seeds_cDNA_P Parameter: Tissue Value: Germinating Seeds
  misc_feature: MA Experiment ID: 108469 Result: Up-regulated in Transcription
  misc_feature: MA Experiment ID: 108501 Result: Down-regulated in Transcription
  misc_feature: MA Experiment 108501 PARAMETER Experiment Name: At_ap2_floral_buds_cDNA_P Parameter: Plant Line Value: ap2 (Ler.)
  misc_feature: MA Experiment 108501 PARAMETER Experiment Name: At_ap2_floral_buds_cDNA_P Parameter: Tissue Value: Closed Flower
  misc_feature: MA Experiment ID: 108561 Result: Up-regulated in Transcription
  misc_feature: MA Experiment 108561 PARAMETER Experiment Name: At_100uM_ABA_cDNA_P Parameter: Timepoint (hr) Value: 6
  misc_feature: MA Experiment 108561 PARAMETER Experiment Name: At_100uM_ABA_cDNA_P Parameter: Tissue Value: Aerial
  misc_feature: MA Experiment 108561 PARAMETER Experiment Name: At_100uM_ABA_cDNA_P Parameter: Treatment Value: 100uM ABA vs. No Treatment
  misc_feature: MA Experiment ID: 108573 Result: Up-regulated in Transcription
  misc_feature: MA Experiment 108573 PARAMETER Experiment Name: At_Drought_cDNA_P Parameter: Timepoint (hr) Value: 6
  misc_feature: MA Experiment 108573 PARAMETER Experiment Name: At_Drought_cDNA_P Parameter: Tissue Value: Aerial
  misc_feature: MA Experiment 108573 PARAMETER Experiment Name: At_Drought_cDNA_P Parameter: Treatment Value: Drought vs. No Drought
  misc_feature: MA Experiment ID: 108585 Result: Up-regulated in Transcription
  misc_feature: MA Experiment 108585 PARAMETER Experiment Name: At_5mM_NaNP_cDNA_P Parameter: Timepoint (hr) Value: 6
  misc_feature: MA Experiment 108585 PARAMETER Experiment Name: At_5mM_NaNP_cDNA_P Parameter: Tissue Value: Aerial
  misc_feature: MA Experiment 108585 PARAMETER Experiment Name: At_5mM_NaNP_cDNA_P Parameter: Treatment Value: null
  misc_feature: MA Experiment ID: 108605 Result: Up-regulated in Transcription
  misc_feature: MA Experiment 108605 PARAMETER Experiment Name: At_100uM_ABA_cDNA_P Parameter: Timepoint (hr) Value: 6
  misc_feature: MA Experiment 108605 PARAMETER Experiment Name: At_100uM_ABA_cDNA_P Parameter: Tissue Value: Aerial
  misc_feature: MA Experiment 108605 PARAMETER Experiment Name: At_100uM_ABA_cDNA_P Parameter: Treatment Value: 100uM ABA vs. No Treatment
  misc_feature: MA Experiment ID: 108607 Result: Up-regulated in Transcription
  misc_feature: MA Experiment 108607 PARAMETER Experiment Name: At_100uM_ABA_cDNA_P Parameter: Timepoint (hr) Value: 4
  misc_feature: MA Experiment 108607 PARAMETER Experiment Name: At_100uM_ABA_cDNA_P Parameter: Tissue Value: Aerial
  misc_feature: MA Experiment 108607 PARAMETER Experiment Name: At_100uM_ABA_cDNA_P Parameter: Treatment Value: 100uM ABA vs. No Treatment
  misc_feature: MA Experiment ID: 108608 Result: Up-regulated in Transcription
  misc_feature: MA Experiment 108608 PARAMETER Experiment Name: At_100uM_ABA_cDNA_P Parameter: Timepoint (hr) Value: 1
  misc_feature: MA Experiment 108608 PARAMETER Experiment Name: At_100uM_ABA_cDNA_P Parameter: Tissue Value: Aerial
  misc_feature: MA Experiment 108608 PARAMETER Experiment Name: At_100uM_ABA_cDNA_P Parameter: Treatment Value: 100uM ABA vs. No Treatment
  misc_feature: MA Experiment ID: 108668 Result: Up-regulated in Transcription
  misc_feature: MA Experiment 108668 PARAMETER Experiment Name: At_2mM_SA_cDNA_P Parameter: Plant Line Value: WS
  misc_feature: MA Experiment 108668 PARAMETER Experiment Name: At_2mM_SA_cDNA_P Parameter: Timepoint (hr) Value: 6
  misc_feature: MA Experiment 108668 PARAMETER Experiment Name: At_2mM_SA_cDNA_P Parameter: Treatment Value: 2mM SA vs. No Treatment
  misc_feature: MA Experiment ID: 20000069 Result: Up-regulated in Transcription
  misc_feature: MA Experiment 20000069 PARAMETER Experiment Name: At_100uM_ABA_Mutants_cDNA_P Parameter: Plant Line Value: CS23
  misc_feature: MA Experiment 20000069 PARAMETER Experiment Name: At_100uM_ABA_Mutants_cDNA_P Parameter: Timepoint (hr) Value: 6
  misc_feature: MA Experiment 20000069 PARAMETER Experiment Name: At_100uM_ABA_Mutants_cDNA_P Parameter: Tissue Value: Aerial
  misc_feature: MA Experiment 20000069 PARAMETER Experiment Name: At_100uM_ABA_Mutants_cDNA_P Parameter: Treatment Value: 100uM ABA vs. No Treatment
  misc_feature: MA Experiment ID: 20000070 Result: Up-regulated in Transcription
  misc_feature: MA Experiment 20000070 PARAMETER Experiment Name: At_100uM_ABA_Mutants_cDNA_P Parameter: Plant Line Value: CS24
  misc_feature: MA Experiment 20000070 PARAMETER Experiment Name: At_100uM_ABA_Mutants_cDNA_P Parameter: Timepoint (hr) Value: 6
  misc_feature: MA Experiment 20000070 PARAMETER Experiment Name: At_100uM_ABA_Mutants_cDNA_P Parameter: Tissue Value: Aerial
  misc_feature: MA Experiment 20000070 PARAMETER Experiment Name: At_100uM_ABA_Mutants_cDNA_P Parameter: Treatment Value: 100uM ABA vs. No Treatment
  misc_feature: MA Experiment ID: 20000071 Result: Up-regulated in Transcription
  misc_feature: MA Experiment 20000071 PARAMETER Experiment Name: At_100uM_ABA_Mutants_cDNA_P Parameter: Plant Line Value: CS8104
  misc_feature: MA Experiment 20000071 PARAMETER Experiment Name: At_100uM_ABA_Mutants_cDNA_P Parameter: Timepoint (hr) Value: 6
  misc_feature: MA Experiment 20000071 PARAMETER Experiment Name: At_100uM_ABA_Mutants_cDNA_P Parameter: Tissue Value: Aerial
  misc_feature: MA Experiment 20000071 PARAMETER Experiment Name: At_100uM_ABA_Mutants_cDNA_P Parameter: Treatment Value: 100uM ABA vs. No Treatment
  misc_feature: MA Experiment ID: 20000072 Result: Up-regulated in Transcription
  misc_feature: MA Experiment 20000072 PARAMETER Experiment Name: At_100uM_ABA_Mutants_cDNA_P Parameter: Plant Line Value: CS8105
  misc_feature: MA Experiment 20000072 PARAMETER Experiment Name: At_100uM_ABA_Mutants_cDNA_P Parameter: Timepoint (hr) Value: 6
  misc_feature: MA Experiment 20000072 PARAMETER Experiment Name: At_100uM_ABA_Mutants_cDNA_P Parameter: Tissue Value: Aerial
  misc_feature: MA Experiment 20000072 PARAMETER Experiment Name: At_100uM_ABA_Mutants_cDNA_P Parameter: Treatment Value: 100uM ABA vs. No Treatment
  misc_feature: MA Experiment ID: 20000086 Result: Up-regulated in Transcription
  misc_feature: MA Experiment 20000086 PARAMETER Experiment Name: At_100uM_ABA_Mutants_cDNA_P Parameter: Plant Line Value: CS22
  misc_feature: MA Experiment 20000086 PARAMETER Experiment Name: At_100uM_ABA_Mutants_cDNA_P Parameter: Timepoint (hr) Value: 6
  misc_feature: MA Experiment 20000086 PARAMETER Experiment Name: At_100uM_ABA_Mutants_cDNA_P Parameter: Tissue Value: Aerial
  misc_feature: MA Experiment 20000086 PARAMETER Experiment Name: At_100uM_ABA_Mutants_cDNA_P Parameter: Treatment Value: 100uM ABA vs. No Treatment
  misc_feature: MA Experiment ID: 20000087 Result: Up-regulated in Transcription
  misc_feature: MA Experiment 20000087 PARAMETER Experiment Name: At_100uM_ABA_Mutants_cDNA_P Parameter: Plant Line Value: WS
  misc_feature: MA Experiment 20000087 PARAMETER Experiment Name: At_100uM_ABA_Mutants_cDNA_P Parameter: Timepoint (hr) Value: 6
  misc_feature: MA Experiment 20000087 PARAMETER Experiment Name: At_100uM_ABA_Mutants_cDNA_P Parameter: Tissue Value: Aerial
  misc_feature: MA Experiment 20000087 PARAMETER Experiment Name: At_100uM_ABA_Mutants_cDNA_P Parameter: Treatment Value: 100uM ABA vs. No Treatment
  misc_feature: MA Experiment ID: 20000088 Result: Up-regulated in Transcription
  misc_feature: MA Experiment 20000088 PARAMETER Experiment Name: At_100uM_ABA_Mutants_cDNA_P Parameter: Plant Line Value: Landsberg
  misc_feature: MA Experiment 20000088 PARAMETER Experiment Name: At_100uM_ABA_Mutants_cDNA_P Parameter: Timepoint (hr) Value: 6
  misc_feature: MA Experiment 20000088 PARAMETER Experiment Name: At_100uM_ABA_Mutants_cDNA_P Parameter: Tissue Value: Aerial
  misc_feature: MA Experiment 20000088 PARAMETER Experiment Name: At_100uM_ABA_Mutants_cDNA_P Parameter: Treatment Value: 100uM ABA vs. No Treatment
  misc_feature: MA Experiment ID: 20000090 Result: Up-regulated in Transcription
  misc_feature: MA Experiment ID: 20000111 Result: Down-regulated in Transcription
  misc_feature: MA Experiment 20000111 PARAMETER Experiment Name: At_42deg_Heat_cDNA_P Parameter: Temperature (deg C) Value: 42 vs. 22
  misc_feature: MA Experiment 20000111 PARAMETER Experiment Name: At_42deg_Heat_cDNA_P Parameter: Timepoint (hr) Value: 6
  misc_feature: MA Experiment 20000111 PARAMETER Experiment Name: At_42deg_Heat_cDNA_P Parameter: Tissue Value: Aerial
  misc_feature: MA Experiment ID: 20000113 Result: Down-regulated in Transcription
  misc_feature: MA Experiment 20000113 PARAMETER Experiment Name: At_42deg_Heat_cDNA_P Parameter: Temperature (deg C) Value: 42 vs. 22
  misc_feature: MA Experiment 20000113 PARAMETER Experiment Name: At_42deg_Heat_cDNA_P Parameter: Timepoint (hr) Value: 8
  misc_feature: MA Experiment 20000113 PARAMETER Experiment Name: At_42deg_Heat_cDNA_P Parameter: Tissue Value: Aerial
  misc_feature: MA Experiment ID: 20000117 Result: Up-regulated in Transcription
  misc_feature: MA Experiment 20000117 PARAMETER Experiment Name: At_100uM_ABA_Mutants_cDNA_P Parameter: Plant Line Value: Columbia
  misc_feature: MA Experiment 20000117 PARAMETER Experiment Name: At_100uM_ABA_Mutants_cDNA_P Parameter: Timepoint (hr) Value: 6
  misc_feature: MA Experiment 20000117 PARAMETER Experiment Name: At_100uM_ABA_Mutants_cDNA_P Parameter: Tissue Value: Aerial
  misc_feature: MA Experiment 20000117 PARAMETER Experiment Name: At_100uM_ABA_Mutants_cDNA_P Parameter: Treatment Value: 100uM ABA vs. No Treatment
  misc_feature: MA Experiment ID: 20000144 Result: Down-regulated in Transcription
  misc_feature: MA Experiment 20000144 PARAMETER Experiment Name: At_42deg_Heat_cDNA_P Parameter: Temperature (deg C) Value: 42 vs. 22
  misc_feature: MA Experiment 20000144 PARAMETER Experiment Name: At_42deg_Heat_cDNA_P Parameter: Timepoint (hr) Value: 1
  misc_feature: MA Experiment 20000144 PARAMETER Experiment Name: At_42deg_Heat_cDNA_P Parameter: Tissue Value: Aerial
  misc_feature: MA Experiment ID: 20000166 Result: Up-regulated in Transcription
  misc_feature: MA Experiment 20000166 PARAMETER Experiment Name: At_100uM_ABA_P Parameter: Age (day) Value: 14
  misc_feature: MA Experiment 20000166 PARAMETER Experiment Name: At_100uM_ABA_P Parameter: Organism Value: A. thaliana
  misc_feature: MA Experiment 20000166 PARAMETER Experiment Name: At_100uM_ABA_P Parameter: Plant Line Value: WS
  misc_feature: MA Experiment 20000166 PARAMETER Experiment Name: At_100uM_ABA_P Parameter: Timepoint (hr) Value: 1
  misc_feature: MA Experiment 20000166 PARAMETER Experiment Name: At_100uM_ABA_P Parameter: Tissue Value: Aerial
  misc_feature: MA Experiment 20000166 PARAMETER Experiment Name: At_100uM_ABA_P Parameter: Treatment Value: 100uM ABA vs. No Treatment
  misc_feature: MA Experiment ID: 20000169 Result: Up-regulated in Transcription
  misc_feature: MA Experiment 20000169 PARAMETER Experiment Name: At_100uM_ABA_P Parameter: Age (day) Value: 14
  misc_feature: MA Experiment 20000169 PARAMETER Experiment Name: At_100uM_ABA_P Parameter: Organism Value: A. thaliana
  misc_feature: MA Experiment 20000169 PARAMETER Experiment Name: At_100uM_ABA_P Parameter: Plant Line Value: WS
  misc_feature: MA Experiment 20000169 PARAMETER Experiment Name: At_100uM_ABA_P Parameter: Timepoint (hr) Value: 6
  misc_feature: MA Experiment 20000169 PARAMETER Experiment Name: At_100uM_ABA_P Parameter: Tissue Value: Aerial
  misc_feature: MA Experiment 20000169 PARAMETER Experiment Name: At_100uM_ABA_P Parameter: Treatment Value: 100uM ABA vs. No Treatment
  misc_feature: MA Experiment ID: 20000171 Result: Down-regulated in Transcription
  misc_feature: MA Experiment 20000171 PARAMETER Experiment Name: At_42deg_Heat_P Parameter: Age (day) Value: 14
  misc_feature: MA Experiment 20000171 PARAMETER Experiment Name: At_42deg_Heat_P Parameter: Organism Value: A. thaliana
  misc_feature: MA Experiment 20000171 PARAMETER Experiment Name: At_42deg_Heat_P Parameter: Plant Line Value: WS
  misc_feature: MA Experiment 20000171 PARAMETER Experiment Name: At_42deg_Heat_P Parameter: Temperature (deg C) Value: 42 vs. 22
  misc_feature: MA Experiment 20000171 PARAMETER Experiment Name: At_42deg_Heat_P Parameter: Timepoint (hr) Value: 1
  misc_feature: MA Experiment 20000171 PARAMETER Experiment Name: At_42deg_Heat_P Parameter: Tissue Value: Aerial
  misc_feature: MA Experiment ID: 20000173 Result: Down-regulated in Transcription
  misc_feature: MA Experiment 20000173 PARAMETER Experiment Name: At_42deg_Heat_P Parameter: Age (day) Value: 14
  misc_feature: MA Experiment 20000173 PARAMETER Experiment Name: At_42deg_Heat_P Parameter: Organism Value: A. thaliana
  misc_feature: MA Experiment 20000173 PARAMETER Experiment Name: At_42deg_Heat_P Parameter: Plant Line Value: WS
  misc_feature: MA Experiment 20000173 PARAMETER Experiment Name: At_42deg_Heat_P Parameter: Temperature (deg C) Value: 42 vs. 22
  misc_feature: MA Experiment 20000173 PARAMETER Experiment Name: At_42deg_Heat_P Parameter: Timepoint (hr) Value: 6
  misc_feature: MA Experiment 20000173 PARAMETER Experiment Name: At_42deg_Heat_P Parameter: Tissue Value: Aerial
  misc_feature: MA Experiment ID: 20000182 Result: Up-regulated in Transcription
  misc_feature: MA Experiment 20000182 PARAMETER Experiment Name: At_2mM_SA_P Parameter: Age (day) Value: 14
  misc_feature: MA Experiment 20000182 PARAMETER Experiment Name: At_2mM_SA_P Parameter: Organism Value: A. thaliana
  misc_feature: MA Experiment 20000182 PARAMETER Experiment Name: At_2mM_SA_P Parameter: Plant Line Value: WS
  misc_feature: MA Experiment 20000182 PARAMETER Experiment Name: At_2mM_SA_P Parameter: Timepoint (hr) Value: 6
  misc_feature: MA Experiment 20000182 PARAMETER Experiment Name: At_2mM_SA_P Parameter: Tissue Value: Aerial
  misc_feature: MA Experiment 20000182 PARAMETER Experiment Name: At_2mM_SA_P Parameter: Treatment Value: 2mM SA vs. No Treatment
  misc_feature: MA Experiment ID: 20000185 Result: Up-regulated in Transcription
  misc_feature: MA Experiment 20000185 PARAMETER Experiment Name: At_Roots__P Parameter: Age (day) Value: 7 vs. 21
  misc_feature: MA Experiment 20000185 PARAMETER Experiment Name: At_Roots__P Parameter: Organism Value: A. thaliana
  misc_feature: MA Experiment 20000185 PARAMETER Experiment Name: At_Roots__P Parameter: Tissue Value: Roots vs. Whole Plant
  misc_feature: MA Experiment ID: 20000234 Result: Down-regulated in Transcription
  misc_feature: MA Experiment 20000234 PARAMETER Experiment Name: At_Siliques_P Parameter: Age (day) Value: 21
  misc_feature: MA Experiment 20000234 PARAMETER Experiment Name: At_Siliques_P Parameter: Organism Value: A. thaliana
  misc_feature: MA Experiment 20000234 PARAMETER Experiment Name: At_Siliques_P Parameter: Plant Line Value: WS
  misc_feature: MA Experiment 20000234 PARAMETER Experiment Name: At_Siliques_P Parameter: Tissue Value: Less Than 5mm Siliques vs. Whole Plant
  misc_feature: MA Experiment ID: 20000235 Result: Down-regulated in Transcription
  misc_feature: MA Experiment 20000235 PARAMETER Experiment Name: At_Siliques_P Parameter: Age (day) Value: 21
  misc_feature: MA Experiment 20000235 PARAMETER Experiment Name: At_Siliques_P Parameter: Organism Value: A. thaliana
  misc_feature: MA Experiment 20000235 PARAMETER Experiment Name: At_Siliques_P Parameter: Plant Line Value: WS
  misc_feature: MA Experiment 20000235 PARAMETER Experiment Name: At_Siliques_P Parameter: Tissue Value: 5-10mm Siliques vs. Whole Plant
  misc_feature: MA Experiment ID: 20000264 Result: Down-regulated in Transcription
  misc_feature: MA Experiment 20000264 PARAMETER Experiment Name: At_Open_Flower_P Parameter: Age (day) Value: 21
  misc_feature: MA Experiment 20000264 PARAMETER Experiment Name: At_Open_Flower_P Parameter: Plant Line Value: WS
  misc_feature: MA Experiment 20000264 PARAMETER Experiment Name: At_Open_Flower_P Parameter: Tissue Value: Open Flower vs. Whole Plant
  misc_feature: MA Experiment ID: 20000265 Result: Down-regulated in Transcription
  misc_feature: MA Experiment 20000265 PARAMETER Experiment Name: At_Open_Flower_P Parameter: Age (day) Value: 21
  misc_feature: MA Experiment 20000265 PARAMETER Experiment Name: At_Open_Flower_P Parameter: Plant Line Value: WS
  misc_feature: MA Experiment 20000265 PARAMETER Experiment Name: At_Open_Flower_P Parameter: Tissue Value: Closed Flower vs. Whole Plant
  misc_feature: MA Experiment ID: 20000267 Result: Up-regulated in Transcription
  misc_feature: MA Experiment 20000267 PARAMETER Experiment Name: At_Drought_P Parameter: Age (day) Value: 7
  misc_feature: MA Experiment 20000267 PARAMETER Experiment Name: At_Drought_P Parameter: Organism Value: A. thaliana
  misc_feature: MA Experiment 20000267 PARAMETER Experiment Name: At_Drought_P Parameter: Plant Line Value: WS
  misc_feature: MA Experiment 20000267 PARAMETER Experiment Name: At_Drought_P Parameter: Timepoint (hr) Value: 6
  misc_feature: MA Experiment 20000267 PARAMETER Experiment Name: At_Drought_P Parameter: Tissue Value: Whole Plant
  misc_feature: MA Experiment 20000267 PARAMETER Experiment Name: At_Drought_P Parameter: Treatment Value: Drought vs. No Drought
  misc_feature: MA Experiment ID: 20000286 Result: Down-regulated in Transcription
  misc_feature: MA Experiment 20000286 PARAMETER Experiment Name: At_Open_Flower_P Parameter: Age (day) Value: 21
  misc_feature: MA Experiment 20000286 PARAMETER Experiment Name: At_Open_Flower_P Parameter: Plant Line Value: WS
  misc_feature: MA Experiment 20000286 PARAMETER Experiment Name: At_Open_Flower_P Parameter: Tissue Value: Half Open vs. Whole Plant
  misc_feature: MA Experiment ID: 20000436 Result: Up-regulated in Transcription
  misc_feature: MA Experiment 20000436 PARAMETER Experiment Name: At_Drought_P Parameter: Age (day) Value: 7
  misc_feature: MA Experiment 20000436 PARAMETER Experiment Name: At_Drought_P Parameter: Organism Value: A. thaliana
  misc_feature: MA Experiment 20000436 PARAMETER Experiment Name: At_Drought_P Parameter: Plant Line Value: WS
  misc_feature: MA Experiment 20000436 PARAMETER Experiment Name: At_Drought_P Parameter: Timepoint (hr) Value: 12
  misc_feature: MA Experiment 20000436 PARAMETER Experiment Name: At_Drought_P Parameter: Tissue Value: Whole Plant
  misc_feature: MA Experiment 20000436 PARAMETER Experiment Name: At_Drought_P Parameter: Treatment Value: Drought vs. No Drought
  misc_feature: MA Experiment ID: 20000438 Result: Down-regulated in Transcription
  misc_feature: MA Experiment 20000438 PARAMETER Experiment Name: At_Shoots__P Parameter: Age (day) Value: 14
  misc_feature: MA Experiment 20000438 PARAMETER Experiment Name: At_Shoots__P Parameter: Tissue Value: Shoots vs. Whole Plant
  misc_feature: MA Experiment ID: 20000439 Result: Up-regulated in Transcription
  misc_feature: MA Experiment 20000439 PARAMETER Experiment Name: At_Roots__P Parameter: Age (day) Value: 14 vs. 21
  misc_feature: MA Experiment 20000439 PARAMETER Experiment Name: At_Roots__P Parameter: Organism Value: A. thaliana
  misc_feature: MA Experiment 20000439 PARAMETER Experiment Name: At_Roots__P Parameter: Tissue Value: Roots vs. Whole Plant
  misc_feature: MA Experiment ID: 20000453 Result: Up-regulated in Transcription
  misc_feature: MA Experiment 20000453 PARAMETER Experiment Name: At_100uM_ABA_P Parameter: Age (day) Value: 15
  misc_feature: MA Experiment 20000453 PARAMETER Experiment Name: At_100uM_ABA_P Parameter: Organism Value: A. thaliana
  misc_feature: MA Experiment 20000453 PARAMETER Experiment Name: At_100uM_ABA_P Parameter: Plant Line Value: WS
  misc_feature: MA Experiment 20000453 PARAMETER Experiment Name: At_100uM_ABA_P Parameter: Timepoint (hr) Value: 24
  misc_feature: MA Experiment 20000453 PARAMETER Experiment Name: At_100uM_ABA_P Parameter: Tissue Value: Aerial
  misc_feature: MA Experiment 20000453 PARAMETER Experiment Name: At_100uM_ABA_P Parameter: Treatment Value: 100uM ABA vs. No Treatment
  misc_feature: MA Experiment ID: 20000455 Result: Up-regulated in Transcription
  misc_feature: MA Experiment 20000455 PARAMETER Experiment Name: At_100uM_ABA_P Parameter: Age (day) Value: 16
  misc_feature: MA Experiment 20000455 PARAMETER Experiment Name: At_100uM_ABA_P Parameter: Organism Value: A. thaliana
  misc_feature: MA Experiment 20000455 PARAMETER Experiment Name: At_100uM_ABA_P Parameter: Plant Line Value: WS
  misc_feature: MA Experiment 20000455 PARAMETER Experiment Name: At_100uM_ABA_P Parameter: Timepoint (hr) Value: 48
  misc_feature: MA Experiment 20000455 PARAMETER Experiment Name: At_100uM_ABA_P Parameter: Tissue Value: Aerial
  misc_feature: MA Experiment 20000455 PARAMETER Experiment Name: At_100uM_ABA_P Parameter: Treatment Value: 100uM ABA vs. No Treatment
  misc_feature: MA Experiment ID: 20000506 Result: Up-regulated in Transcription
  misc_feature: MA Experiment 20000506 PARAMETER Experiment Name: At_Wounding_P Parameter: Organism Value: A. thaliana
  misc_feature: MA Experiment 20000506 PARAMETER Experiment Name: At_Wounding_P Parameter: Plant Line Value: WS
  misc_feature: MA Experiment 20000506 PARAMETER Experiment Name: At_Wounding_P Parameter: Timepoint (hr) Value: 6
  misc_feature: MA Experiment 20000506 PARAMETER Experiment Name: At_Wounding_P Parameter: Tissue Value: Aerial
  misc_feature: MA Experiment 20000506 PARAMETER Experiment Name: At_Wounding_P Parameter: Treatment Value: Wounding vs. No Wounding
  misc_feature: MA Experiment ID: 20000527 Result: Down-regulated in Transcription
  misc_feature: MA Experiment 20000527 PARAMETER Experiment Name: At_10percent_PEG_P Parameter: Age (day) Value: 20
  misc_feature: MA Experiment 20000527 PARAMETER Experiment Name: At_10percent_PEG_P Parameter: Organism Value: A. thaliana
  misc_feature: MA Experiment 20000527 PARAMETER Experiment Name: At_10percent_PEG_P Parameter: Plant Line Value: WS
  misc_feature: MA Experiment 20000527 PARAMETER Experiment Name: At_10percent_PEG_P Parameter: Timepoint (day) Value: 20
  misc_feature: MA Experiment 20000527 PARAMETER Experiment Name: At_10percent_PEG_P Parameter: Tissue Value: Whole Plant
  misc_feature: MA Experiment 20000527 PARAMETER Experiment Name: At_10percent_PEG_P Parameter: Treatment Value: 10percent PEG vs. No Treatment
  misc_feature: MA Experiment ID: 20000709 Result: Down-regulated in Transcription
  misc_feature: MA Experiment 20000709 PARAMETER Experiment Name: At_15mM_NH4NO3_L-to-H_P Parameter: Age (hr) Value: 14
  misc_feature: MA Experiment 20000709 PARAMETER Experiment Name: At_15mM_NH4NO3_L-to-H_P Parameter: Organism Value: A. thaliana
  misc_feature: MA Experiment 20000709 PARAMETER Experiment Name: At_15mM_NH4NO3_L-to-H_P Parameter: Plant Line Value: WS
  misc_feature: MA Experiment 20000709 PARAMETER Experiment Name: At_15mM_NH4NO3_L-to-H_P Parameter: Timepoint (hr) Value: 4
  misc_feature: MA Experiment 20000709 PARAMETER Experiment Name: At_15mM_NH4NO3_L-to-H_P Parameter: Tissue Value: Aerial
  misc_feature: MA Experiment 20000709 PARAMETER Experiment Name: At_15mM_NH4NO3_L-to-H_P Parameter: Treatment Value: 15mM NH4NO3 vs. 30mM Mannitol
  misc_feature: MA Experiment ID: 20000794 Result: Down-regulated in Transcription
  misc_feature: MA Experiment 20000794 PARAMETER Experiment Name: At_Petals_P Parameter: Age (day) Value: 23-25 days
  misc_feature: MA Experiment 20000794 PARAMETER Experiment Name: At_Petals_P Parameter: Plant Line Value: WS
  misc_feature: MA Experiment 20000794 PARAMETER Experiment Name: At_Petals_P Parameter: Tissue Value: Petals vs. Whole plant
  misc_feature: MA Experiment ID: 20001450 Result: Down-regulated in Transcription
  misc_feature: MA Experiment 20001450 PARAMETER Experiment Name: At_Far-red-induction_P Parameter: Age (day) Value: 7
  misc_feature: MA Experiment 20001450 PARAMETER Experiment Name: At_Far-red-induction_P Parameter: Light Value: Far-red vs. White
  misc_feature: MA Experiment 20001450 PARAMETER Experiment Name: At_Far-red-induction_P Parameter: Organism Value: A. thaliana
  misc_feature: MA Experiment 20001450 PARAMETER Experiment Name: At_Far-red-induction_P Parameter: Plant Line Value: Columbia
  misc_feature: MA Experiment 20001450 PARAMETER Experiment Name: At_Far-red-induction_P Parameter: Timepoint (hr) Value: 8
  misc_feature: MA Experiment 20001450 PARAMETER Experiment Name: At_Far-red-induction_P Parameter: Tissue Value: Whole Plant
  misc_feature: MA Experiment ID: 20001554 Result: Up-regulated in Transcription
  misc_feature: MA Experiment 20001554 PARAMETER Experiment Name: At_Drought_Soil_Dry_P Parameter: Age (day) Value: 21
  misc_feature: MA Experiment 20001554 PARAMETER Experiment Name: At_Drought_Soil_Dry_P Parameter: Organism Value: A. thaliana
  misc_feature: MA Experiment 20001554 PARAMETER Experiment Name: At_Drought_Soil_Dry_P Parameter: Plant Line Value: WS
  misc_feature: MA Experiment 20001554 PARAMETER Experiment Name: At_Drought_Soil_Dry_P Parameter: Post Timepoint (hr) Value: None
  misc_feature: MA Experiment 20001554 PARAMETER Experiment Name: At_Drought_Soil_Dry_P Parameter: Post-Treatment Value: None
  misc_feature: MA Experiment 20001554 PARAMETER Experiment Name: At_Drought_Soil_Dry_P Parameter: Timepoint (day) Value: 7
  misc_feature: MA Experiment 20001554 PARAMETER Experiment Name: At_Drought_Soil_Dry_P Parameter: Treatment Value: Drought vs. No Drought
  misc_feature: MA Experiment ID: 20001761 Result: Down-regulated in Transcription
  misc_feature: MA Experiment 20001761 PARAMETER Experiment Name: At_50mM_NH4NO3_L-to-H_P Parameter: Timepoint (hr) Value: 4
  misc_feature: MA Experiment 20001761 PARAMETER Experiment Name: At_50mM_NH4NO3_L-to-H_P Parameter: Tissue Value: Siliques
  misc_feature: MA Experiment 20001761 PARAMETER Experiment Name: At_50mM_NH4NO3_L-to-H_P Parameter: Treatment Value: 50mM NH4NO3 vs 100mM Mannitol
  misc_feature: MA Experiment ID: 20001773 Result: Down-regulated in Transcription
  misc_feature: MA Experiment 20001773 PARAMETER Experiment Name: At_Far-red-enriched-adult_P Parameter: Age (day) Value: 30
  misc_feature: MA Experiment 20001773 PARAMETER Experiment Name: At_Far-red-enriched-adult_P Parameter: Light Value: Far-red enriched vs. White
  misc_feature: MA Experiment 20001773 PARAMETER Experiment Name: At_Far-red-enriched-adult_P Parameter: Organism Value: A. thaliana
  misc_feature: MA Experiment 20001773 PARAMETER Experiment Name: At_Far-red-enriched-adult_P Parameter: Plant Line Value: Columbia
  misc_feature: MA Experiment 20001773 PARAMETER Experiment Name: At_Far-red-enriched-adult_P Parameter: Timepoint (hr) Value: 48
  misc_feature: MA Experiment 20001773 PARAMETER Experiment Name: At_Far-red-enriched-adult_P Parameter: Tissue Value: Aerial
  misc_feature: MA Experiment ID: 20001904 Result: Up-regulated in Transcription
  misc_feature: MA Experiment 20001904 PARAMETER Experiment Name: At_Drought_Reproduction_P Parameter: Age (day) Value: 37
  misc_feature: MA Experiment 20001904 PARAMETER Experiment Name: At_Drought_Reproduction_P Parameter: Organism Value: A. thaliana
  misc_feature: MA Experiment 20001904 PARAMETER Experiment Name: At_Drought_Reproduction_P Parameter: Plant Line Value: WS
  misc_feature: MA Experiment 20001904 PARAMETER Experiment Name: At_Drought_Reproduction_P Parameter: Timepoint (day) Value: 7
  misc_feature: MA Experiment 20001904 PARAMETER Experiment Name: At_Drought_Reproduction_P Parameter: Tissue Value: Rosettes
  misc_feature: MA Experiment 20001904 PARAMETER Experiment Name: At_Drought_Reproduction_P Parameter: Treatment Value: Drought vs. No Drought
  misc_feature: MA Experiment ID: 20001905 Result: Up-regulated in Transcription
  misc_feature: MA Experiment 20001905 PARAMETER Experiment Name: At_Drought_Reproduction_P Parameter: Age (day) Value: 40
  misc_feature: MA Experiment 20001905 PARAMETER Experiment Name: At_Drought_Reproduction_P Parameter: Organism Value: A. thaliana
  misc_feature: MA Experiment 20001905 PARAMETER Experiment Name: At_Drought_Reproduction_P Parameter: Plant Line Value: WS
  misc_feature: MA Experiment 20001905 PARAMETER Experiment Name: At_Drought_Reproduction_P Parameter: Timepoint (day) Value: 10
  misc_feature: MA Experiment 20001905 PARAMETER Experiment Name: At_Drought_Reproduction_P Parameter: Tissue Value: Rosettes
  misc_feature: MA Experiment 20001905 PARAMETER Experiment Name: At_Drought_Reproduction_P Parameter: Treatment Value: Drought vs. No Drought
  misc_feature: MA Experiment ID: 20001906 Result: Up-regulated in Transcription
  misc_feature: MA Experiment 20001906 PARAMETER Experiment Name: At_Drought_Reproduction_P Parameter: Age (day) Value: 35
  misc_feature: MA Experiment 20001906 PARAMETER Experiment Name: At_Drought_Reproduction_P Parameter: Organism Value: A. thaliana
  misc_feature: MA Experiment 20001906 PARAMETER Experiment Name: At_Drought_Reproduction_P Parameter: Plant Line Value: WS
  misc_feature: MA Experiment 20001906 PARAMETER Experiment Name: At_Drought_Reproduction_P Parameter: Timepoint (day) Value: 5
  misc_feature: MA Experiment 20001906 PARAMETER Experiment Name: At_Drought_Reproduction_P Parameter: Tissue Value: Siliques
  misc_feature: MA Experiment 20001906 PARAMETER Experiment Name: At_Drought_Reproduction_P Parameter: Treatment Value: Drought vs. No Drought
  misc_feature: MA Experiment ID: 20001908 Result: Up-regulated in Transcription
  misc_feature: MA Experiment 20001908 PARAMETER Experiment Name: At_Drought_Reproduction_P Parameter: Age (day) Value: 40
  misc_feature: MA Experiment 20001908 PARAMETER Experiment Name: At_Drought_Reproduction_P Parameter: Organism Value: A. thaliana
  misc_feature: MA Experiment 20001908 PARAMETER Experiment Name: At_Drought_Reproduction_P Parameter: Plant Line Value: WS
  misc_feature: MA Experiment 20001908 PARAMETER Experiment Name: At_Drought_Reproduction_P Parameter: Timepoint (day) Value: 10
  misc_feature: MA Experiment 20001908 PARAMETER Experiment Name: At_Drought_Reproduction_P Parameter: Tissue Value: Siliques
  misc_feature: MA Experiment 20001908 PARAMETER Experiment Name: At_Drought_Reproduction_P Parameter: Treatment Value: Drought vs. No Drought
  misc_feature: MA Experiment ID: 20001910 Result: Up-regulated in Transcription
  misc_feature: MA Experiment 20001910 PARAMETER Experiment Name: At_Drought_Reproduction_P Parameter: Age (day) Value: 37
  misc_feature: MA Experiment 20001910 PARAMETER Experiment Name: At_Drought_Reproduction_P Parameter: Organism Value: A. thaliana
  misc_feature: MA Experiment 20001910 PARAMETER Experiment Name: At_Drought_Reproduction_P Parameter: Plant Line Value: WS
  misc_feature: MA Experiment 20001910 PARAMETER Experiment Name: At_Drought_Reproduction_P Parameter: Timepoint (day) Value: 7
  misc_feature: MA Experiment 20001910 PARAMETER Experiment Name: At_Drought_Reproduction_P Parameter: Tissue Value: Flowers
  misc_feature: MA Experiment 20001910 PARAMETER Experiment Name: At_Drought_Reproduction_P Parameter: Treatment Value: Drought vs. No Drought
  misc_feature: MA Experiment ID: 20001911 Result: Up-regulated in Transcription
  misc_feature: MA Experiment 20001911 PARAMETER Experiment Name: At_Drought_Reproduction_P Parameter: Age (day) Value: 40
  misc_feature: MA Experiment 20001911 PARAMETER Experiment Name: At_Drought_Reproduction_P Parameter: Organism Value: A. thaliana
  misc_feature: MA Experiment 20001911 PARAMETER Experiment Name: At_Drought_Reproduction_P Parameter: Plant Line Value: WS
  misc_feature: MA Experiment 20001911 PARAMETER Experiment Name: At_Drought_Reproduction_P Parameter: Timepoint (day) Value: 10
  misc_feature: MA Experiment 20001911 PARAMETER Experiment Name: At_Drought_Reproduction_P Parameter: Tissue Value: Flowers
  misc_feature: MA Experiment 20001911 PARAMETER Experiment Name: At_Drought_Reproduction_P Parameter: Treatment Value: Drought vs. No Drought

SEQ ID NO: 34429 - protein, 194 aa, Arabidopsis thaliana; identical to SEQ ID NO: 30839
  peptide (1)..(194): Ceres Seq. ID no. 12332256
  misc_feature (52)..(129): Pfam Name: Protease inhibitor/seed storage/LTP family Pfam Description: Protease inhibitor/seed storage/LTP family
  misc_feature (25)..(190): Homolog of NCBI NO: 25553595 NR Description: OJ1656_E11.26 [Oryza sativa (japonica
  misc_feature (47)..(167): Homolog of NCBI NO: 25553602 NR Description: OJ1656_E11.34 [Oryza sativa (japonica
  misc_feature (31)..(177): Homolog of NCBI NO: 18407534 NR Description: expressed protein
  misc_feature (31)..(177): Homolog of NCBI NO: 21592774 NR Description: unknown [Arabidopsis thaliana]
  misc_feature (47)..(193): Homolog of NCBI NO: 28269454 NR Description: putative protease inhibitor
  misc_feature (25)..(193): Homolog of NCBI NO: 18414320 NR Description: Expressed protein
  misc_feature (25)..(193): Homolog of NCBI NO: 21592722 NR Description: unknown [Arabidopsis thaliana]
  misc_feature (29)..(194): Homolog of NCBI NO: 21554014 NR Description: unknown [Arabidopsis thaliana]
  misc_feature (27)..(194): Homolog of NCBI NO: 24417478 NR Description: unknown [Arabidopsis thaliana]
  misc_feature (25)..(194): Homolog of NCBI NO: 18403453 NR Description: expressed protein

SEQ ID NO: 34430 - protein, 170 aa, Arabidopsis thaliana; identical to SEQ ID NO: 30840
  peptide (1)..(170): Ceres Seq. ID no. 12332257
  misc_feature (28)..(105): Pfam Name: Protease inhibitor/seed storage/LTP family Pfam Description: Protease inhibitor/seed storage/LTP family
  misc_feature (1)..(166): Homolog of NCBI NO: 25553595 NR Description: OJ1656_E11.26 [Oryza sativa (japonica
  misc_feature (23)..(143): Homolog of NCBI NO: 25553602 NR Description: OJ1656_E11.34 [Oryza sativa (japonica
  misc_feature (7)..(153): Homolog of NCBI NO: 18407534 NR Description: expressed protein
  misc_feature (7)..(153): Homolog of NCBI NO: 21592774 NR Description: unknown [Arabidopsis thaliana]
  misc_feature (23)..(169): Homolog of NCBI NO: 28269454 NR Description: putative protease inhibitor
  misc_feature (1)..(169): Homolog of NCBI NO: 18414320 NR Description: Expressed protein
  misc_feature (1)..(169): Homolog of NCBI NO: 21592722 NR Description: unknown [Arabidopsis thaliana]
  misc_feature (5)..(170): Homolog of NCBI NO: 21554014 NR Description: unknown [Arabidopsis thaliana]
  misc_feature (3)..(170): Homolog of NCBI NO: 24417478 NR Description: unknown [Arabidopsis thaliana]
  misc_feature (1)..(170): Homolog of NCBI NO: 18403453 NR Description: expressed protein

SEQ ID NO: 34431 - protein, 168 aa, Arabidopsis thaliana; identical to SEQ ID NO: 30841
  peptide (1)..(168): Ceres Seq. ID no. 12332258
  misc_feature (26)..(103): Pfam Name: Protease inhibitor/seed storage/LTP family Pfam Description: Protease inhibitor/seed storage/LTP family
  misc_feature (1)..(164): Homolog of NCBI NO: 25553595 NR Description: OJ1656_E11.26 [Oryza sativa (japonica
  misc_feature (21)..(141): Homolog of NCBI NO: 25553602 NR Description: OJ1656_E11.34 [Oryza sativa (japonica
  misc_feature (5)..(151): Homolog of NCBI NO: 18407534 NR Description: expressed protein
  misc_feature (5)..(151): Homolog of NCBI NO: 21592774 NR Description: unknown [Arabidopsis thaliana]
  misc_feature (21)..(167): Homolog of NCBI NO: 28269454 NR Description: putative protease inhibitor
  misc_feature (1)..(167): Homolog of NCBI NO: 18414320 NR Description: Expressed protein
  misc_feature (1)..(167): Homolog of NCBI NO: 21592722 NR Description: unknown [Arabidopsis thaliana]
  misc_feature (3)..(168): Homolog of NCBI NO: 21554014 NR Description: unknown [Arabidopsis thaliana]
  misc_feature (1)..(168): Homolog of NCBI NO: 24417478 NR Description: unknown [Arabidopsis thaliana]
  misc_feature (1)..(168): Homolog of NCBI NO: 18403453 NR Description: expressed protein

SEQ ID NO: 34432 - DNA, 965 bp, Arabidopsis thaliana; identical to SEQ ID NO: 30842
  misc_feature (1)..(965): Ceres Seq. ID no. 13491928
  misc_feature: MA Experiment ID: 108434 Result: Up-regulated in Transcription
  misc_feature: MA Experiment 108434 PARAMETER Experiment Name: At_Root_Tips_cDNA_P Parameter: Tissue Value: Root Tips
  misc_feature: MA Experiment ID: 108461 Result: Up-regulated in Transcription
  misc_feature: MA Experiment 108461 PARAMETER Experiment Name: At_Germinating_Seeds_cDNA_P Parameter: Age (day) Value: 1 vs. 0
  misc_feature: MA Experiment 108461 PARAMETER Experiment Name: At_Germinating_Seeds_cDNA_P Parameter: Tissue Value: Germinating Seeds
  misc_feature: MA Experiment ID: 108462 Result: Up-regulated in Transcription
  misc_feature: MA Experiment 108462 PARAMETER Experiment Name: At_Germinating_Seeds_cDNA_P Parameter: Age (day) Value: 2 vs. 0
  misc_feature: MA Experiment 108462 PARAMETER Experiment Name: At_Germinating_Seeds_cDNA_P Parameter: Tissue Value: Germinating Seeds
  misc_feature: MA Experiment ID: 20000179 Result: Up-regulated in Transcription
  misc_feature: MA Experiment 20000179 PARAMETER Experiment Name: At_Germinating_Seeds_P Parameter: Age (hr) Value: 6 vs. 0
  misc_feature: MA Experiment 20000179 PARAMETER Experiment Name: At_Germinating_Seeds_P Parameter: Tissue Value: Germinating Seeds
  misc_feature: MA Experiment ID: 20000180 Result: Up-regulated in Transcription
  misc_feature: MA Experiment 20000180 PARAMETER Experiment Name: At_Germinating_Seeds_P Parameter: Age (hr) Value: 24 vs. 0
  misc_feature: MA Experiment 20000180 PARAMETER Experiment Name: At_Germinating_Seeds_P Parameter: Tissue Value: Germinating Seeds
  misc_feature: MA Experiment ID: 20000794 Result: Up-regulated in Transcription
  misc_feature: MA Experiment 20000794 PARAMETER Experiment Name: At_Petals_P Parameter: Age (day) Value: 23-25 days
  misc_feature: MA Experiment 20000794 PARAMETER Experiment Name: At_Petals_P Parameter: Plant Line Value: WS
  misc_feature: MA Experiment 20000794 PARAMETER Experiment Name: At_Petals_P Parameter: Tissue Value: Petals vs. Whole plant

SEQ ID NO: 34433 - protein, 202 aa, Arabidopsis thaliana; identical to SEQ ID NO: 24242
  peptide (1)..(202): Ceres Seq. ID no. 13491929
  misc_feature (19)..(164): Homolog of NCBI NO: 7705684 NR Description: putative glycolipid transfer protein [Homo
  misc_feature (19)..(164): Homolog of NCBI NO: 30481662 NR Description: Unknown (protein for MGC:58573) [Mus musculus]
  misc_feature (66)..(201): Homolog of NCBI NO: 21554671 NR Description: unknown [Arabidopsis thaliana]
  misc_feature (66)..(201): Homolog of NCBI NO: 18402939 NR Description: expressed protein [Arabidopsis thaliana]
  misc_feature (59)..(201): Homolog of NCBI NO: 30686173 NR Description: expressed protein [Arabidopsis thaliana]
  misc_feature (25)..(191): Homolog of NCBI NO: 39545646 NR Description: OJ000114_01.1 [Oryza sativa (japonica
  misc_feature (26)..(201): Homolog of NCBI NO: 9280228 NR Description: gene_id:MXL8.12~unknown protein [Arabidopsis
  misc_feature (25)..(202): Homolog of NCBI NO: 38344077 NR Description: OSJNBa0006B20.21 [Oryza sativa (japonica
  misc_feature (1)..(202): Homolog of NCBI NO: 34901156 NR Description: hypothetical protein~similar to Arabidopsis
  misc_feature (1)..(202): Homolog of NCBI NO: 18403285 NR Description: expressed protein [Arabidopsis thaliana]

SEQ ID NO: 34434 - protein, 190 aa, Arabidopsis thaliana; identical to SEQ ID NO: 24243
  peptide (1)..(190): Ceres Seq. ID no. 13491930
  misc_feature (7)..(152): Homolog of NCBI NO: 7705684 NR Description: putative glycolipid transfer protein [Homo
  misc_feature (7)..(152): Homolog of NCBI NO: 30481662 NR Description: Unknown (protein for MGC:58573) [Mus musculus]
  misc_feature (54)..(189): Homolog of NCBI NO: 21554671 NR Description: unknown [Arabidopsis thaliana]
  misc_feature (54)..(189): Homolog of NCBI NO: 18402939 NR Description: expressed protein [Arabidopsis thaliana]
  misc_feature (47)..(189): Homolog of NCBI NO: 30686173 NR Description: expressed protein [Arabidopsis thaliana]
  misc_feature (13)..(179): Homolog of NCBI NO: 39545646 NR Description: OJ000114_01.1 [Oryza sativa (japonica
  misc_feature (14)..(189): Homolog of NCBI NO: 9280228 NR Description: gene_id:MXL8.12~unknown protein [Arabidopsis
  misc_feature (13)..(190): Homolog of NCBI NO: 38344077 NR Description: OSJNBa0006B20.21 [Oryza sativa (japonica
  misc_feature (1)..(190): Homolog of NCBI NO: 34901156 NR Description: hypothetical protein~similar to Arabidopsis
  misc_feature (1)..(190): Homolog of NCBI NO: 18403285 NR Description: expressed protein [Arabidopsis thaliana]

SEQ ID NO: 34435 - protein, 180 aa, Arabidopsis thaliana; identical to SEQ ID NO: 24244
  peptide (1)..(180): Ceres Seq. ID no. 13491931
  misc_feature (1)..(142): Homolog of NCBI NO: 7705684 NR Description: putative glycolipid transfer protein [Homo
  misc_feature (1)..(142): Homolog of NCBI NO: 30481662 NR Description: Unknown (protein for MGC:58573) [Mus musculus]
  misc_feature (44)..(179): Homolog of NCBI NO: 21554671 NR Description: unknown [Arabidopsis thaliana]
  misc_feature (44)..(179): Homolog of NCBI NO: 18402939 NR Description: expressed protein [Arabidopsis thaliana]
  misc_feature (37)..(179): Homolog of NCBI NO: 30686173 NR Description: expressed protein [Arabidopsis thaliana]
  misc_feature (3)..(169): Homolog of NCBI NO: 39545646 NR Description: OJ000114_01.1 [Oryza sativa (japonica
  misc_feature (4)..(179): Homolog of NCBI NO: 9280228 NR Description: gene_id:MXL8.12~unknown protein [Arabidopsis
  misc_feature (3)..(180): Homolog of NCBI NO: 38344077 NR Description: OSJNBa0006B20.21 [Oryza sativa (japonica
  misc_feature (1)..(180): Homolog of NCBI NO: 34901156 NR Description: hypothetical protein~similar to Arabidopsis
  misc_feature (1)..(180): Homolog of NCBI NO: 18403285 NR Description: expressed protein [Arabidopsis thaliana]

SEQ ID NO: 34436 - DNA, 673 bp, Arabidopsis thaliana; identical to SEQ ID NO: 30846
  misc_feature (1)..(673): Ceres Seq. ID no. 12322661
  misc_feature: MA Experiment ID: 108474 Result: Down-regulated in Transcription
  misc_feature: MA Experiment 108474 PARAMETER Experiment Name: At_Drought_Flowers_cDNA_P Parameter: Timepoint (hr) Value: null
  misc_feature: MA Experiment 108474 PARAMETER Experiment Name: At_Drought_Flowers_cDNA_P Parameter: Treatment Value: Drought vs. No Drought
  misc_feature: MA Experiment ID: 108595 Result: Up-regulated in Transcription
  misc_feature: MA Experiment 108595 PARAMETER Experiment Name: At_Ler-pi_Ovule_cDNA_P Parameter: Plant Line Value: null
  misc_feature: MA Experiment ID: 20000234 Result: Up-regulated in Transcription
  misc_feature: MA Experiment 20000234 PARAMETER Experiment Name: At_Siliques_P Parameter: Age (day) Value: 21
  misc_feature: MA Experiment 20000234 PARAMETER Experiment Name: At_Siliques_P Parameter: Organism Value: A. thaliana
  misc_feature: MA Experiment 20000234 PARAMETER Experiment Name: At_Siliques_P Parameter: Plant Line Value: WS
  misc_feature: MA Experiment 20000234 PARAMETER Experiment Name: At_Siliques_P Parameter: Tissue Value: Less Than 5mm Siliques vs. Whole Plant
  misc_feature: MA Experiment ID: 20000235 Result: Up-regulated in Transcription
  misc_feature: MA Experiment 20000235 PARAMETER Experiment Name: At_Siliques_P Parameter: Age (day) Value: 21
  misc_feature: MA Experiment 20000235 PARAMETER Experiment Name: At_Siliques_P Parameter: Organism Value: A. thaliana
  misc_feature: MA Experiment 20000235 PARAMETER Experiment Name: At_Siliques_P Parameter: Plant Line Value: WS
  misc_feature: MA Experiment 20000235 PARAMETER Experiment Name: At_Siliques_P Parameter: Tissue Value: 5-10mm Siliques vs. Whole Plant
  misc_feature: MA Experiment ID: 20000286 Result: Up-regulated in Transcription
  misc_feature: MA Experiment 20000286 PARAMETER Experiment Name: At_Open_Flower_P Parameter: Age (day) Value: 21
  misc_feature: MA Experiment 20000286 PARAMETER Experiment Name: At_Open_Flower_P Parameter: Plant Line Value: WS
  misc_feature: MA Experiment 20000286 PARAMETER Experiment Name: At_Open_Flower_P Parameter: Tissue Value: Half Open vs. Whole Plant
  misc_feature: MA Experiment ID: 20000441 Result: Down-regulated in Transcription
  misc_feature: MA Experiment 20000441 PARAMETER Experiment Name: At_1uM_BR-BRZ__P Parameter: Tissue Value: Shoot Apices
  misc_feature: MA Experiment 20000441 PARAMETER Experiment Name: At_1uM_BR-BRZ__P Parameter: Treatment Value: 1uM BR vs. No Treatment

SEQ ID NO: 34437 - protein, 141 aa, Arabidopsis thaliana; identical to SEQ ID NO: 30847
  peptide (1)..(141): Ceres Seq. ID no. 12322662
  misc_feature (1)..(54): Pfam Name: C2 domain Pfam Description: C2 domain
  misc_feature (1)..(130): Homolog of NCBI NO: 15223248 NR Description: unknown protein; protein id: At1g70800.1
  misc_feature (1)..(130): Homolog of NCBI NO: 18409675 NR Description: zinc finger and C2 domain protein, putative
  misc_feature (1)..(131): Homolog of NCBI NO: 18409682 NR Description: expressed protein
  misc_feature (4)..(130): Homolog of NCBI NO: 15226306 NR Description: hypothetical protein
  misc_feature (1)..(131): Homolog of NCBI NO: 15219500 NR Description: hypothetical protein; protein id: At1g73580.1
  misc_feature (1)..(130): Homolog of NCBI NO: 25405940 NR Description: protein T1N15.21 [imported] - Arabidopsis
  misc_feature (1)..(130): Homolog of NCBI NO: 15221907 NR Description: unknown protein; protein id: At1g48590.1
  misc_feature (1)..(131): Homolog of NCBI NO: 30684739 NR Description: C2 domain-containing protein [Arabidopsis
  misc_feature (1)..(131): Homolog of NCBI NO: 15240322 NR Description: putative protein
  misc_feature (1)..(141): Homolog of NCBI NO: 18408493 NR Description: expressed protein

SEQ ID NO: 34438 - protein, 131 aa, Arabidopsis thaliana; identical to SEQ ID NO: 30848
  peptide (1)..(131): Ceres Seq. ID no. 12322663
  misc_feature (1)..(120): Homolog of NCBI NO: 15223248 NR Description: unknown protein; protein id: At1g70800.1
  misc_feature (1)..(120): Homolog of NCBI NO: 18409675 NR Description: zinc finger and C2 domain protein, putative
  misc_feature (1)..(121): Homolog of NCBI NO: 18409682 NR Description: expressed protein
  misc_feature (1)..(120): Homolog of NCBI NO: 15226306 NR Description: hypothetical protein
  misc_feature (1)..(121): Homolog of NCBI NO: 15219500 NR Description: hypothetical protein; protein id: At1g73580.1
  misc_feature (1)..(120): Homolog of NCBI NO: 25405940 NR Description: protein T1N15.21 [imported] - Arabidopsis
  misc_feature (1)..(120): Homolog of NCBI NO: 15221907 NR Description: unknown protein; protein id: At1g48590.1
  misc_feature (1)..(121): Homolog of NCBI NO: 30684739 NR Description: C2 domain-containing protein [Arabidopsis
  misc_feature (1)..(121): Homolog of NCBI NO: 15240322 NR Description: putative protein
  misc_feature (1)..(131): Homolog of NCBI NO: 18408493 NR Description: expressed protein

SEQ ID NO: 34439 - protein, 105 aa, Arabidopsis thaliana; identical to SEQ ID NO: 30849
  peptide (1)..(105): Ceres Seq. ID no. 12322664
  misc_feature (1)..(94): Homolog of NCBI NO: 15223248 NR Description: unknown protein; protein id: At1g70800.1
  misc_feature (1)..(94): Homolog of NCBI NO: 18409675 NR Description: zinc finger and C2 domain protein, putative
  misc_feature (1)..(95): Homolog of NCBI NO: 18409682 NR Description: expressed protein
  misc_feature (1)..(94): Homolog of NCBI NO: 15226306 NR Description: hypothetical protein
  misc_feature (1)..(95): Homolog of NCBI NO: 15219500 NR Description: hypothetical protein; protein id: At1g73580.1
  misc_feature (1)..(94): Homolog of NCBI NO: 25405940 NR Description: protein T1N15.21 [imported] - Arabidopsis
  misc_feature (1)..(94): Homolog of NCBI NO: 15221907 NR Description: unknown protein; protein id: At1g48590.1
  misc_feature (1)..(95): Homolog of NCBI NO: 30684739 NR Description: C2 domain-containing protein [Arabidopsis
  misc_feature (1)..(95): Homolog of NCBI NO: 15240322 NR Description: putative protein
  misc_feature (1)..(105): Homolog of NCBI NO: 18408493 NR Description: expressed protein

SEQ ID NO: 34440 - DNA, 1333 bp, Arabidopsis thaliana; identical to SEQ ID NO: 30850
  misc_feature (1)..(1333): Ceres Seq. ID no. 13504694
  misc_feature: MA Experiment ID: 108434 Result: Down-regulated in Transcription
  misc_feature: MA Experiment 108434 PARAMETER Experiment Name: At_Root_Tips_cDNA_P Parameter: Tissue Value: Root Tips
  misc_feature: MA Experiment ID: 108462 Result: Up-regulated in Transcription
  misc_feature: MA Experiment 108462 PARAMETER Experiment Name: At_Germinating_Seeds_cDNA_P Parameter: Age (day) Value: 2 vs. 0
  misc_feature: MA Experiment 108462 PARAMETER Experiment Name: At_Germinating_Seeds_cDNA_P Parameter: Tissue Value: Germinating Seeds
  misc_feature: MA Experiment ID: 108463 Result: Up-regulated in Transcription
  misc_feature: MA Experiment 108463 PARAMETER Experiment Name: At_Germinating_Seeds_cDNA_P Parameter: Age (day) Value: 3 vs. 0
  misc_feature: MA Experiment 108463 PARAMETER Experiment Name: At_Germinating_Seeds_cDNA_P Parameter: Tissue Value: Germinating Seeds
  misc_feature: MA Experiment ID: 108464 Result: Up-regulated in Transcription
  misc_feature: MA Experiment 108464 PARAMETER Experiment Name: At_Germinating_Seeds_cDNA_P Parameter: Age (day) Value: 4 vs. 0
  misc_feature: MA Experiment 108464 PARAMETER Experiment Name: At_Germinating_Seeds_cDNA_P Parameter: Tissue Value: Germinating Seeds
  misc_feature: MA Experiment ID: 108561 Result: Down-regulated in Transcription
  misc_feature: MA Experiment 108561 PARAMETER Experiment Name: At_100uM_ABA_cDNA_P Parameter: Timepoint (hr) Value: 6
  misc_feature: MA Experiment 108561 PARAMETER Experiment Name: At_100uM_ABA_cDNA_P Parameter: Tissue Value: Aerial
  misc_feature: MA Experiment 108561 PARAMETER Experiment Name: At_100uM_ABA_cDNA_P Parameter: Treatment Value: 100uM ABA vs. No Treatment
  misc_feature: MA Experiment ID: 20000171 Result: Up-regulated in Transcription
  misc_feature: MA Experiment 20000171 PARAMETER Experiment Name: At_42deg_Heat_P Parameter: Age (day) Value: 14
  misc_feature: MA Experiment 20000171 PARAMETER Experiment Name: At_42deg_Heat_P Parameter: Organism Value: A. thaliana
  misc_feature: MA Experiment 20000171 PARAMETER Experiment Name: At_42deg_Heat_P Parameter: Plant Line Value: WS
  misc_feature: MA Experiment 20000171 PARAMETER Experiment Name: At_42deg_Heat_P Parameter: Temperature (deg C) Value: 42 vs. 22
  misc_feature: MA Experiment 20000171 PARAMETER Experiment Name: At_42deg_Heat_P Parameter: Timepoint (hr) Value: 1
  misc_feature: MA Experiment 20000171 PARAMETER Experiment Name: At_42deg_Heat_P Parameter: Tissue Value: Aerial
  misc_feature: MA Experiment ID: 20000173 Result: Up-regulated in Transcription
  misc_feature: MA Experiment 20000173 PARAMETER Experiment Name: At_42deg_Heat_P Parameter: Age (day) Value: 14
  misc_feature: MA Experiment 20000173 PARAMETER Experiment Name: At_42deg_Heat_P Parameter: Organism Value: A. thaliana
  misc_feature: MA Experiment 20000173 PARAMETER Experiment Name: At_42deg_Heat_P Parameter: Plant Line Value: WS
  misc_feature: MA Experiment 20000173 PARAMETER Experiment Name: At_42deg_Heat_P Parameter: Temperature (deg C) Value: 42 vs. 22
  misc_feature: MA Experiment 20000173 PARAMETER Experiment Name: At_42deg_Heat_P Parameter: Timepoint (hr) Value: 6
  misc_feature: MA Experiment 20000173 PARAMETER Experiment Name: At_42deg_Heat_P Parameter: Tissue Value: Aerial
  misc_feature: MA Experiment ID: 20000439 Result: Up-regulated in Transcription
  misc_feature: MA Experiment 20000439 PARAMETER Experiment Name: At_Roots__P Parameter: Age (day) Value: 14 vs. 21
  misc_feature: MA Experiment 20000439 PARAMETER Experiment Name: At_Roots__P Parameter: Organism Value: A. thaliana
  misc_feature: MA Experiment 20000439 PARAMETER Experiment Name: At_Roots__P Parameter: Tissue Value: Roots vs. Whole Plant
  misc_feature: MA Experiment ID: 20000451 Result: Up-regulated in Transcription
  misc_feature: MA Experiment 20000451 PARAMETER Experiment Name: At_CS6879_Shoots-Roots_P Parameter: Age (day) Value: 14
  misc_feature: MA Experiment 20000451 PARAMETER Experiment Name: At_CS6879_Shoots-Roots_P Parameter: Organism Value: A. thaliana
  misc_feature: MA Experiment 20000451 PARAMETER Experiment Name: At_CS6879_Shoots-Roots_P Parameter: Plant Line Value: CS6879 vs. WS
  misc_feature: MA Experiment 20000451 PARAMETER Experiment Name: At_CS6879_Shoots-Roots_P Parameter: Tissue Value: Roots
  misc_feature: MA Experiment ID: 20000527 Result: Down-regulated in Transcription
  misc_feature: MA Experiment 20000527 PARAMETER Experiment Name: At_10percent_PEG_P Parameter: Age (day) Value: 20
  misc_feature: MA Experiment 20000527 PARAMETER Experiment Name: At_10percent_PEG_P Parameter: Organism Value: A. thaliana
  misc_feature: MA Experiment 20000527 PARAMETER Experiment Name: At_10percent_PEG_P Parameter: Plant Line Value: WS
  misc_feature: MA Experiment 20000527 PARAMETER Experiment Name: At_10percent_PEG_P Parameter: Timepoint (day) Value: 20
  misc_feature: MA Experiment 20000527 PARAMETER Experiment Name: At_10percent_PEG_P Parameter: Tissue Value: Whole Plant
  misc_feature: MA Experiment 20000527 PARAMETER Experiment Name: At_10percent_PEG_P Parameter: Treatment Value: 10percent PEG vs. No Treatment

SEQ ID NO: 34441 - protein, 363 aa, Arabidopsis thaliana; identical to SEQ ID NO: 30851
  peptide (1)..(363): Ceres Seq. ID no. 13504695
  misc_feature (77)..(327): Pfam Name: Peroxidase Pfam Description: Peroxidase
  misc_feature (18)..(359): Homolog of NCBI NO: 15219493 NR Description: peroxidase, putative [Arabidopsis thaliana]
  misc_feature (61)..(359): Homolog of NCBI NO: 11513747 NR Description: Chain A, Arabidopsis Thaliana Peroxidase A2
  misc_feature (55)..(359): Homolog of NCBI NO: 5453379 NR Description: bacterial-induced peroxidase precursor [Gossypium
  misc_feature (58)..(359): Homolog of NCBI NO: 15240140 NR Description: peroxidase, putative [Arabidopsis thaliana]
  misc_feature (58)..(359): Homolog of NCBI NO: 21593262 NR Description: peroxidase [Arabidopsis thaliana]
  misc_feature (61)..(359): Homolog of NCBI NO: 1730490 NR Description: Peroxidase A2
  misc_feature (58)..(359): Homolog of NCBI NO: 15240141 NR Description: peroxidase, putative [Arabidopsis thaliana]
  misc_feature (58)..(359): Homolog of NCBI NO: 21594792 NR Description: peroxidase [Arabidopsis thaliana]
  misc_feature (14)..(363): Homolog of NCBI NO: 1546702 NR Description: peroxidase; peroxidase ATP5a [Arabidopsis
  misc_feature (14)..(363): Homolog of NCBI NO: 30694586 NR Description: peroxidase, putative [Arabidopsis thaliana]

SEQ ID NO: 34442 - protein, 350 aa, Arabidopsis thaliana; identical to SEQ ID NO: 30852
  peptide (1)..(350): Ceres Seq. ID no. 13504696
  misc_feature (64)..(314): Pfam Name: Peroxidase Pfam Description: Peroxidase
  misc_feature (5)..(346): Homolog of NCBI NO: 15219493 NR Description: peroxidase, putative [Arabidopsis thaliana]
  misc_feature (48)..(346): Homolog of NCBI NO: 11513747 NR Description: Chain A, Arabidopsis Thaliana Peroxidase A2
  misc_feature (42)..(346): Homolog of NCBI NO: 5453379 NR Description: bacterial-induced peroxidase precursor [Gossypium
  misc_feature (45)..(346): Homolog of NCBI NO: 15240140 NR Description: peroxidase, putative [Arabidopsis thaliana]
  misc_feature (45)..(346): Homolog of NCBI NO: 21593262 NR Description: peroxidase [Arabidopsis thaliana]
  misc_feature (48)..(346): Homolog of NCBI NO: 1730490 NR Description: Peroxidase A2
  misc_feature (45)..(346): Homolog of NCBI NO: 15240141 NR Description: peroxidase, putative [Arabidopsis thaliana]
  misc_feature (45)..(346): Homolog of NCBI NO: 21594792 NR Description: peroxidase [Arabidopsis thaliana]
  misc_feature (1)..(350): Homolog of NCBI NO: 1546702 NR Description: peroxidase; peroxidase ATP5a [Arabidopsis
  misc_feature (1)..(350): Homolog of NCBI NO: 30694586 NR Description: peroxidase, putative [Arabidopsis thaliana]

SEQ ID NO: 34443 - protein, 346 aa, Arabidopsis thaliana; identical to SEQ ID NO: 30853
  peptide (1)..(346): Ceres Seq. ID no. 13504697
  misc_feature (60)..(310): Pfam Name: Peroxidase Pfam Description: Peroxidase
  misc_feature (1)..(342): Homolog of NCBI NO: 15219493 NR Description: peroxidase, putative [Arabidopsis thaliana]
  misc_feature (44)..(342): Homolog of NCBI NO: 11513747 NR Description: Chain A, Arabidopsis Thaliana Peroxidase A2
  misc_feature (38)..(342): Homolog of NCBI NO: 5453379 NR Description: bacterial-induced peroxidase precursor [Gossypium
  misc_feature (41)..(342): Homolog of NCBI NO: 15240140 NR Description: peroxidase, putative [Arabidopsis thaliana]
  misc_feature (41)..(342): Homolog of NCBI NO: 21593262 NR Description: peroxidase [Arabidopsis thaliana]
  misc_feature (44)..(342): Homolog of NCBI NO: 1730490 NR Description: Peroxidase A2
  misc_feature (41)..(342): Homolog of NCBI NO: 15240141 NR Description: peroxidase, putative [Arabidopsis thaliana]
  misc_feature (41)..(342): Homolog of NCBI NO: 21594792 NR Description: peroxidase [Arabidopsis thaliana]
  misc_feature (1)..(346): Homolog of NCBI NO: 1546702 NR Description: peroxidase; peroxidase ATP5a [Arabidopsis
  misc_feature (1)..(346): Homolog of NCBI NO: 30694586 NR Description: peroxidase, putative [Arabidopsis thaliana]

SEQ ID NO: 34444 - DNA, 2484 bp, Arabidopsis thaliana; identical to SEQ ID NO: 30854
  misc_feature (1)..(2484): Ceres Seq. ID no. 12327297
  misc_feature: MA Experiment ID: 108462 Result: Up-regulated in Transcription
  misc_feature: MA Experiment 108462 PARAMETER Experiment Name: At_Germinating_Seeds_cDNA_P Parameter: Age (day) Value: 2 vs. 0
  misc_feature: MA Experiment 108462 PARAMETER Experiment Name: At_Germinating_Seeds_cDNA_P Parameter: Tissue Value: Germinating Seeds
  misc_feature: MA Experiment ID: 108463 Result: Up-regulated in Transcription
  misc_feature: MA Experiment 108463 PARAMETER Experiment Name: At_Germinating_Seeds_cDNA_P Parameter: Age (day) Value: 3 vs. 0
  misc_feature: MA Experiment 108463 PARAMETER Experiment Name: At_Germinating_Seeds_cDNA_P Parameter: Tissue Value: Germinating Seeds
  misc_feature: MA Experiment ID: 108464 Result: Up-regulated in Transcription
  misc_feature: MA Experiment 108464 PARAMETER Experiment Name: At_Germinating_Seeds_cDNA_P Parameter: Age (day) Value: 4 vs. 0
  misc_feature: MA Experiment 108464 PARAMETER Experiment Name: At_Germinating_Seeds_cDNA_P Parameter: Tissue Value: Germinating Seeds
  misc_feature: MA Experiment ID: 108605 Result: Up-regulated in Transcription
  misc_feature: MA Experiment 108605 PARAMETER Experiment Name: At_100uM_ABA_cDNA_P Parameter: Timepoint (hr) Value: 6
  misc_feature: MA Experiment 108605 PARAMETER Experiment Name: At_100uM_ABA_cDNA_P Parameter: Tissue Value: Aerial
  misc_feature: MA Experiment 108605 PARAMETER Experiment Name: At_100uM_ABA_cDNA_P Parameter: Treatment Value: 100uM ABA vs. No Treatment
  misc_feature: MA Experiment ID: 20000069 Result: Up-regulated in Transcription
  misc_feature: MA Experiment 20000069 PARAMETER Experiment Name: At_100uM_ABA_Mutants_cDNA_P Parameter: Plant Line Value: CS23
  misc_feature: MA Experiment 20000069 PARAMETER Experiment Name: At_100uM_ABA_Mutants_cDNA_P Parameter: Timepoint (hr) Value: 6
  misc_feature: MA Experiment 20000069 PARAMETER Experiment Name: At_100uM_ABA_Mutants_cDNA_P Parameter: Tissue Value: Aerial
  misc_feature: MA Experiment 20000069 PARAMETER Experiment Name: At_100uM_ABA_Mutants_cDNA_P Parameter: Treatment Value: 100uM ABA vs. No Treatment
  misc_feature: MA Experiment ID: 20000070 Result: Up-regulated in Transcription
  misc_feature: MA Experiment 20000070 PARAMETER Experiment Name: At_100uM_ABA_Mutants_cDNA_P Parameter: Plant Line Value: CS24
  misc_feature: MA Experiment 20000070 PARAMETER Experiment Name: At_100uM_ABA_Mutants_cDNA_P Parameter: Timepoint (hr) Value: 6
  misc_feature: MA Experiment 20000070 PARAMETER Experiment Name: At_100uM_ABA_Mutants_cDNA_P Parameter: Tissue Value: Aerial
  misc_feature: MA Experiment 20000070 PARAMETER Experiment Name: At_100uM_ABA_Mutants_cDNA_P Parameter: Treatment Value: 100uM ABA vs. No Treatment
  misc_feature: MA Experiment ID: 20000071 Result: Up-regulated in Transcription
  misc_feature: MA Experiment 20000071 PARAMETER Experiment Name: At_100uM_ABA_Mutants_cDNA_P Parameter: Plant Line Value: CS8104
  misc_feature: MA Experiment 20000071 PARAMETER Experiment Name: At_100uM_ABA_Mutants_cDNA_P Parameter: Timepoint (hr) Value: 6
  misc_feature: MA Experiment 20000071 PARAMETER Experiment Name: At_100uM_ABA_Mutants_cDNA_P Parameter: Tissue Value: Aerial
  misc_feature: MA Experiment 20000071 PARAMETER Experiment Name: At_100uM_ABA_Mutants_cDNA_P Parameter: Treatment Value: 100uM ABA vs. No Treatment
  misc_feature: MA Experiment ID: 20000072 Result: Up-regulated in Transcription
  misc_feature: MA Experiment 20000072 PARAMETER Experiment Name: At_100uM_ABA_Mutants_cDNA_P Parameter: Plant Line Value: CS8105
  misc_feature: MA Experiment 20000072 PARAMETER Experiment Name: At_100uM_ABA_Mutants_cDNA_P Parameter: Timepoint (hr) Value: 6
  misc_feature: MA Experiment 20000072 PARAMETER Experiment Name: At_100uM_ABA_Mutants_cDNA_P Parameter: Tissue Value: Aerial
  misc_feature: MA Experiment 20000072 PARAMETER Experiment Name: At_100uM_ABA_Mutants_cDNA_P Parameter: Treatment Value: 100uM ABA vs. No Treatment
  misc_feature: MA Experiment ID: 20000111 Result: Down-regulated in Transcription
  misc_feature: MA Experiment 20000111 PARAMETER Experiment Name: At_42deg_Heat_cDNA_P Parameter: Temperature (deg C) Value: 42 vs. 22
  misc_feature: MA Experiment 20000111 PARAMETER Experiment Name: At_42deg_Heat_cDNA_P Parameter: Timepoint (hr) Value: 6
  misc_feature: MA Experiment 20000111 PARAMETER Experiment Name: At_42deg_Heat_cDNA_P Parameter: Tissue Value: Aerial
  misc_feature: MA Experiment ID: 20000113 Result: Down-regulated in Transcription
  misc_feature: MA Experiment 20000113 PARAMETER Experiment Name: At_42deg_Heat_cDNA_P Parameter: Temperature (deg C) Value: 42 vs. 22
  misc_feature: MA Experiment 20000113 PARAMETER Experiment Name: At_42deg_Heat_cDNA_P Parameter: Timepoint (hr) Value: 8
  misc_feature: MA Experiment 20000113 PARAMETER Experiment Name: At_42deg_Heat_cDNA_P Parameter: Tissue Value: Aerial
  misc_feature: MA Experiment ID: 20000117 Result: Up-regulated in Transcription
  misc_feature: MA Experiment 20000117 PARAMETER Experiment Name: At_100uM_ABA_Mutants_cDNA_P Parameter: Plant Line Value: Columbia
  misc_feature: MA Experiment 20000117 PARAMETER Experiment Name: At_100uM_ABA_Mutants_cDNA_P Parameter: Timepoint (hr) Value: 6
  misc_feature: MA Experiment 20000117 PARAMETER Experiment Name: At_100uM_ABA_Mutants_cDNA_P Parameter: Tissue Value: Aerial
  misc_feature: MA Experiment 20000117 PARAMETER Experiment Name: At_100uM_ABA_Mutants_cDNA_P Parameter: Treatment Value: 100uM ABA vs. No Treatment
  misc_feature: MA Experiment ID: 20000173 Result: Down-regulated in Transcription
  misc_feature: MA Experiment 20000173 PARAMETER Experiment Name: At_42deg_Heat_P Parameter: Age (day) Value: 14
  misc_feature: MA Experiment 20000173 PARAMETER Experiment Name: At_42deg_Heat_P Parameter: Organism Value: A. thaliana
  misc_feature: MA Experiment 20000173 PARAMETER Experiment Name: At_42deg_Heat_P Parameter: Plant Line Value: WS
  misc_feature: MA Experiment 20000173 PARAMETER Experiment Name: At_42deg_Heat_P Parameter: Temperature (deg C) Value: 42 vs. 22
  misc_feature: MA Experiment 20000173 PARAMETER Experiment Name: At_42deg_Heat_P Parameter: Timepoint (hr) Value: 6
  misc_feature: MA Experiment 20000173 PARAMETER Experiment Name: At_42deg_Heat_P Parameter: Tissue Value: Aerial
  misc_feature: MA Experiment ID: 20000179 Result: Down-regulated in Transcription
  misc_feature: MA Experiment 20000179 PARAMETER Experiment Name: At_Germinating_Seeds_P Parameter: Age (hr) Value: 6 vs. 0
  misc_feature: MA Experiment 20000179 PARAMETER Experiment Name: At_Germinating_Seeds_P Parameter: Tissue Value: Germinating Seeds
  misc_feature: MA Experiment ID: 20000184 Result: Down-regulated in Transcription
  misc_feature: MA Experiment 20000184 PARAMETER Experiment Name: At_Shoots__P Parameter: Age (day) Value: 7
  misc_feature: MA Experiment 20000184 PARAMETER Experiment Name: At_Shoots__P Parameter: Tissue Value: Shoots vs. Whole Plant
  misc_feature: MA Experiment ID: 20000224 Result: Up-regulated in Transcription
  misc_feature: MA Experiment ID: 20000264 Result: Up-regulated in Transcription
  misc_feature: MA Experiment 20000264 PARAMETER Experiment Name: At_Open_Flower_P Parameter: Age (day) Value: 21
  misc_feature: MA Experiment 20000264 PARAMETER Experiment Name: At_Open_Flower_P Parameter: Plant Line Value: WS
  misc_feature: MA Experiment 20000264 PARAMETER Experiment Name: At_Open_Flower_P Parameter: Tissue Value: Open Flower vs. Whole Plant
  misc_feature: MA Experiment ID: 20000436 Result: Up-regulated in Transcription
  misc_feature: MA Experiment 20000436 PARAMETER Experiment Name: At_Drought_P Parameter: Age (day) Value: 7
  misc_feature: MA Experiment 20000436 PARAMETER Experiment Name: At_Drought_P Parameter: Organism Value: A. thaliana
  misc_feature: MA Experiment 20000436 PARAMETER Experiment Name: At_Drought_P Parameter: Plant Line Value: WS
  misc_feature: MA Experiment 20000436 PARAMETER Experiment Name: At_Drought_P Parameter: Timepoint (hr) Value: 12
  misc_feature: MA Experiment 20000436 PARAMETER Experiment Name: At_Drought_P Parameter: Tissue Value: Whole Plant
  misc_feature: MA Experiment 20000436 PARAMETER Experiment Name: At_Drought_P Parameter: Treatment Value: Drought vs. No Drought
  misc_feature: MA Experiment ID: 20000794 Result: Up-regulated in Transcription
  misc_feature: MA Experiment 20000794 PARAMETER Experiment Name: At_Petals_P Parameter: Age (day) Value: 23-25 days
  misc_feature: MA Experiment 20000794 PARAMETER Experiment Name: At_Petals_P Parameter: Plant Line Value: WS
  misc_feature: MA Experiment 20000794 PARAMETER Experiment Name: At_Petals_P Parameter: Tissue Value: Petals vs. Whole plant
  misc_feature: MA Experiment ID: 20001451 Result: Up-regulated in Transcription
  misc_feature: MA Experiment 20001451 PARAMETER Experiment Name: At_Far-red-induction_P Parameter: Age (day) Value: 7
  misc_feature: MA Experiment 20001451 PARAMETER Experiment Name: At_Far-red-induction_P Parameter: Light Value: Far-red vs. White
  misc_feature: MA Experiment 20001451 PARAMETER Experiment Name: At_Far-red-induction_P Parameter: Organism Value: A. thaliana
  misc_feature: MA Experiment 20001451 PARAMETER Experiment Name: At_Far-red-induction_P Parameter: Plant Line Value: Columbia
  misc_feature: MA Experiment 20001451 PARAMETER Experiment Name: At_Far-red-induction_P Parameter: Timepoint (hr) Value: 24
  misc_feature: MA Experiment 20001451 PARAMETER Experiment Name: At_Far-red-induction_P Parameter: Tissue Value: Whole Plant

SEQ ID NO: 34445 - protein, 748 aa, Arabidopsis thaliana; identical to SEQ ID NO: 30855
  peptide (1)..(748): Ceres Seq. ID no. 12327298
  misc_feature (239)..(514): Pfam Name: GMC oxidoreductase Pfam Description: GMC oxidoreductase
  misc_feature (162)..(745): Homolog of NCBI NO: 15234998 NR Description: putative protein; protein id: At4g19380.1
  misc_feature (164)..(744): Homolog of NCBI NO: 37535330 NR Description: putative alcohol oxidase [Oryza sativa (japonica
  misc_feature (161)..(742): Homolog of NCBI NO: 37535334 NR Description: putative oxidase [Oryza sativa (japonica
  misc_feature (162)..(742): Homolog of NCBI NO: 16905151 NR Description: putative alcohol oxidase [Oryza sativa]
  misc_feature (193)..(747): Homolog of NCBI NO: 15219612 NR Description: unknown protein; protein id: At1g03990.1
  misc_feature (9)..(143): Homolog of NCBI NO: 37535318 NR Description: putative alcohol oxidase [Oryza sativa (japonica
  misc_feature (164)..(745): Homolog of NCBI NO: 37535318 NR Description: putative alcohol oxidase [Oryza sativa (japonica
  misc_feature (5)..(747): Homolog of NCBI NO: 25367436 NR Description: hypothetical protein [imported] - Arabidopsis
  misc_feature (73)..(742): Homolog of NCBI NO: 22798796 NR Description: alcohol oxidase [Arabidopsis thaliana]
  misc_feature (30)..(742): Homolog of NCBI NO: 18403753 NR Description: expressed protein

SEQ ID NO: 34446 - protein, 675 aa, Arabidopsis thaliana; identical to SEQ ID NO: 30856
  peptide (1)..(675): Ceres Seq. ID no. 12327299
  misc_feature (166)..(441): Pfam Name: GMC oxidoreductase Pfam Description: GMC oxidoreductase
  misc_feature (89)..(672): Homolog of NCBI NO: 15234998 NR Description: putative protein; protein id: At4g19380.1
  misc_feature (91)..(671): Homolog of NCBI NO: 37535330 NR Description: putative alcohol oxidase [Oryza sativa (japonica
  misc_feature (88)..(669): Homolog of NCBI NO: 37535334 NR Description: putative oxidase [Oryza sativa (japonica
  misc_feature (89)..(669): Homolog of NCBI NO: 16905151 NR Description: putative alcohol oxidase [Oryza sativa]
  misc_feature (120)..(674): Homolog of NCBI NO: 15219612 NR Description: unknown protein; protein id: At1g03990.1
  misc_feature (1)..(70): Homolog of NCBI NO: 37535318 NR Description: putative alcohol oxidase [Oryza sativa (japonica
  misc_feature (91)..(672): Homolog of NCBI NO: 37535318 NR Description: putative alcohol oxidase [Oryza sativa (japonica
  misc_feature (1)..(674): Homolog of NCBI NO: 25367436 NR Description: hypothetical protein [imported] - Arabidopsis
  misc_feature (1)..(669): Homolog of NCBI NO: 22798796 NR Description: alcohol oxidase [Arabidopsis thaliana]
  misc_feature (1)..(669): Homolog of NCBI NO: 18403753 NR Description: expressed protein

SEQ ID NO: 34447 - protein, 657 aa, Arabidopsis thaliana; identical to SEQ ID NO: 30857
  peptide (1)..(657): Ceres Seq. ID no. 12327300
  misc_feature (148)..(423): Pfam Name: GMC oxidoreductase Pfam Description: GMC oxidoreductase
  misc_feature (71)..(654): Homolog of NCBI NO: 15234998 NR Description: putative protein; protein id: At4g19380.1
  misc_feature (73)..(653): Homolog of NCBI NO: 37535330 NR Description: putative alcohol oxidase [Oryza sativa (japonica
  misc_feature (70)..(651): Homolog of NCBI NO: 37535334 NR Description: putative oxidase [Oryza sativa (japonica
  misc_feature (71)..(651): Homolog of NCBI NO: 16905151 NR Description: putative alcohol oxidase [Oryza sativa]
  misc_feature (102)..(656): Homolog of NCBI NO: 15219612 NR Description: unknown protein; protein id: At1g03990.1
  misc_feature (1)..(52): Homolog of NCBI NO: 37535318 NR Description: putative alcohol oxidase [Oryza sativa (japonica
  misc_feature (73)..(654): Homolog of NCBI NO: 37535318 NR Description: putative alcohol oxidase [Oryza sativa (japonica
  misc_feature (1)..(656): Homolog of NCBI NO: 25367436 NR Description: hypothetical protein [imported] - Arabidopsis
  misc_feature (1)..(651): Homolog of NCBI NO: 22798796 NR Description: alcohol oxidase [Arabidopsis thaliana]
  misc_feature (1)..(651): Homolog of NCBI NO: 18403753 NR Description: expressed protein

SEQ ID NO: 34448 - DNA, 841 bp, Arabidopsis thaliana; identical to SEQ ID NO: 30858
  misc_feature (1)..(841): Ceres Seq. ID no. 13591613
  misc_feature: MA Experiment ID: 108435 Result: Up-regulated in Transcription
  misc_feature: MA Experiment 108435 PARAMETER Experiment Name: At_stm_Mutants_cDNA_P Parameter: Plant Line Value: wt Landsburg vs stm
  misc_feature: MA Experiment 108435 PARAMETER Experiment Name: At_stm_Mutants_cDNA_P Parameter: Tissue Value: Shoot Apical Meristem Region
  misc_feature: MA Experiment ID: 108461 Result: Down-regulated in Transcription
  misc_feature: MA Experiment 108461 PARAMETER Experiment Name: At_Germinating_Seeds_cDNA_P Parameter: Age (day) Value: 1 vs. 0
  misc_feature: MA Experiment 108461 PARAMETER Experiment Name: At_Germinating_Seeds_cDNA_P Parameter: Tissue Value: Germinating Seeds
  misc_feature: MA Experiment ID: 108462 Result: Down-regulated in Transcription
  misc_feature: MA Experiment 108462 PARAMETER Experiment Name: At_Germinating_Seeds_cDNA_P Parameter: Age (day) Value: 2 vs. 0
  misc_feature: MA Experiment 108462 PARAMETER Experiment Name: At_Germinating_Seeds_cDNA_P Parameter: Tissue Value: Germinating Seeds
  misc_feature: MA Experiment ID: 108463 Result: Down-regulated in Transcription
  misc_feature: MA Experiment 108463 PARAMETER Experiment Name: At_Germinating_Seeds_cDNA_P Parameter: Age (day) Value: 3 vs. 0
  misc_feature: MA Experiment 108463 PARAMETER Experiment Name: At_Germinating_Seeds_cDNA_P Parameter: Tissue Value: Germinating Seeds
  misc_feature: MA Experiment ID: 108464 Result: Down-regulated in Transcription
  misc_feature: MA Experiment 108464 PARAMETER Experiment Name: At_Germinating_Seeds_cDNA_P Parameter: Age (day) Value: 4 vs. 0
  misc_feature: MA Experiment 108464 PARAMETER Experiment Name: At_Germinating_Seeds_cDNA_P Parameter: Tissue Value: Germinating Seeds
  misc_feature: MA Experiment ID: 108489 Result: Down-regulated in Transcription
  misc_feature: MA Experiment ID: 108595 Result: Up-regulated in Transcription
  misc_feature: MA Experiment 108595 PARAMETER Experiment Name: At_Ler-pi_Ovule_cDNA_P Parameter: Plant Line Value: null
  misc_feature: MA Experiment ID: 20000069 Result: Down-regulated in Transcription
  misc_feature: MA Experiment 20000069 PARAMETER Experiment Name: At_100uM_ABA_Mutants_cDNA_P Parameter: Plant Line Value: CS23
  misc_feature: MA Experiment 20000069 PARAMETER Experiment Name: At_100uM_ABA_Mutants_cDNA_P Parameter: Timepoint (hr) Value: 6
  misc_feature: MA Experiment 20000069 PARAMETER Experiment Name: At_100uM_ABA_Mutants_cDNA_P Parameter: Tissue Value: Aerial
  misc_feature: MA Experiment 20000069 PARAMETER Experiment Name: At_100uM_ABA_Mutants_cDNA_P Parameter: Treatment Value: 100uM ABA vs. No Treatment
  misc_feature: MA Experiment ID: 20000179 Result: Down-regulated in Transcription
  misc_feature: MA Experiment 20000179 PARAMETER Experiment Name: At_Germinating_Seeds_P Parameter: Age (hr) Value: 6 vs. 0
  misc_feature: MA Experiment 20000179 PARAMETER Experiment Name: At_Germinating_Seeds_P Parameter: Tissue Value: Germinating Seeds
  misc_feature: MA Experiment ID: 20000180 Result: Down-regulated in Transcription
  misc_feature: MA Experiment 20000180 PARAMETER Experiment Name: At_Germinating_Seeds_P Parameter: Age (hr) Value: 24 vs. 0
  misc_feature: MA Experiment 20000180 PARAMETER Experiment Name: At_Germinating_Seeds_P Parameter: Tissue Value: Germinating Seeds
  misc_feature: MA Experiment ID: 20000235 Result: Up-regulated in Transcription
  misc_feature: MA Experiment 20000235 PARAMETER Experiment Name: At_Siliques_P Parameter: Age (day) Value: 21
  misc_feature: MA Experiment 20000235 PARAMETER Experiment Name: At_Siliques_P Parameter: Organism Value: A. thaliana
  misc_feature: MA Experiment 20000235 PARAMETER Experiment Name: At_Siliques_P Parameter: Plant Line Value: WS
  misc_feature: MA Experiment 20000235 PARAMETER Experiment Name: At_Siliques_P Parameter: Tissue Value: 5-10mm Siliques vs. Whole Plant
  misc_feature: MA Experiment ID: 20000264 Result: Up-regulated in Transcription
  misc_feature: MA Experiment 20000264 PARAMETER Experiment Name: At_Open_Flower_P Parameter: Age (day) Value: 21
  misc_feature: MA Experiment 20000264 PARAMETER Experiment Name: At_Open_Flower_P Parameter: Plant Line Value: WS
  misc_feature: MA Experiment 20000264 PARAMETER Experiment Name: At_Open_Flower_P Parameter: Tissue Value: Open Flower vs. Whole Plant
  misc_feature: MA Experiment ID: 20000265 Result: Up-regulated in Transcription
  misc_feature: MA Experiment 20000265 PARAMETER Experiment Name: At_Open_Flower_P Parameter: Age (day) Value: 21
  misc_feature: MA Experiment 20000265 PARAMETER Experiment Name: At_Open_Flower_P Parameter: Plant Line Value: WS
  misc_feature: MA Experiment 20000265 PARAMETER Experiment Name: At_Open_Flower_P Parameter: Tissue Value: Closed Flower vs. Whole Plant
  misc_feature: MA Experiment ID: 20000286 Result: Up-regulated in Transcription
  misc_feature: MA Experiment 20000286 PARAMETER Experiment Name: At_Open_Flower_P Parameter: Age (day) Value: 21
  misc_feature: MA Experiment 20000286 PARAMETER Experiment Name: At_Open_Flower_P Parameter: Plant Line Value: WS
  misc_feature: MA Experiment 20000286 PARAMETER Experiment Name: At_Open_Flower_P Parameter: Tissue Value: Half Open vs. Whole Plant
  misc_feature: MA Experiment ID: 20000439 Result: Down-regulated in Transcription
  misc_feature: MA Experiment 20000439 PARAMETER Experiment Name: At_Roots__P Parameter: Age (day) Value: 14 vs. 21
  misc_feature: MA Experiment 20000439 PARAMETER Experiment Name: At_Roots__P Parameter: Organism Value: A. thaliana
  misc_feature: MA Experiment 20000439 PARAMETER Experiment Name: At_Roots__P Parameter: Tissue Value: Roots vs. Whole Plant
  misc_feature: MA Experiment ID: 20000573 Result: Up-regulated in Transcription
  misc_feature: MA Experiment 20000573 PARAMETER Experiment Name: At_100uM_ABA_Mutants__P Parameter: Organism Value: A. thaliana
  misc_feature: MA Experiment 20000573 PARAMETER Experiment Name: At_100uM_ABA_Mutants__P Parameter: Plant Line Value: CS22 vs. Ler wt
  misc_feature: MA Experiment 20000573 PARAMETER Experiment Name: At_100uM_ABA_Mutants__P Parameter: Timepoint (hr) Value: N/A
  misc_feature: MA Experiment 20000573 PARAMETER Experiment Name: At_100uM_ABA_Mutants__P Parameter: Tissue Value: Whole Plant
  misc_feature: MA Experiment 20000573 PARAMETER Experiment Name: At_100uM_ABA_Mutants__P Parameter: Treatment Value: None
  misc_feature: MA Experiment ID: 20000794 Result: Up-regulated in Transcription
  misc_feature: MA Experiment 20000794 PARAMETER Experiment Name: At_Petals_P Parameter: Age (day) Value: 23-25 days
  misc_feature: MA Experiment 20000794 PARAMETER Experiment Name: At_Petals_P Parameter: Plant Line Value: WS
  misc_feature: MA Experiment 20000794 PARAMETER Experiment Name: At_Petals_P Parameter: Tissue Value: Petals vs. Whole plant
  misc_feature: MA Experiment ID: 20001248 Result: Down-regulated in Transcription
  misc_feature: MA Experiment 20001248 PARAMETER Experiment Name: At_Far-red-induction_P Parameter: Age (day) Value: 7
  misc_feature: MA Experiment 20001248 PARAMETER Experiment Name: At_Far-red-induction_P Parameter: Light Value: Far-red vs. White
  misc_feature: MA Experiment 20001248 PARAMETER Experiment Name: At_Far-red-induction_P Parameter: Organism Value: A. thaliana
  misc_feature: MA Experiment 20001248 PARAMETER Experiment Name: At_Far-red-induction_P Parameter: Plant Line Value: Columbia
  misc_feature: MA Experiment 20001248 PARAMETER Experiment Name: At_Far-red-induction_P Parameter: Timepoint (hr) Value: 4
  misc_feature: MA Experiment 20001248 PARAMETER Experiment Name: At_Far-red-induction_P Parameter: Tissue Value: Whole Plant
  misc_feature: MA Experiment ID: 20001457 Result: Down-regulated in Transcription
  misc_feature: MA Experiment 20001457 PARAMETER Experiment Name: At_50mM_NH4NO3_L-to-H_P Parameter: Age (day) Value: Undefined
  misc_feature: MA Experiment 20001457 PARAMETER Experiment Name: At_50mM_NH4NO3_L-to-H_P Parameter: Organism Value: Undefined
  misc_feature: MA Experiment 20001457 PARAMETER Experiment Name: At_50mM_NH4NO3_L-to-H_P Parameter: Plant Line Value: Undefined
  misc_feature: MA Experiment 20001457 PARAMETER Experiment Name: At_50mM_NH4NO3_L-to-H_P Parameter: Timepoint (hr) Value: 0.5
  misc_feature: MA Experiment 20001457 PARAMETER Experiment Name: At_50mM_NH4NO3_L-to-H_P Parameter: Tissue Value: Siliques
  misc_feature: MA Experiment 20001457 PARAMETER Experiment Name: At_50mM_NH4NO3_L-to-H_P Parameter: Treatment Value: 50mM NH4NO3 vs. 100mM Manitol
  misc_feature: MA Experiment ID: 20001759 Result: Down-regulated in Transcription
  misc_feature: MA Experiment 20001759 PARAMETER Experiment Name: At_50mM_NH4NO3_L-to-H_P Parameter: Timepoint (hr) Value: 1
  misc_feature: MA Experiment 20001759 PARAMETER Experiment Name: At_50mM_NH4NO3_L-to-H_P Parameter: Tissue Value: Siliques
  misc_feature: MA Experiment 20001759 PARAMETER Experiment Name: At_50mM_NH4NO3_L-to-H_P Parameter: Treatment Value: 50mM NH4NO3 vs 100mM Mannitol
  misc_feature: MA Experiment ID: 20001906 Result: Up-regulated in Transcription
  misc_feature: MA Experiment 20001906 PARAMETER Experiment Name: At_Drought_Reproduction_P Parameter: Age (day) Value: 35
  misc_feature: MA Experiment 20001906 PARAMETER Experiment Name: At_Drought_Reproduction_P Parameter: Organism Value: A. thaliana
  misc_feature: MA Experiment 20001906 PARAMETER Experiment Name: At_Drought_Reproduction_P Parameter: Plant Line Value: WS
  misc_feature: MA Experiment 20001906 PARAMETER Experiment Name: At_Drought_Reproduction_P Parameter: Timepoint (day) Value: 5
  misc_feature: MA Experiment 20001906 PARAMETER Experiment Name: At_Drought_Reproduction_P Parameter: Tissue Value: Siliques
  misc_feature: MA Experiment 20001906 PARAMETER Experiment Name: At_Drought_Reproduction_P Parameter: Treatment Value: Drought vs. No Drought
  misc_feature: MA Experiment ID: 20001907 Result: Up-regulated in Transcription
  misc_feature: MA Experiment 20001907 PARAMETER Experiment Name: At_Drought_Reproduction_P Parameter: Age (day) Value: 37
  misc_feature: MA Experiment 20001907 PARAMETER Experiment Name: At_Drought_Reproduction_P Parameter: Organism Value: A. thaliana
  misc_feature: MA Experiment 20001907 PARAMETER Experiment Name: At_Drought_Reproduction_P Parameter: Plant Line Value: WS
  misc_feature: MA Experiment 20001907 PARAMETER Experiment Name: At_Drought_Reproduction_P Parameter: Timepoint (day) Value: 7
  misc_feature: MA Experiment 20001907 PARAMETER Experiment Name: At_Drought_Reproduction_P Parameter: Tissue Value: Siliques
  misc_feature: MA Experiment 20001907 PARAMETER Experiment Name: At_Drought_Reproduction_P Parameter: Treatment Value: Drought vs. No Drought
  misc_feature: MA Experiment ID: 20001908 Result: Up-regulated in Transcription
  misc_feature: MA Experiment 20001908 PARAMETER Experiment Name: At_Drought_Reproduction_P Parameter: Age (day) Value: 40
  misc_feature: MA Experiment 20001908 PARAMETER Experiment Name: At_Drought_Reproduction_P Parameter: Organism Value: A. thaliana
  misc_feature: MA Experiment 20001908 PARAMETER Experiment Name: At_Drought_Reproduction_P Parameter: Plant Line Value: WS
  misc_feature: MA Experiment 20001908 PARAMETER Experiment Name: At_Drought_Reproduction_P Parameter: Timepoint (day) Value: 10
  misc_feature: MA Experiment 20001908 PARAMETER Experiment Name: At_Drought_Reproduction_P Parameter: Tissue Value: Siliques
  misc_feature: MA Experiment 20001908 PARAMETER Experiment Name: At_Drought_Reproduction_P Parameter: Treatment Value: Drought vs. No Drought
  misc_feature: MA Experiment ID: 20001911 Result: Up-regulated in Transcription
  misc_feature: MA Experiment 20001911 PARAMETER Experiment Name: At_Drought_Reproduction_P Parameter: Age (day) Value: 40
  misc_feature: MA Experiment 20001911 PARAMETER Experiment Name: At_Drought_Reproduction_P Parameter: Organism Value: A. thaliana
  misc_feature: MA Experiment 20001911 PARAMETER Experiment Name: At_Drought_Reproduction_P Parameter: Plant Line Value: WS
  misc_feature: MA Experiment 20001911 PARAMETER Experiment Name: At_Drought_Reproduction_P Parameter: Timepoint (day) Value: 10
  misc_feature: MA Experiment 20001911 PARAMETER Experiment Name: At_Drought_Reproduction_P Parameter: Tissue Value: Flowers
  misc_feature: MA Experiment 20001911 PARAMETER Experiment Name: At_Drought_Reproduction_P Parameter: Treatment Value: Drought vs. No Drought
  misc_feature: Phenotype: ROSETTE LEAVES Wax-Glossy
  misc_feature: Phenotype: WHOLE PLANT Color-Dark Green
  misc_feature: Phenotype: WHOLE PLANT Size-Small
  misc_feature: Phenotype: WHOLE PLANT Size-Small
  misc_feature: Phenotype: WHOLE PLANT Size-Small
  misc_feature: Phenotype: WHOLE PLANT Size-Small

SEQ ID NO: 34449 - protein, 191 aa, Arabidopsis thaliana; identical to SEQ ID NO: 30859
  peptide (1)..(191): Ceres Seq. ID no. 13591614
  misc_feature (48)..(165): Pfam Name: Oleosin Pfam Description: Oleosin
  misc_feature (37)..(188): Homolog of NCBI NO: 82051 NR Description: lipid body-associated membrane protein - carrot
  misc_feature (19)..(131): Homolog of NCBI NO: 99796 NR Description: major oleosin chain nap-I - rape (fragment)
  misc_feature (32)..(175): Homolog of NCBI NO: 29243355 NR Description: oleosin [Corylus avellana]
  misc_feature (1)..(173): Homolog of NCBI NO: 266690 NR Description: Oleosin 18.2 kDa
  misc_feature (42)..(176): Homolog of NCBI NO: 15232141 NR Description: oleosin [Arabidopsis thaliana]
  misc_feature (12)..(183): Homolog of NCBI NO: 2129658 NR Description: oleosin, 21K - Arabidopsis thaliana
  misc_feature (12)..(183): Homolog of NCBI NO: 15242686 NR Description: oleosin [Arabidopsis thaliana]
  misc_feature (1)..(191): Homolog of NCBI NO: 21554017 NR Description: oleosin isoform [Arabidopsis thaliana]
  misc_feature (1)..(190): Homolog of NCBI NO: 1592686 NR Description: oleosin type4 [Arabidopsis thaliana]
  misc_feature (1)..(191): Homolog of NCBI NO: 15232227 NR Description: oleosin [Arabidopsis thaliana]

SEQ ID NO: 34450 - DNA, 665 bp, Arabidopsis thaliana; identical to SEQ ID NO: 30860
  misc_feature (1)..(665): Ceres Seq. ID no. 12323110
  misc_feature: MA Experiment ID: 108434 Result: Up-regulated in Transcription
  misc_feature: MA Experiment 108434 PARAMETER Experiment Name: At_Root_Tips_cDNA_P Parameter: Tissue Value: Root Tips
  misc_feature: MA Experiment ID: 108435 Result: Up-regulated in Transcription
  misc_feature: MA Experiment 108435 PARAMETER Experiment Name: At_stm_Mutants_cDNA_P Parameter: Plant Line Value: wt Landsburg vs stm
  misc_feature: MA Experiment 108435 PARAMETER Experiment Name: At_stm_Mutants_cDNA_P Parameter: Tissue Value: Shoot Apical Meristem Region
  misc_feature: MA Experiment ID: 108462 Result: Down-regulated in Transcription
  misc_feature: MA Experiment 108462 PARAMETER Experiment Name: At_Germinating_Seeds_cDNA_P Parameter: Age (day) Value: 2 vs. 0
  misc_feature: MA Experiment 108462 PARAMETER Experiment Name: At_Germinating_Seeds_cDNA_P Parameter: Tissue Value: Germinating Seeds
  misc_feature: MA Experiment ID: 108463 Result: Down-regulated in Transcription
  misc_feature: MA Experiment 108463 PARAMETER Experiment Name: At_Germinating_Seeds_cDNA_P Parameter: Age (day) Value: 3 vs. 0
  misc_feature: MA Experiment 108463 PARAMETER Experiment Name: At_Germinating_Seeds_cDNA_P Parameter: Tissue Value: Germinating Seeds
  misc_feature: MA Experiment ID: 108488 Result: Up-regulated in Transcription
  misc_feature: MA Experiment ID: 108573 Result: Down-regulated in Transcription
  misc_feature: MA Experiment 108573 PARAMETER Experiment Name: At_Drought_cDNA_P Parameter: Timepoint (hr) Value: 6
  misc_feature: MA Experiment 108573 PARAMETER Experiment Name: At_Drought_cDNA_P Parameter: Tissue Value: Aerial
  misc_feature: MA Experiment 108573 PARAMETER Experiment Name: At_Drought_cDNA_P Parameter: Treatment Value: Drought vs. No Drought
  misc_feature: MA Experiment ID: 20000227 Result: Up-regulated in Transcription
  misc_feature: MA Experiment 20000227 PARAMETER Experiment Name: At_Root-Tips-vs-Tops_P Parameter: Tissue Value: Root Tips vs. Root Tops
  misc_feature: MA Experiment ID: 20000234 Result: Up-regulated in Transcription
  misc_feature: MA Experiment 20000234 PARAMETER Experiment Name: At_Siliques_P Parameter: Age (day) Value: 21
  misc_feature: MA Experiment 20000234 PARAMETER Experiment Name: At_Siliques_P Parameter: Organism Value: A. thaliana
  misc_feature: MA Experiment 20000234 PARAMETER Experiment Name: At_Siliques_P Parameter: Plant Line Value: WS
  misc_feature: MA Experiment 20000234 PARAMETER Experiment Name: At_Siliques_P Parameter: Tissue Value: Less Than 5mm Siliques vs. Whole Plant
  misc_feature: MA Experiment ID: 20000437 Result: Down-regulated in Transcription
  misc_feature: MA Experiment 20000437 PARAMETER Experiment Name: At_Drought_P Parameter: Age (day) Value: 8
  misc_feature: MA Experiment 20000437 PARAMETER Experiment Name: At_Drought_P Parameter: Organism Value: A. thaliana
  misc_feature: MA Experiment 20000437 PARAMETER Experiment Name: At_Drought_P Parameter: Plant Line Value: WS
  misc_feature: MA Experiment 20000437 PARAMETER Experiment Name: At_Drought_P Parameter: Timepoint (hr) Value: 24
  misc_feature: MA Experiment 20000437 PARAMETER Experiment Name: At_Drought_P Parameter: Tissue Value: Whole Plant
  misc_feature: MA Experiment 20000437 PARAMETER Experiment Name: At_Drought_P Parameter: Treatment Value: Drought vs. No Drought
  misc_feature: MA Experiment ID: 20001557 Result: Up-regulated in Transcription
  misc_feature: MA Experiment 20001557 PARAMETER Experiment Name: At_Drought_Soil_Dry_P Parameter: Age (day) Value: 27
  misc_feature: MA Experiment 20001557 PARAMETER Experiment Name: At_Drought_Soil_Dry_P Parameter: Organism Value: A. thaliana
  misc_feature: MA Experiment 20001557 PARAMETER Experiment Name: At_Drought_Soil_Dry_P Parameter: Plant Line Value: WS
  misc_feature: MA Experiment 20001557 PARAMETER Experiment Name: At_Drought_Soil_Dry_P Parameter: Post Timepoint (hr) Value: 3
  misc_feature: MA Experiment 20001557 PARAMETER Experiment Name: At_Drought_Soil_Dry_P Parameter: Post-Treatment Value: Re-Water vs. No Drought
  misc_feature: MA Experiment 20001557 PARAMETER Experiment Name: At_Drought_Soil_Dry_P Parameter: Timepoint (day) Value: 13
  misc_feature: MA Experiment 20001557 PARAMETER Experiment Name: At_Drought_Soil_Dry_P Parameter: Treatment Value: Drought vs. No Drought
  misc_feature: MA Experiment ID: 20001558 Result: Up-regulated in Transcription
  misc_feature: MA Experiment 20001558 PARAMETER Experiment Name: At_Drought_Soil_Dry_P Parameter: Age (day) Value: 27
  misc_feature: MA Experiment 20001558 PARAMETER Experiment Name: At_Drought_Soil_Dry_P Parameter: Organism Value: A. thaliana
  misc_feature: MA Experiment 20001558 PARAMETER Experiment Name: At_Drought_Soil_Dry_P Parameter: Plant Line Value: WS
  misc_feature: MA Experiment 20001558 PARAMETER Experiment Name: At_Drought_Soil_Dry_P Parameter: Post Timepoint (hr) Value: 6
  misc_feature: MA Experiment 20001558 PARAMETER Experiment Name: At_Drought_Soil_Dry_P Parameter: Post-Treatment Value: Re-Water vs. No Drought
  misc_feature: MA Experiment 20001558 PARAMETER Experiment Name: At_Drought_Soil_Dry_P Parameter: Timepoint (day) Value: 13
  misc_feature: MA Experiment 20001558 PARAMETER Experiment Name: At_Drought_Soil_Dry_P Parameter: Treatment Value: Drought vs. No Drought
  misc_feature: MA Experiment ID: 20001560 Result: Up-regulated in Transcription
  misc_feature: MA Experiment 20001560 PARAMETER Experiment Name: At_Drought_Soil_Dry_P Parameter: Age (day) Value: 28
  misc_feature: MA Experiment 20001560 PARAMETER Experiment Name: At_Drought_Soil_Dry_P Parameter: Organism Value: A. thaliana
  misc_feature: MA Experiment 20001560 PARAMETER Experiment Name: At_Drought_Soil_Dry_P Parameter: Plant Line Value: WS
  misc_feature: MA Experiment 20001560 PARAMETER Experiment Name: At_Drought_Soil_Dry_P Parameter: Post Timepoint (hr) Value: None
  misc_feature: MA Experiment 20001560 PARAMETER Experiment Name: At_Drought_Soil_Dry_P Parameter: Post-Treatment Value: None
  misc_feature: MA Experiment 20001560 PARAMETER Experiment Name: At_Drought_Soil_Dry_P Parameter: Timepoint (day) Value: 14
  misc_feature: MA Experiment 20001560 PARAMETER Experiment Name: At_Drought_Soil_Dry_P Parameter: Treatment Value: Drought vs. No Drought
  misc_feature: MA Experiment ID: 20001757 Result: Up-regulated in Transcription
  misc_feature: MA Experiment 20001757 PARAMETER Experiment Name: At_50mM_NH4NO3_L-to-H_P Parameter: Timepoint (hr) Value: 6
  misc_feature: MA Experiment 20001757 PARAMETER Experiment Name: At_50mM_NH4NO3_L-to-H_P Parameter: Tissue Value: Leaf
  misc_feature: MA Experiment 20001757 PARAMETER Experiment Name: At_50mM_NH4NO3_L-to-H_P Parameter: Treatment Value: 50mM NH4NO3 vs 100mM Mannitol

SEQ ID NO: 34451 - protein, 153 aa, Arabidopsis thaliana; identical to SEQ ID NO: 30861
  peptide (1)..(153): Ceres Seq. ID no. 12323111
  misc_feature (5)..(147): Pfam Name: Ribosomal protein L13e Pfam Description: Ribosomal protein L13e
  misc_feature (1)..(151): Homolog of NCBI NO: 12580867 NR Description: 60S ribosomal protein L13E [Picea abies]
  misc_feature (1)..(138): Homolog of NCBI NO: 15237847 NR Description: 60S ribosomal protein L13
  misc_feature (1)..(138): Homolog of NCBI NO: 21537149 NR Description: 60S ribosomal protein L13, BBC1 protein
  misc_feature (1)..(138): Homolog of NCBI NO: 15229064 NR Description: 60S ribosomal protein L13, BBC1 protein
  misc_feature (1)..(147): Homolog of NCBI NO: 7441103 NR Description: ribosomal protein L13.B, cytosolic - rape
  misc_feature (1)..(147): Homolog of NCBI NO: 7441102 NR Description: ribosomal protein L13.A, cytosolic - rape
  misc_feature (1)..(147): Homolog of NCBI NO: 730449 NR Description: 60S RIBOSOMAL PROTEIN L13-1 (COLD INDUCED PROTEIN
  misc_feature (1)..(147): Homolog of NCBI NO: 730450 NR Description: 60S RIBOSOMAL PROTEIN L13-2 (COLD INDUCED PROTEIN
  misc_feature (86)..(153): Homolog of NCBI NO: 1350664 NR Description: 60S RIBOSOMAL PROTEIN L13 (CLONE 6.2.1)
  misc_feature (9)..(99): Homolog of NCBI NO: 1350664 NR Description: 60S RIBOSOMAL PROTEIN L13 (CLONE 6.2.1)

SEQ ID NO: 34452 - protein, 88 aa, Arabidopsis thaliana; identical to SEQ ID NO: 30862
  peptide (1)..(88): Ceres Seq. ID no. 12323112
  misc_feature (1)..(82): Pfam Name: Ribosomal protein L13e Pfam Description: Ribosomal protein L13e
  misc_feature (1)..(86): Homolog of NCBI NO: 12580867 NR Description: 60S ribosomal protein L13E [Picea abies]
  misc_feature (1)..(73): Homolog of NCBI NO: 15237847 NR Description: 60S ribosomal protein L13
  misc_feature (1)..(73): Homolog of NCBI NO: 21537149 NR Description: 60S ribosomal protein L13, BBC1 protein
  misc_feature (1)..(73): Homolog of NCBI NO: 15229064 NR Description: 60S ribosomal protein L13, BBC1 protein
  misc_feature (1)..(82): Homolog of NCBI NO: 7441103 NR Description: ribosomal protein L13.B, cytosolic - rape
  misc_feature (1)..(82): Homolog of NCBI NO: 7441102 NR Description: ribosomal protein L13.A, cytosolic - rape
  misc_feature (1)..(82): Homolog of NCBI NO: 730449 NR Description: 60S RIBOSOMAL PROTEIN L13-1 (COLD INDUCED PROTEIN
  misc_feature (1)..(82): Homolog of NCBI NO: 730450 NR Description: 60S RIBOSOMAL PROTEIN L13-2 (COLD INDUCED PROTEIN
  misc_feature (21)..(88): Homolog of NCBI NO: 1350664 NR Description: 60S RIBOSOMAL PROTEIN L13 (CLONE 6.2.1)
  misc_feature (1)..(34): Homolog of NCBI NO: 1350664 NR Description: 60S RIBOSOMAL PROTEIN L13 (CLONE 6.2.1)

SEQ ID NO: 34453 - DNA, 1593 bp, Arabidopsis thaliana; identical to SEQ ID NO: 30863
  misc_feature (1)..(1593): Ceres Seq. ID no. 12322908
  misc_feature: MA Experiment ID: 108577 Result: Down-regulated in Transcription
  misc_feature: MA Experiment 108577 PARAMETER Experiment Name: At_42deg_Heat_cDNA_P Parameter: Temperature (deg C) Value: 42 vs. 22
  misc_feature: MA Experiment 108577 PARAMETER Experiment Name: At_42deg_Heat_cDNA_P Parameter: Timepoint (hr) Value: 6
  misc_feature: MA Experiment 108577 PARAMETER Experiment Name: At_42deg_Heat_cDNA_P Parameter: Tissue Value: Aerial
  misc_feature: MA Experiment ID: 108585 Result: Up-regulated in Transcription
  misc_feature: MA Experiment 108585 PARAMETER Experiment Name: At_5mM_NaNP_cDNA_P Parameter: Timepoint (hr) Value: 6
  misc_feature: MA Experiment 108585 PARAMETER Experiment Name: At_5mM_NaNP_cDNA_P Parameter: Tissue Value: Aerial
  misc_feature: MA Experiment 108585 PARAMETER Experiment Name: At_5mM_NaNP_cDNA_P Parameter: Treatment Value: null
  misc_feature: MA Experiment ID: 20000171 Result: Down-regulated in Transcription
  misc_feature: MA Experiment 20000171 PARAMETER Experiment Name: At_42deg_Heat_P Parameter: Age (day) Value: 14
  misc_feature: MA Experiment 20000171 PARAMETER Experiment Name: At_42deg_Heat_P Parameter: Organism Value: A. thaliana
  misc_feature: MA Experiment 20000171 PARAMETER Experiment Name: At_42deg_Heat_P Parameter: Plant Line Value: WS
  misc_feature: MA Experiment 20000171 PARAMETER Experiment Name: At_42deg_Heat_P Parameter: Temperature (deg C) Value: 42 vs. 22
  misc_feature: MA Experiment 20000171 PARAMETER Experiment Name: At_42deg_Heat_P Parameter: Timepoint (hr) Value: 1
  misc_feature: MA Experiment 20000171 PARAMETER Experiment Name: At_42deg_Heat_P Parameter: Tissue Value: Aerial
  misc_feature: MA Experiment ID: 20000184 Result: Down-regulated in Transcription
  misc_feature: MA Experiment 20000184 PARAMETER Experiment Name: At_Shoots__P Parameter: Age (day) Value: 7
  misc_feature: MA Experiment 20000184 PARAMETER Experiment Name: At_Shoots__P Parameter: Tissue Value: Shoots vs. Whole Plant

SEQ ID NO: 34454 - protein, 307 aa, Arabidopsis thaliana; identical to SEQ ID NO: 30864
  peptide (1)..(307): Ceres Seq. ID no. 12322909
  misc_feature (118)..(182): Pfam Name: DHHC zinc finger domain Pfam Description: DHHC zinc finger domain
  misc_feature (10)..(280): Homolog of NCBI NO: 12856270 NR Description: unnamed protein product [Mus musculus]
  misc_feature (10)..(280): Homolog of NCBI NO: 31560054 NR Description: RIKEN cDNA 5033406L14 [Mus musculus]
  misc_feature (218)..(269): Homolog of NCBI NO: 18411456 NR Description: hypothetical protein; protein id: At4g00840.1
  misc_feature (73)..(232): Homolog of NCBI NO: 18411456 NR Description: hypothetical protein; protein id: At4g00840.1
  misc_feature (7)..(307): Homolog of NCBI NO: 7486880 NR Description: hypothetical protein T12H17.140 - Arabidopsis
  misc_feature (8)..(307): Homolog of NCBI NO: 18416000 NR Description: Expressed protein
  misc_feature (8)..(307): Homolog of NCBI NO: 21593364 NR Description: unknown [Arabidopsis thaliana]
  misc_feature (8)..(126): Homolog of NCBI NO: 11358343 NR Description: hypothetical protein T4C21.210 - Arabidopsis
  misc_feature (152)..(307): Homolog of NCBI NO: 11358343 NR Description: hypothetical protein T4C21.210 - Arabidopsis
  misc_feature (1)..(307): Homolog of NCBI NO: 22331887 NR Description: putative protein

SEQ ID NO: 34455 - protein, 300 aa, Arabidopsis thaliana; identical to SEQ ID NO: 30865
  peptide (1)..(300): Ceres Seq. ID no. 12322910
  misc_feature (111)..(175): Pfam Name: DHHC zinc finger domain Pfam Description: DHHC zinc finger domain
  misc_feature (3)..(273): Homolog of NCBI NO: 12856270 NR Description: unnamed protein product [Mus musculus]
  misc_feature (3)..(273): Homolog of NCBI NO: 31560054 NR Description: RIKEN cDNA 5033406L14 [Mus musculus]
  misc_feature (211)..(262): Homolog of NCBI NO: 18411456 NR Description: hypothetical protein; protein id: At4g00840.1
  misc_feature (66)..(225): Homolog of NCBI NO: 18411456 NR Description: hypothetical protein; protein id: At4g00840.1
  misc_feature (1)..(300): Homolog of NCBI NO: 7486880 NR Description: hypothetical protein T12H17.140 - Arabidopsis
  misc_feature (1)..(300): Homolog of NCBI NO: 18416000 NR Description: Expressed protein
  misc_feature (1)..(300): Homolog of NCBI NO: 21593364 NR Description: unknown [Arabidopsis thaliana]
  misc_feature (1)..(119): Homolog of NCBI NO: 11358343 NR Description: hypothetical protein T4C21.210 - Arabidopsis
  misc_feature (145)..(300): Homolog of NCBI NO: 11358343 NR Description: hypothetical protein T4C21.210 - Arabidopsis
  misc_feature (1)..(300): Homolog of NCBI NO: 22331887 NR Description: putative protein

SEQ ID NO: 34456 - protein, 282 aa, Arabidopsis thaliana; identical to SEQ ID NO: 30866
  peptide (1)..(282): Ceres Seq. ID no. 12322911
  misc_feature (93)..(157): Pfam Name: DHHC zinc finger domain Pfam Description: DHHC zinc finger domain
  misc_feature (1)..(255): Homolog of NCBI NO: 12856270 NR Description: unnamed protein product [Mus musculus]
  misc_feature (1)..(255): Homolog of NCBI NO: 31560054 NR Description: RIKEN cDNA 5033406L14 [Mus musculus]
  misc_feature (193)..(244): Homolog of NCBI NO: 18411456 NR Description: hypothetical protein; protein id: At4g00840.1
  misc_feature (48)..(207): Homolog of NCBI NO: 18411456 NR Description: hypothetical protein; protein id: At4g00840.1
  misc_feature (1)..(282): Homolog of NCBI NO: 7486880 NR Description: hypothetical protein T12H17.140 - Arabidopsis
  misc_feature (1)..(282): Homolog of NCBI NO: 18416000 NR Description: Expressed protein
  misc_feature (1)..(282): Homolog of NCBI NO: 21593364 NR Description: unknown [Arabidopsis thaliana]
  misc_feature (1)..(101): Homolog of NCBI NO: 11358343 NR Description: hypothetical protein T4C21.210 - Arabidopsis
  misc_feature (127)..(282): Homolog of NCBI NO: 11358343 NR Description: hypothetical protein T4C21.210 - Arabidopsis
  misc_feature (1)..(282): Homolog of NCBI NO: 22331887 NR Description: putative protein

SEQ ID NO: 34457 - DNA, 838 bp, Arabidopsis thaliana; identical to SEQ ID NO: 30867
  misc_feature (1)..(838): Ceres Seq. ID no. 12335427
  misc_feature: MA Experiment ID: 108573 Result: Up-regulated in Transcription
  misc_feature: MA Experiment 108573 PARAMETER Experiment Name: At_Drought_cDNA_P Parameter: Timepoint (hr) Value: 6
  misc_feature: MA Experiment 108573 PARAMETER Experiment Name: At_Drought_cDNA_P Parameter: Tissue Value: Aerial
  misc_feature: MA Experiment 108573 PARAMETER Experiment Name: At_Drought_cDNA_P Parameter: Treatment Value: Drought vs. No Drought
  misc_feature: MA Experiment ID: 108577 Result: Down-regulated in Transcription
  misc_feature: MA Experiment 108577 PARAMETER Experiment Name: At_42deg_Heat_cDNA_P Parameter: Temperature (deg C) Value: 42 vs. 22
  misc_feature: MA Experiment 108577 PARAMETER Experiment Name: At_42deg_Heat_cDNA_P Parameter: Timepoint (hr) Value: 6
  misc_feature: MA Experiment 108577 PARAMETER Experiment Name: At_42deg_Heat_cDNA_P Parameter: Tissue Value: Aerial
  misc_feature: MA Experiment ID: 20000179 Result: Up-regulated in Transcription
  misc_feature: MA Experiment 20000179 PARAMETER Experiment Name: At_Germinating_Seeds_P Parameter: Age (hr) Value: 6 vs. 0
  misc_feature: MA Experiment 20000179 PARAMETER Experiment Name: At_Germinating_Seeds_P Parameter: Tissue Value: Germinating Seeds
  misc_feature: MA Experiment ID: 20000180 Result: Up-regulated in Transcription
  misc_feature: MA Experiment 20000180 PARAMETER Experiment Name: At_Germinating_Seeds_P Parameter: Age (hr) Value: 24 vs. 0
  misc_feature: MA Experiment 20000180 PARAMETER Experiment Name: At_Germinating_Seeds_P Parameter: Tissue Value: Germinating Seeds
  misc_feature: MA Experiment ID: 20000224 Result: Down-regulated in Transcription

SEQ ID NO: 34458 - protein, 204 aa, Arabidopsis thaliana; identical to SEQ ID NO: 30868
  peptide (1)..(204): Ceres Seq. ID no. 12335428
  misc_feature (58)..(203): Pfam Name: Sybindin-like family Pfam Description: Sybindin-like family
  misc_feature (59)..(202): Homolog of NCBI NO: 19113462 NR Description: hypothetical protein [Schizosaccharomyces pombe]
  misc_feature (128)..(204): Homolog of NCBI NO: 19115000 NR Description: conserved hypothetical protein
  misc_feature (88)..(203): Homolog of NCBI NO: 40740926 NR Description: hypothetical protein AN8828.2 [Aspergillus
  misc_feature (59)..(204): Homolog of NCBI NO: 19114985 NR Description: hypothetical protein [Schizosaccharomyces pombe]
  misc_feature (84)..(203): Homolog of NCBI NO: 28828451 NR Description: similar to Homo sapiens (Human). MUM2 protein
  misc_feature (61)..(201): Homolog of NCBI NO: 24651330 NR Description: CG1359-PA [Drosophila melanogaster]
  misc_feature (59)..(203): Homolog of NCBI NO: 10864021 NR Description: MUM2 protein [Homo sapiens]
  misc_feature (59)..(203): Homolog of NCBI NO: 20881775 NR Description: similar to MUM2 protein [Homo sapiens] [Mus
  misc_feature (43)..(203): Homolog of NCBI NO: 34914656 NR Description: P0504D03.19 [Oryza sativa (japonica
  misc_feature (36)..(204): Homolog of NCBI NO: 15223752 NR Description: unknown protein; protein id: At1g51160.1

SEQ ID NO: 34459 - protein, 169 aa, Arabidopsis thaliana; identical to SEQ ID NO: 24678
  peptide (1)..(169): Ceres Seq. ID no. 12335429
  misc_feature (23)..(168): Pfam Name: Sybindin-like family Pfam Description: Sybindin-like family
  misc_feature (24)..(167): Homolog of NCBI NO: 19113462 NR Description: hypothetical protein [Schizosaccharomyces pombe]
  misc_feature (93)..(169): Homolog of NCBI NO: 19115000 NR Description: conserved hypothetical protein
  misc_feature (53)..(168): Homolog of NCBI NO: 40740926 NR Description: hypothetical protein AN8828.2 [Aspergillus
  misc_feature (24)..(169): Homolog of NCBI NO: 19114985 NR Description: hypothetical protein [Schizosaccharomyces pombe]
  misc_feature (49)..(168): Homolog of NCBI NO: 28828451 NR Description: similar to Homo sapiens (Human). MUM2 protein
  misc_feature (26)..(166): Homolog of NCBI NO: 24651330 NR Description: CG1359-PA [Drosophila melanogaster]
  misc_feature (24)..(168): Homolog of NCBI NO: 10864021 NR Description: MUM2 protein [Homo sapiens]
  misc_feature (24)..(168): Homolog of NCBI NO: 20881775 NR Description: similar to MUM2 protein [Homo sapiens] [Mus
  misc_feature (8)..(168): Homolog of NCBI NO: 34914656 NR Description: P0504D03.19 [Oryza sativa (japonica
  misc_feature (1)..(169): Homolog of NCBI NO: 15223752 NR Description: unknown protein; protein id: At1g51160.1

SEQ ID NO: 34460 - protein, 145 aa, Arabidopsis thaliana; identical to SEQ ID NO: 24679
  peptide (1)..(145): Ceres Seq. ID no. 12335430
  misc_feature (1)..(144): Pfam Name: Sybindin-like family Pfam Description: Sybindin-like family
  misc_feature (1)..(143): Homolog of NCBI NO: 19113462 NR Description: hypothetical protein [Schizosaccharomyces pombe]
  misc_feature (69)..(145): Homolog of NCBI NO: 19115000 NR Description: conserved hypothetical protein
  misc_feature (29)..(144): Homolog of NCBI NO: 40740926 NR Description: hypothetical protein AN8828.2 [Aspergillus
  misc_feature (1)..(145): Homolog of NCBI NO: 19114985 NR Description: hypothetical protein [Schizosaccharomyces pombe]
  misc_feature (25)..(144): Homolog of NCBI NO: 28828451 NR Description: similar to Homo sapiens (Human). MUM2 protein
  misc_feature (2)..(142): Homolog of NCBI NO: 24651330 NR Description: CG1359-PA [Drosophila melanogaster]
  misc_feature (1)..(144): Homolog of NCBI NO: 10864021 NR Description: MUM2 protein [Homo sapiens]
  misc_feature (1)..(144): Homolog of NCBI NO: 20881775 NR Description: similar to MUM2 protein [Homo sapiens] [Mus
  misc_feature (1)..(144): Homolog of NCBI NO: 34914656 NR Description: P0504D03.19 [Oryza sativa (japonica
  misc_feature (1)..(145): Homolog of NCBI NO: 15223752 NR Description: unknown protein; protein id: At1g51160.1

SEQ ID NO: 34461 - DNA, 776 bp, Arabidopsis thaliana; identical to SEQ ID NO: 30871
  misc_feature (1)..(776): Ceres Seq. ID no. 12332230
  misc_feature: MA Experiment ID: 108433 Result: Up-regulated in Transcription
  misc_feature: MA Experiment 108433 PARAMETER Experiment Name: At_rhl_Mutant2_cDNA_P Parameter: Age (day) Value: 7
  misc_feature: MA Experiment 108433 PARAMETER Experiment Name: At_rhl_Mutant2_cDNA_P Parameter: Organism Value: A. thaliana
  misc_feature: MA Experiment 108433 PARAMETER Experiment Name: At_rhl_Mutant2_cDNA_P Parameter: Plant Line Value: rhl Mutant vs. wt landsburg
  misc_feature: MA Experiment 108433 PARAMETER Experiment Name: At_rhl_Mutant2_cDNA_P Parameter: Tissue Value: Roots
  misc_feature: MA Experiment ID: 108435 Result: Down-regulated in Transcription
  misc_feature: MA Experiment 108435 PARAMETER Experiment Name: At_stm_Mutants_cDNA_P Parameter: Plant Line Value: wt Landsburg vs stm
  misc_feature: MA Experiment 108435 PARAMETER Experiment Name: At_stm_Mutants_cDNA_P Parameter: Tissue Value: Shoot Apical Meristem Region
  misc_feature: MA Experiment ID: 20000439 Result: Down-regulated in Transcription
  misc_feature: MA Experiment 20000439 PARAMETER Experiment Name: At_Roots__P Parameter: Age (day) Value: 14 vs. 21
  misc_feature: MA Experiment 20000439 PARAMETER Experiment Name: At_Roots__P Parameter: Organism Value: A. thaliana
  misc_feature: MA Experiment 20000439 PARAMETER Experiment Name: At_Roots__P Parameter: Tissue Value: Roots vs. Whole Plant
  misc_feature: MA Experiment ID: 20000495 Result: Down-regulated in Transcription
  misc_feature: MA Experiment 20000495 PARAMETER Experiment Name: At_Guard_Cells_P Parameter: Harvest Date Value: 8/2/2002
  misc_feature: MA Experiment 20000495 PARAMETER Experiment Name: At_Guard_Cells_P Parameter: Organism Value: A. thaliana
  misc_feature: MA Experiment 20000495 PARAMETER Experiment Name: At_Guard_Cells_P Parameter: Tissue Value: Guard Cells vs. Leaves
  misc_feature: MA Experiment ID: 20000573 Result: Up-regulated in Transcription
  misc_feature: MA Experiment 20000573 PARAMETER Experiment Name: At_100uM_ABA_Mutants__P Parameter: Organism Value: A. thaliana
  misc_feature: MA Experiment 20000573 PARAMETER Experiment Name: At_100uM_ABA_Mutants__P Parameter: Plant Line Value: CS22 vs. Ler wt
  misc_feature: MA Experiment 20000573 PARAMETER Experiment Name: At_100uM_ABA_Mutants__P Parameter: Timepoint (hr) Value: N/A
  misc_feature: MA Experiment 20000573 PARAMETER Experiment Name: At_100uM_ABA_Mutants__P Parameter: Tissue Value: Whole Plant
  misc_feature: MA Experiment 20000573 PARAMETER Experiment Name: At_100uM_ABA_Mutants__P Parameter: Treatment Value: None
  misc_feature: MA Experiment ID: 20000574 Result: Up-regulated in Transcription
  misc_feature: MA Experiment 20000574 PARAMETER Experiment Name: At_100uM_ABA_Mutants__P Parameter: Organism Value: A. thaliana
  misc_feature: MA Experiment 20000574 PARAMETER Experiment Name: At_100uM_ABA_Mutants__P Parameter: Plant Line Value: CS23 vs. Ler wt
  misc_feature: MA Experiment 20000574 PARAMETER Experiment Name: At_100uM_ABA_Mutants__P Parameter: Timepoint (hr) Value: N/A
  misc_feature: MA Experiment 20000574 PARAMETER Experiment Name: At_100uM_ABA_Mutants__P Parameter: Tissue Value: Whole Plant
  misc_feature: MA Experiment 20000574 PARAMETER Experiment Name: At_100uM_ABA_Mutants__P Parameter: Treatment Value: None

SEQ ID NO: 34462 - protein, 165 aa, Arabidopsis thaliana; identical to SEQ ID NO: 30872
  peptide (1)..(165): Ceres Seq. ID no. 12332231
  misc_feature (68)..(158): Pfam Name: Transcriptional Coactivator p15 (PC4) Pfam Description: Transcriptional Coactivator p15 (PC4)
  misc_feature (136)..(165): Homolog of NCBI NO: 7485280 NR Description: hypothetical protein A_TM018A10.1 - Arabidopsis
  misc_feature (1)..(59): Homolog of NCBI NO: 7485280 NR Description: hypothetical protein A_TM018A10.1 - Arabidopsis
  misc_feature (88)..(155): Homolog of NCBI NO: 40739125 NR Description: hypothetical protein AN5806.2 [Aspergillus
  misc_feature (65)..(161): Homolog of NCBI NO: 15242365 NR Description: putative transcriptional co-activator (KIWI)
  misc_feature (1)..(93): Homolog of NCBI NO: 34910378 NR Description: P0684B02.23 [Oryza sativa (japonica
  misc_feature (1)..(165): Homolog of NCBI NO: 16610191 NR Description: PBF68 protein [Nicotiana tabacum]
  misc_feature (1)..(165): Homolog of NCBI NO: 30678785 NR Description: contains similarity to gag proteins [Arabidopsis
  misc_feature (62)..(161): Homolog of NCBI NO: 34910378 NR Description: P0684B02.23 [Oryza sativa (japonica
  misc_feature (1)..(165): Homolog of NCBI NO: 13699910 NR Description: putative transcriptional coactivator [Brassica
  misc_feature (1)..(165): Homolog of NCBI NO: 15236980 NR Description: putative protein

SEQ ID NO: 34463 - protein, 144 aa, Arabidopsis thaliana; identical to SEQ ID NO: 30873
  peptide (1)..(144): Ceres Seq. ID no. 12332232
  misc_feature (47)..(137): Pfam Name: Transcriptional Coactivator p15 (PC4) Pfam Description: Transcriptional Coactivator p15 (PC4)
  misc_feature (115)..(144): Homolog of NCBI NO: 7485280 NR Description: hypothetical protein A_TM018A10.1 - Arabidopsis
  misc_feature (1)..(38): Homolog of NCBI NO: 7485280 NR Description: hypothetical protein A_TM018A10.1 - Arabidopsis
  misc_feature (67)..(134): Homolog of NCBI NO: 40739125 NR Description: hypothetical protein AN5806.2 [Aspergillus
  misc_feature (44)..(140): Homolog of NCBI NO: 15242365 NR Description: putative transcriptional co-activator (KIWI)
  misc_feature (1)..(72): Homolog of NCBI NO: 34910378 NR Description: P0684B02.23 [Oryza sativa (japonica
  misc_feature (1)..(144): Homolog of NCBI NO: 16610191 NR Description: PBF68 protein [Nicotiana tabacum]
  misc_feature (1)..(144): Homolog of NCBI NO: 30678785 NR Description: contains similarity to gag proteins [Arabidopsis
  misc_feature (41)..(140): Homolog of NCBI NO: 34910378 NR Description: P0684B02.23 [Oryza sativa (japonica
  misc_feature (1)..(144): Homolog of NCBI NO: 13699910 NR Description: putative transcriptional coactivator [Brassica
  misc_feature (1)..(144): Homolog of NCBI NO: 15236980 NR Description: putative protein

SEQ ID NO: 34464 - DNA, 834 bp, Arabidopsis thaliana; identical to SEQ ID NO: 30874
  misc_feature (1)..(834): Ceres Seq. ID no. 13489264
  misc_feature: MA Experiment ID: 108434 Result: Down-regulated in Transcription
  misc_feature: MA Experiment 108434 PARAMETER Experiment Name: At_Root_Tips_cDNA_P Parameter: Tissue Value: Root Tips
  misc_feature: MA Experiment ID: 108488 Result: Down-regulated in Transcription
  misc_feature: MA Experiment ID: 108573 Result: Up-regulated in Transcription
  misc_feature: MA Experiment 108573 PARAMETER Experiment Name: At_Drought_cDNA_P Parameter: Timepoint (hr) Value: 6
  misc_feature: MA Experiment 108573 PARAMETER Experiment Name: At_Drought_cDNA_P Parameter: Tissue Value: Aerial
  misc_feature: MA Experiment 108573 PARAMETER Experiment Name: At_Drought_cDNA_P Parameter: Treatment Value: Drought vs. No Drought
  misc_feature: MA Experiment ID: 108579 Result: Up-regulated in Transcription
  misc_feature: MA Experiment 108579 PARAMETER Experiment Name: At_4deg_Cold_cDNA_P Parameter: Temperature (deg C) Value: 4 vs. 22
  misc_feature: MA Experiment 108579 PARAMETER Experiment Name: At_4deg_Cold_cDNA_P Parameter: Timepoint (hr) Value: 6
  misc_feature: MA Experiment 108579 PARAMETER Experiment Name: At_4deg_Cold_cDNA_P Parameter: Tissue Value: Aerial
  misc_feature: MA Experiment ID: 108585 Result: Up-regulated in Transcription
  misc_feature: MA Experiment 108585 PARAMETER Experiment Name: At_5mM_NaNP_cDNA_P Parameter: Timepoint (hr) Value: 6
  misc_feature: MA Experiment 108585 PARAMETER Experiment Name: At_5mM_NaNP_cDNA_P Parameter: Tissue Value: Aerial
  misc_feature: MA Experiment 108585 PARAMETER Experiment Name: At_5mM_NaNP_cDNA_P Parameter: Treatment Value: null
  misc_feature: MA Experiment ID: 108595 Result: Up-regulated in Transcription
  misc_feature: MA Experiment 108595 PARAMETER Experiment Name: At_Ler-pi_Ovule_cDNA_P Parameter: Plant Line Value: null
  misc_feature: MA Experiment ID: 20000111 Result: Down-regulated in Transcription
  misc_feature: MA Experiment 20000111 PARAMETER Experiment Name: At_42deg_Heat_cDNA_P Parameter: Temperature (deg C) Value: 42 vs. 22
  misc_feature: MA Experiment 20000111 PARAMETER Experiment Name: At_42deg_Heat_cDNA_P Parameter: Timepoint (hr) Value: 6
  misc_feature: MA Experiment 20000111 PARAMETER Experiment Name: At_42deg_Heat_cDNA_P Parameter: Tissue Value: Aerial
  misc_feature: MA Experiment ID: 20000113 Result: Down-regulated in Transcription
  misc_feature: MA Experiment 20000113 PARAMETER Experiment Name: At_42deg_Heat_cDNA_P Parameter: Temperature (deg C) Value: 42 vs. 22
  misc_feature: MA Experiment 20000113 PARAMETER Experiment Name: At_42deg_Heat_cDNA_P Parameter: Timepoint (hr) Value: 8
  misc_feature: MA Experiment 20000113 PARAMETER Experiment Name: At_42deg_Heat_cDNA_P Parameter: Tissue Value: Aerial
  misc_feature: MA Experiment ID: 20000144 Result: Down-regulated in Transcription
  misc_feature: MA Experiment 20000144 PARAMETER Experiment Name: At_42deg_Heat_cDNA_P Parameter: Temperature (deg C) Value: 42 vs. 22
  misc_feature: MA Experiment 20000144 PARAMETER Experiment Name: At_42deg_Heat_cDNA_P Parameter: Timepoint (hr) Value: 1
  misc_feature: MA Experiment 20000144 PARAMETER Experiment Name: At_42deg_Heat_cDNA_P Parameter: Tissue Value: Aerial
  misc_feature: MA Experiment ID: 20000171 Result: Down-regulated in Transcription
  misc_feature: MA Experiment 20000171 PARAMETER Experiment Name: At_42deg_Heat_P Parameter: Age (day) Value: 14
  misc_feature: MA Experiment 20000171 PARAMETER Experiment Name: At_42deg_Heat_P Parameter: Organism Value: A. thaliana
  misc_feature: MA Experiment 20000171 PARAMETER Experiment Name: At_42deg_Heat_P Parameter: Plant Line Value: WS
  misc_feature: MA Experiment 20000171 PARAMETER Experiment Name: At_42deg_Heat_P Parameter: Temperature (deg C) Value: 42 vs. 22
  misc_feature: MA Experiment 20000171 PARAMETER Experiment Name: At_42deg_Heat_P Parameter: Timepoint (hr) Value: 1
  misc_feature: MA Experiment 20000171 PARAMETER Experiment Name: At_42deg_Heat_P Parameter: Tissue Value: Aerial
  misc_feature: MA Experiment ID: 20000173 Result: Down-regulated in Transcription
  misc_feature: MA Experiment 20000173 PARAMETER Experiment Name: At_42deg_Heat_P Parameter: Age (day) Value: 14
  misc_feature: MA Experiment 20000173 PARAMETER Experiment Name: At_42deg_Heat_P Parameter: Organism Value: A. thaliana
  misc_feature: MA Experiment 20000173 PARAMETER Experiment Name: At_42deg_Heat_P Parameter: Plant Line Value: WS
  misc_feature: MA Experiment 20000173 PARAMETER Experiment Name: At_42deg_Heat_P Parameter: Temperature (deg C) Value: 42 vs. 22
  misc_feature: MA Experiment 20000173 PARAMETER Experiment Name: At_42deg_Heat_P Parameter: Timepoint (hr) Value: 6
  misc_feature: MA Experiment 20000173 PARAMETER Experiment Name: At_42deg_Heat_P Parameter: Tissue Value: Aerial
  misc_feature: MA Experiment ID: 20000184 Result: Down-regulated in Transcription
  misc_feature: MA Experiment 20000184 PARAMETER Experiment Name: At_Shoots__P Parameter: Age (day) Value: 7
  misc_feature: MA Experiment 20000184 PARAMETER Experiment Name: At_Shoots__P Parameter: Tissue Value: Shoots vs. Whole Plant
  misc_feature: MA Experiment ID: 20000213 Result: Up-regulated in Transcription
  misc_feature: MA Experiment 20000213 PARAMETER Experiment Name: At_4deg_Cold_P Parameter: Timepoint (hr) Value: 2
  misc_feature: MA Experiment ID: 20000227 Result: Down-regulated in Transcription
  misc_feature: MA Experiment 20000227 PARAMETER Experiment Name: At_Root-Tips-vs-Tops_P Parameter: Tissue Value: Root Tips vs. Root Tops
  misc_feature: MA Experiment ID: 20000438 Result: Down-regulated in Transcription
  misc_feature: MA Experiment 20000438 PARAMETER Experiment Name: At_Shoots__P Parameter: Age (day) Value: 14
  misc_feature: MA Experiment 20000438 PARAMETER Experiment Name: At_Shoots__P Parameter: Tissue Value: Shoots vs. Whole Plant
  misc_feature: MA Experiment ID: 20000495 Result: Down-regulated in Transcription
  misc_feature: MA Experiment 20000495 PARAMETER Experiment Name: At_Guard_Cells_P Parameter: Harvest Date Value: 8/2/2002
  misc_feature: MA Experiment 20000495 PARAMETER Experiment Name: At_Guard_Cells_P Parameter: Organism Value: A. thaliana
  misc_feature: MA Experiment 20000495 PARAMETER Experiment Name: At_Guard_Cells_P Parameter: Tissue Value: Guard Cells vs. Leaves
  misc_feature: MA Experiment ID: 20000794 Result: Up-regulated in Transcription
  misc_feature: MA Experiment 20000794 PARAMETER Experiment Name: At_Petals_P Parameter: Age (day) Value: 23-25 days
  misc_feature: MA Experiment 20000794 PARAMETER Experiment Name: At_Petals_P Parameter: Plant Line Value: WS
  misc_feature: MA Experiment 20000794 PARAMETER Experiment Name: At_Petals_P Parameter: Tissue Value: Petals vs. Whole plant
  misc_feature: MA Experiment ID: 20001557 Result: Up-regulated in Transcription
  misc_feature: MA Experiment 20001557 PARAMETER Experiment Name: At_Drought_Soil_Dry_P Parameter: Age (day) Value: 27
  misc_feature: MA Experiment 20001557 PARAMETER Experiment Name: At_Drought_Soil_Dry_P Parameter: Organism Value: A. thaliana
  misc_feature: MA Experiment 20001557 PARAMETER Experiment Name: At_Drought_Soil_Dry_P Parameter: Plant Line Value: WS
  misc_feature: MA Experiment 20001557 PARAMETER Experiment Name: At_Drought_Soil_Dry_P Parameter: Post Timepoint (hr) Value: 3
  misc_feature: MA Experiment 20001557 PARAMETER Experiment Name: At_Drought_Soil_Dry_P Parameter: Post-Treatment Value: Re-Water vs. No Drought
  misc_feature: MA Experiment 20001557 PARAMETER Experiment Name: At_Drought_Soil_Dry_P Parameter: Timepoint (day) Value: 13
  misc_feature: MA Experiment 20001557 PARAMETER Experiment Name: At_Drought_Soil_Dry_P Parameter: Treatment Value: Drought vs. No Drought

SEQ ID NO: 34465 - protein, 184 aa, Arabidopsis thaliana; identical to SEQ ID NO: 30875
  peptide (1)..(184): Ceres Seq. ID no. 13489265
  misc_feature (142)..(170): Pfam Name: EF hand Pfam Description: EF hand
  misc_feature (37)..(171): Homolog of NCBI NO: 15221781 NR Description: polcalcin (calcium-binding pollen allergen),
  misc_feature (32)..(167): Homolog of NCBI NO: 21618074 NR Description: calmodulin-related protein [Arabidopsis thaliana]
  misc_feature (32)..(167): Homolog of NCBI NO: 18408502 NR Description: calmodulin-related protein, putative [Arabidopsis
  misc_feature (36)..(174): Homolog of NCBI NO: 13397927 NR Description: putative calmodulin-related protein [Medicago
  misc_feature (15)..(182): Homolog of NCBI NO: 6901654 NR Description: calcium-binding protein [Olea europaea]
  misc_feature (15)..(182): Homolog of NCBI NO: 14423648 NR Description: Calcium-binding allergen Ole e 8 (PCA18/PCA23)
  misc_feature (6)..(171): Homolog of NCBI NO: 14589311 NR Description: calcium binding protein [Sesbania rostrata]
  misc_feature (37)..(173): Homolog of NCBI NO: 21618025 NR Description: putative calmodulin [Arabidopsis thaliana]
  misc_feature (15)..(173): Homolog of NCBI NO: 15219514 NR Description: calcium-binding protein, putative [Arabidopsis
  misc_feature (15)..(184): Homolog of NCBI NO: 15221030 NR Description: calcium-binding protein, putative [Arabidopsis

SEQ ID NO: 34466 - protein, 170 aa, Arabidopsis thaliana; identical to SEQ ID NO: 30876
  peptide (1)..(170): Ceres Seq. ID no. 13489266
  misc_feature (128)..(156): Pfam Name: EF hand Pfam Description: EF hand
  misc_feature (23)..(157): Homolog of NCBI NO: 15221781 NR Description: polcalcin (calcium-binding pollen allergen),
  misc_feature (18)..(153): Homolog of NCBI NO: 21618074 NR Description: calmodulin-related protein [Arabidopsis thaliana]
  misc_feature (18)..(153): Homolog of NCBI NO: 18408502 NR Description: calmodulin-related protein, putative [Arabidopsis
  misc_feature (22)..(160): Homolog of NCBI NO: 13397927 NR Description: putative calmodulin-related protein [Medicago
  misc_feature (1)..(168): Homolog of NCBI NO: 6901654 NR Description: calcium-binding protein [Olea europaea]
  misc_feature (1)..(168): Homolog of NCBI NO: 14423648 NR Description: Calcium-binding allergen Ole e 8 (PCA18/PCA23)
  misc_feature (1)..(157): Homolog of NCBI NO: 14589311 NR Description: calcium binding protein [Sesbania rostrata]
  misc_feature (23)..(159): Homolog of NCBI NO: 21618025 NR Description: putative calmodulin [Arabidopsis thaliana]
  misc_feature (1)..(159): Homolog of NCBI NO: 15219514 NR Description: calcium-binding protein, putative [Arabidopsis
  misc_feature (1)..(170): Homolog of NCBI NO: 15221030 NR Description: calcium-binding protein, putative [Arabidopsis

SEQ ID NO: 34467 - protein, 153 aa, Arabidopsis thaliana; identical to SEQ ID NO: 30877
  peptide (1)..(153): Ceres Seq. ID no. 13489267
  misc_feature (111)..(139): Pfam Name: EF hand Pfam Description: EF hand
  misc_feature (6)..(140): Homolog of NCBI NO: 15221781 NR Description: polcalcin (calcium-binding pollen allergen),
  misc_feature (1)..(136): Homolog of NCBI NO: 21618074 NR Description: calmodulin-related protein [Arabidopsis thaliana]
  misc_feature (1)..(136): Homolog of NCBI NO: 18408502 NR Description: calmodulin-related protein, putative [Arabidopsis
  misc_feature (5)..(143): Homolog of NCBI NO: 13397927 NR Description: putative calmodulin-related protein [Medicago
  misc_feature (1)..(151): Homolog of NCBI NO: 6901654 NR Description: calcium-binding protein [Olea europaea]
  misc_feature (1)..(151): Homolog of NCBI NO: 14423648 NR Description: Calcium-binding allergen Ole e 8 (PCA18/PCA23)
  misc_feature (1)..(140): Homolog of NCBI NO: 14589311 NR Description: calcium binding protein [Sesbania rostrata]
  misc_feature (6)..(142): Homolog of NCBI NO: 21618025 NR Description: putative calmodulin [Arabidopsis thaliana]
  misc_feature (1)..(142): Homolog of NCBI NO: 15219514 NR Description: calcium-binding protein, putative [Arabidopsis
  misc_feature (1)..(153): Homolog of NCBI NO: 15221030 NR Description: calcium-binding protein, putative [Arabidopsis

SEQ ID NO: 34468 - DNA, 806 bp, Arabidopsis thaliana; identical to SEQ ID NO: 30878
  misc_feature (1)..(806): Ceres Seq. ID no. 12332172
  misc_feature: MA Experiment ID: 108434 Result: Down-regulated in Transcription
  misc_feature: MA Experiment 108434 PARAMETER Experiment Name: At_Root_Tips_cDNA_P Parameter: Tissue Value: Root Tips
  misc_feature: MA Experiment ID: 108462 Result: Up-regulated in Transcription
  misc_feature: MA Experiment 108462 PARAMETER Experiment Name: At_Germinating_Seeds_cDNA_P Parameter: Age (day) Value: 2 vs. 0
  misc_feature: MA Experiment 108462 PARAMETER Experiment Name: At_Germinating_Seeds_cDNA_P Parameter: Tissue Value: Germinating Seeds
  misc_feature: MA Experiment ID: 108463 Result: Up-regulated in Transcription
  misc_feature: MA Experiment 108463 PARAMETER Experiment Name: At_Germinating_Seeds_cDNA_P Parameter: Age (day) Value: 3 vs. 0
  misc_feature: MA Experiment 108463 PARAMETER Experiment Name: At_Germinating_Seeds_cDNA_P Parameter: Tissue Value: Germinating Seeds
  misc_feature: MA Experiment ID: 108464 Result: Up-regulated in Transcription
  misc_feature: MA Experiment 108464 PARAMETER Experiment Name: At_Germinating_Seeds_cDNA_P Parameter: Age (day) Value: 4 vs. 0
  misc_feature: MA Experiment 108464 PARAMETER Experiment Name: At_Germinating_Seeds_cDNA_P Parameter: Tissue Value: Germinating Seeds
  misc_feature: MA Experiment ID: 108569 Result: Up-regulated in Transcription
  misc_feature: MA Experiment 108569 PARAMETER Experiment Name: At_0.001%_MeJA__cDNA_P Parameter: Timepoint (hr) Value: 6
  misc_feature: MA Experiment 108569 PARAMETER Experiment Name: At_0.001%_MeJA__cDNA_P Parameter: Tissue Value: Aerial
  misc_feature: MA Experiment 108569 PARAMETER Experiment Name: At_0.001%_MeJA__cDNA_P Parameter: Treatment Value: 0.001% MeJA vs. No Treatment
  misc_feature: MA Experiment ID: 108605 Result: Down-regulated in Transcription
  misc_feature: MA Experiment 108605 PARAMETER Experiment Name: At_100uM_ABA_cDNA_P Parameter: Timepoint (hr) Value: 6
  misc_feature: MA Experiment 108605 PARAMETER Experiment Name: At_100uM_ABA_cDNA_P Parameter: Tissue Value: Aerial
  misc_feature: MA Experiment 108605 PARAMETER Experiment Name: At_100uM_ABA_cDNA_P Parameter: Treatment Value: 100uM ABA vs. No Treatment
  misc_feature: MA Experiment ID: 20000069 Result: Down-regulated in Transcription
  misc_feature: MA Experiment 20000069 PARAMETER Experiment Name: At_100uM_ABA_Mutants_cDNA_P Parameter: Plant Line Value: CS23
  misc_feature: MA Experiment 20000069 PARAMETER Experiment Name: At_100uM_ABA_Mutants_cDNA_P Parameter: Timepoint (hr) Value: 6
  misc_feature: MA Experiment 20000069 PARAMETER Experiment Name: At_100uM_ABA_Mutants_cDNA_P Parameter: Tissue Value: Aerial
  misc_feature: MA Experiment 20000069 PARAMETER Experiment Name: At_100uM_ABA_Mutants_cDNA_P Parameter: Treatment Value: 100uM ABA vs. No Treatment
  misc_feature: MA Experiment ID: 20000070 Result: Down-regulated in Transcription
  misc_feature: MA Experiment 20000070 PARAMETER Experiment Name: At_100uM_ABA_Mutants_cDNA_P Parameter: Plant Line Value: CS24
  misc_feature: MA Experiment 20000070 PARAMETER Experiment Name: At_100uM_ABA_Mutants_cDNA_P Parameter: Timepoint (hr) Value: 6
  misc_feature: MA Experiment 20000070 PARAMETER Experiment Name: At_100uM_ABA_Mutants_cDNA_P Parameter: Tissue Value: Aerial
  misc_feature: MA Experiment 20000070 PARAMETER Experiment Name: At_100uM_ABA_Mutants_cDNA_P Parameter: Treatment Value: 100uM ABA vs. No Treatment
  misc_feature: MA Experiment ID: 20000071 Result: Down-regulated in Transcription
  misc_feature: MA Experiment 20000071 PARAMETER Experiment Name: At_100uM_ABA_Mutants_cDNA_P Parameter: Plant Line Value: CS8104
  misc_feature: MA Experiment 20000071 PARAMETER Experiment Name: At_100uM_ABA_Mutants_cDNA_P Parameter: Timepoint (hr) Value: 6
  misc_feature: MA Experiment 20000071 PARAMETER Experiment Name: At_100uM_ABA_Mutants_cDNA_P Parameter: Tissue Value: Aerial
  misc_feature: MA Experiment 20000071 PARAMETER Experiment Name: At_100uM_ABA_Mutants_cDNA_P Parameter: Treatment Value: 100uM ABA vs. No Treatment
  misc_feature: MA Experiment ID: 20000086 Result: Down-regulated in Transcription
  misc_feature: MA Experiment 20000086 PARAMETER Experiment Name: At_100uM_ABA_Mutants_cDNA_P Parameter: Plant Line Value: CS22
  misc_feature: MA Experiment 20000086 PARAMETER Experiment Name: At_100uM_ABA_Mutants_cDNA_P Parameter: Timepoint (hr) Value: 6
  misc_feature: MA Experiment 20000086 PARAMETER Experiment Name: At_100uM_ABA_Mutants_cDNA_P Parameter: Tissue Value: Aerial
  misc_feature: MA Experiment 20000086 PARAMETER Experiment Name: At_100uM_ABA_Mutants_cDNA_P Parameter: Treatment Value: 100uM ABA vs. No Treatment
  misc_feature: MA Experiment ID: 20000087 Result: Down-regulated in Transcription
  misc_feature: MA Experiment 20000087 PARAMETER Experiment Name: At_100uM_ABA_Mutants_cDNA_P Parameter: Plant Line Value: WS
  misc_feature: MA Experiment 20000087 PARAMETER Experiment Name: At_100uM_ABA_Mutants_cDNA_P Parameter: Timepoint (hr) Value: 6
  misc_feature: MA Experiment 20000087 PARAMETER Experiment Name: At_100uM_ABA_Mutants_cDNA_P Parameter: Tissue Value: Aerial
  misc_feature: MA Experiment 20000087 PARAMETER Experiment Name: At_100uM_ABA_Mutants_cDNA_P Parameter: Treatment Value: 100uM ABA vs. No Treatment
  misc_feature: MA Experiment ID: 20000089 Result: Down-regulated in Transcription
  misc_feature: MA Experiment ID: 20000111 Result: Down-regulated in Transcription
  misc_feature: MA Experiment 20000111 PARAMETER Experiment Name: At_42deg_Heat_cDNA_P Parameter: Temperature (deg C) Value: 42 vs. 22
  misc_feature: MA Experiment 20000111 PARAMETER Experiment Name: At_42deg_Heat_cDNA_P Parameter: Timepoint (hr) Value: 6
  misc_feature: MA Experiment 20000111 PARAMETER Experiment Name: At_42deg_Heat_cDNA_P Parameter: Tissue Value: Aerial
  misc_feature: MA Experiment ID: 20000112 Result: Down-regulated in Transcription
  misc_feature: MA Experiment 20000112 PARAMETER Experiment Name: At_42deg_Heat_cDNA_P Parameter: Temperature (deg C) Value: 42 vs. 22
  misc_feature: MA Experiment 20000112 PARAMETER Experiment Name: At_42deg_Heat_cDNA_P Parameter: Timepoint (hr) Value: 2
  misc_feature: MA Experiment 20000112 PARAMETER Experiment Name: At_42deg_Heat_cDNA_P Parameter: Tissue Value: Aerial
  misc_feature: MA Experiment ID: 20000113 Result: Down-regulated in Transcription
  misc_feature: MA Experiment 20000113 PARAMETER Experiment Name: At_42deg_Heat_cDNA_P Parameter: Temperature (deg C) Value: 42 vs. 22
  misc_feature: MA Experiment 20000113 PARAMETER Experiment Name: At_42deg_Heat_cDNA_P Parameter: Timepoint (hr) Value: 8
  misc_feature: MA Experiment 20000113 PARAMETER Experiment Name: At_42deg_Heat_cDNA_P Parameter: Tissue Value: Aerial
  misc_feature: MA Experiment ID: 20000117 Result: Down-regulated in Transcription
  misc_feature: MA Experiment 20000117 PARAMETER Experiment Name: At_100uM_ABA_Mutants_cDNA_P Parameter: Plant Line Value: Columbia
  misc_feature: MA Experiment 20000117 PARAMETER Experiment Name: At_100uM_ABA_Mutants_cDNA_P Parameter: Timepoint (hr) Value: 6
  misc_feature: MA Experiment 20000117 PARAMETER Experiment Name: At_100uM_ABA_Mutants_cDNA_P Parameter: Tissue Value: Aerial
  misc_feature: MA Experiment 20000117 PARAMETER Experiment Name: At_100uM_ABA_Mutants_cDNA_P Parameter: Treatment Value: 100uM ABA vs. No Treatment
  misc_feature: MA Experiment ID: 20000144 Result: Down-regulated in Transcription
  misc_feature: MA Experiment 20000144 PARAMETER Experiment Name: At_42deg_Heat_cDNA_P Parameter: Temperature (deg C) Value: 42 vs. 22
  misc_feature: MA Experiment 20000144 PARAMETER Experiment Name: At_42deg_Heat_cDNA_P Parameter: Timepoint (hr) Value: 1
  misc_feature: MA Experiment 20000144 PARAMETER Experiment Name: At_42deg_Heat_cDNA_P Parameter: Tissue Value: Aerial
  misc_feature: MA Experiment ID: 20000286 Result: Up-regulated in Transcription
  misc_feature: MA Experiment 20000286 PARAMETER Experiment Name: At_Open_Flower_P Parameter: Age (day) Value: 21
  misc_feature: MA Experiment 20000286 PARAMETER Experiment Name: At_Open_Flower_P Parameter: Plant Line Value: WS
  misc_feature: MA Experiment 20000286 PARAMETER Experiment Name: At_Open_Flower_P Parameter: Tissue Value: Half Open vs. Whole Plant
  misc_feature: MA Experiment ID: 20000438 Result: Up-regulated in Transcription
  misc_feature: MA Experiment 20000438 PARAMETER Experiment Name: At_Shoots__P Parameter: Age (day) Value: 14
  misc_feature: MA Experiment 20000438 PARAMETER Experiment Name: At_Shoots__P Parameter: Tissue Value: Shoots vs. Whole Plant
  misc_feature: MA Experiment ID: 20000439 Result: Up-regulated in Transcription
  misc_feature: MA Experiment 20000439 PARAMETER Experiment Name: At_Roots__P Parameter: Age (day) Value: 14 vs. 21
  misc_feature: MA Experiment 20000439 PARAMETER Experiment Name: At_Roots__P Parameter: Organism Value: A. thaliana
  misc_feature: MA Experiment 20000439 PARAMETER Experiment Name: At_Roots__P Parameter: Tissue Value: Roots vs. Whole Plant
  misc_feature: MA Experiment ID: 20000495 Result: Down-regulated in Transcription
  misc_feature: MA Experiment 20000495 PARAMETER Experiment Name: At_Guard_Cells_P Parameter: Harvest Date Value: 8/2/2002
  misc_feature: MA Experiment 20000495 PARAMETER Experiment Name: At_Guard_Cells_P Parameter: Organism Value: A. thaliana
  misc_feature: MA Experiment 20000495 PARAMETER Experiment Name: At_Guard_Cells_P Parameter: Tissue Value: Guard Cells vs. Leaves
  misc_feature: MA Experiment ID: 20001248 Result: Down-regulated in Transcription
  misc_feature: MA Experiment 20001248 PARAMETER Experiment Name: At_Far-red-induction_P Parameter: Age (day) Value: 7
  misc_feature: MA Experiment 20001248 PARAMETER Experiment Name: At_Far-red-induction_P Parameter: Light Value: Far-red vs. White
  misc_feature: MA Experiment 20001248 PARAMETER Experiment Name: At_Far-red-induction_P Parameter: Organism Value: A. thaliana
  misc_feature: MA Experiment 20001248 PARAMETER Experiment Name: At_Far-red-induction_P Parameter: Plant Line Value: Columbia
  misc_feature: MA Experiment 20001248 PARAMETER Experiment Name: At_Far-red-induction_P Parameter: Timepoint (hr) Value: 4
  misc_feature: MA Experiment 20001248 PARAMETER Experiment Name: At_Far-red-induction_P Parameter: Tissue Value: Whole Plant
  misc_feature: MA Experiment ID: 20001450 Result: Down-regulated in Transcription
  misc_feature: MA Experiment 20001450 PARAMETER Experiment Name: At_Far-red-induction_P Parameter: Age (day) Value: 7
  misc_feature: MA Experiment 20001450 PARAMETER Experiment Name: At_Far-red-induction_P Parameter: Light Value: Far-red vs. White
  misc_feature: MA Experiment 20001450 PARAMETER Experiment Name: At_Far-red-induction_P Parameter: Organism Value: A. thaliana
  misc_feature: MA Experiment 20001450 PARAMETER Experiment Name: At_Far-red-induction_P Parameter: Plant Line Value: Columbia
  misc_feature: MA Experiment 20001450 PARAMETER Experiment Name: At_Far-red-induction_P Parameter: Timepoint (hr) Value: 8
  misc_feature: MA Experiment 20001450 PARAMETER Experiment Name: At_Far-red-induction_P Parameter: Tissue Value: Whole Plant
  misc_feature: MA Experiment ID: 20001451 Result: Down-regulated in Transcription
  misc_feature: MA Experiment 20001451 PARAMETER Experiment Name: At_Far-red-induction_P Parameter: Age (day) Value: 7
  misc_feature: MA Experiment 20001451 PARAMETER Experiment Name: At_Far-red-induction_P Parameter: Light Value: Far-red vs. White
  misc_feature: MA Experiment 20001451 PARAMETER Experiment Name: At_Far-red-induction_P Parameter: Organism Value: A. thaliana
  misc_feature: MA Experiment 20001451 PARAMETER Experiment Name: At_Far-red-induction_P Parameter: Plant Line Value: Columbia
  misc_feature: MA Experiment 20001451 PARAMETER Experiment Name: At_Far-red-induction_P Parameter: Timepoint (hr) Value: 24
  misc_feature: MA Experiment 20001451 PARAMETER Experiment Name: At_Far-red-induction_P Parameter: Tissue Value: Whole Plant
  misc_feature: MA Experiment ID: 20001906 Result: Down-regulated in Transcription
  misc_feature: MA Experiment 20001906 PARAMETER Experiment Name: At_Drought_Reproduction_P Parameter: Age (day) Value: 35
  misc_feature: MA Experiment 20001906 PARAMETER Experiment Name: At_Drought_Reproduction_P Parameter: Organism Value: A. thaliana
  misc_feature: MA Experiment 20001906 PARAMETER Experiment Name: At_Drought_Reproduction_P Parameter: Plant Line Value: WS
  misc_feature: MA Experiment 20001906 PARAMETER Experiment Name: At_Drought_Reproduction_P Parameter: Timepoint (day) Value: 5
  misc_feature: MA Experiment 20001906 PARAMETER Experiment Name: At_Drought_Reproduction_P Parameter: Tissue Value: Siliques
  misc_feature: MA Experiment 20001906 PARAMETER Experiment Name: At_Drought_Reproduction_P Parameter: Treatment Value: Drought vs. No Drought
  misc_feature: MA Experiment ID: 20001911 Result: Down-regulated in Transcription
  misc_feature: MA Experiment 20001911 PARAMETER Experiment Name: At_Drought_Reproduction_P Parameter: Age (day) Value: 40
  misc_feature: MA Experiment 20001911 PARAMETER Experiment Name: At_Drought_Reproduction_P Parameter: Organism Value: A. thaliana
  misc_feature: MA Experiment 20001911 PARAMETER Experiment Name: At_Drought_Reproduction_P Parameter: Plant Line Value: WS
  misc_feature: MA Experiment 20001911 PARAMETER Experiment Name: At_Drought_Reproduction_P Parameter: Timepoint (day) Value: 10
  misc_feature: MA Experiment 20001911 PARAMETER Experiment Name: At_Drought_Reproduction_P Parameter: Tissue Value: Flowers
  misc_feature: MA Experiment 20001911 PARAMETER Experiment Name: At_Drought_Reproduction_P Parameter: Treatment Value: Drought vs. No Drought
  misc_feature: Phenotype: FERTILITY Fertility-Reduced
  misc_feature: Phenotype: ROSETTE LEAVES Other
  misc_feature: Phenotype: WHOLE PLANT Other
  misc_feature: Phenotype: FERTILITY Fertility-Reduced
  misc_feature: Phenotype: WHOLE PLANT Other
  misc_feature: Phenotype: ROSETTE LEAVES Shape-Serrate
  misc_feature: Phenotype: WHOLE PLANT Other

SEQ ID NO: 34469 - protein, 210 aa, Arabidopsis thaliana; identical to SEQ ID NO: 30879
  peptide (1)..(210): Ceres Seq. ID no. 12332173
  misc_feature (20)..(194): Homolog of NCBI NO: 38344036 NR Description: OJ991214_12.17 [Oryza sativa (japonica
  misc_feature (1)..(210): Homolog of NCBI NO: 22326984 NR Description: similar to hairpin-induced protein, putative
  misc_feature (1)..(210): Homolog of NCBI NO: 15229906 NR Description: hairpin-induced protein, putative (HIN1); protein
  misc_feature (1)..(210): Homolog of NCBI NO: 15240001 NR Description: hairpin-induced protein, putative (HIN1); protein
  misc_feature (4)..(210): Homolog of NCBI NO: 28392929 NR Description: putative VAMP protein SEC22 [Arabidopsis thaliana]
  misc_feature (4)..(210): Homolog of NCBI NO: 18399308 NR Description: VAMP protein SEC22
  misc_feature (3)..(210): Homolog of NCBI NO: 15231227 NR Description: hairpin-induced protein, putative (HIN1)
  misc_feature (1)..(209): Homolog of NCBI NO: 15227540 NR Description: hairpin-induced protein, putative (HIN1); protein
  misc_feature (1)..(209): Homolog of NCBI NO: 15233951 NR Description: hairpin-induced protein, putative (HIN1); protein
  misc_feature (1)..(210): Homolog of NCBI NO: 15227538 NR Description: hairpin-induced protein, putative (HIN1)

SEQ ID NO: 34470 - DNA, 1407 bp, Arabidopsis thaliana; identical to SEQ ID NO: 30880
  misc_feature (1)..(1407): Ceres Seq. ID no. 13486967
  misc_feature: MA Experiment ID: 108434 Result: Down-regulated in Transcription
  misc_feature: MA Experiment 108434 PARAMETER Experiment Name: At_Root_Tips_cDNA_P Parameter: Tissue Value: Root Tips
  misc_feature: MA Experiment ID: 108463 Result: Up-regulated in Transcription
  misc_feature: MA Experiment 108463 PARAMETER Experiment Name: At_Germinating_Seeds_cDNA_P Parameter: Age (day) Value: 3 vs. 0
  misc_feature: MA Experiment 108463 PARAMETER Experiment Name: At_Germinating_Seeds_cDNA_P Parameter: Tissue Value: Germinating Seeds
  misc_feature: MA Experiment ID: 108488 Result: Down-regulated in Transcription
  misc_feature: MA Experiment ID: 108572 Result: Up-regulated in Transcription
  misc_feature: MA Experiment 108572 PARAMETER Experiment Name: At_Drought_cDNA_P Parameter: Timepoint (hr) Value: 1
  misc_feature: MA Experiment 108572 PARAMETER Experiment Name: At_Drought_cDNA_P Parameter: Tissue Value: Aerial
  misc_feature: MA Experiment 108572 PARAMETER Experiment Name: At_Drought_cDNA_P Parameter: Treatment Value: Drought vs. No Drought
  misc_feature: MA Experiment ID: 108573 Result: Up-regulated in Transcription
  misc_feature: MA Experiment 108573 PARAMETER Experiment Name: At_Drought_cDNA_P Parameter: Timepoint (hr) Value: 6
  misc_feature: MA Experiment 108573 PARAMETER Experiment Name: At_Drought_cDNA_P Parameter: Tissue Value: Aerial
  misc_feature: MA Experiment 108573 PARAMETER Experiment Name: At_Drought_cDNA_P Parameter: Treatment Value: Drought vs. No Drought
  misc_feature: MA Experiment ID: 108576 Result: Up-regulated in Transcription
  misc_feature: MA Experiment 108576 PARAMETER Experiment Name: At_42deg_Heat_cDNA_P Parameter: Temperature (deg C) Value: 42 vs. 22
  misc_feature: MA Experiment 108576 PARAMETER Experiment Name: At_42deg_Heat_cDNA_P Parameter: Timepoint (hr) Value: 1
  misc_feature: MA Experiment 108576 PARAMETER Experiment Name: At_42deg_Heat_cDNA_P Parameter: Tissue Value: Aerial
  misc_feature: MA Experiment ID: 108594 Result: Down-regulated in Transcription
  misc_feature: MA Experiment 108594 PARAMETER Experiment Name: At_Ler-rhl_Root_cDNA_P Parameter: Plant Line Value: null
  misc_feature: MA Experiment ID: 108605 Result: Up-regulated in Transcription
  misc_feature: MA Experiment 108605 PARAMETER Experiment Name: At_100uM_ABA_cDNA_P Parameter: Timepoint (hr) Value: 6
  misc_feature: MA Experiment 108605 PARAMETER Experiment Name: At_100uM_ABA_cDNA_P Parameter: Tissue Value: Aerial
  misc_feature: MA Experiment 108605 PARAMETER Experiment Name: At_100uM_ABA_cDNA_P Parameter: Treatment Value: 100uM ABA vs. No Treatment
  misc_feature: MA Experiment ID: 108607 Result: Up-regulated in Transcription
  misc_feature: MA Experiment 108607 PARAMETER Experiment Name: At_100uM_ABA_cDNA_P Parameter: Timepoint (hr) Value: 4
  misc_feature: MA Experiment 108607 PARAMETER Experiment Name: At_100uM_ABA_cDNA_P Parameter: Tissue Value: Aerial
  misc_feature: MA Experiment 108607 PARAMETER Experiment Name: At_100uM_ABA_cDNA_P Parameter: Treatment Value: 100uM ABA vs. No Treatment
  misc_feature: MA Experiment ID: 108608 Result: Up-regulated in Transcription
  misc_feature: MA Experiment 108608 PARAMETER Experiment Name: At_100uM_ABA_cDNA_P Parameter: Timepoint (hr) Value: 1
  misc_feature: MA Experiment 108608 PARAMETER Experiment Name: At_100uM_ABA_cDNA_P Parameter: Tissue Value: Aerial
  misc_feature: MA Experiment 108608 PARAMETER Experiment Name: At_100uM_ABA_cDNA_P Parameter: Treatment Value: 100uM ABA vs. No Treatment
  misc_feature: MA Experiment ID: 108668 Result: Up-regulated in Transcription
  misc_feature: MA Experiment 108668 PARAMETER Experiment Name: At_2mM_SA_cDNA_P Parameter: Plant Line Value: WS
  misc_feature: MA Experiment 108668 PARAMETER Experiment Name: At_2mM_SA_cDNA_P Parameter: Timepoint (hr) Value: 6
  misc_feature: MA Experiment 108668 PARAMETER Experiment Name: At_2mM_SA_cDNA_P Parameter: Treatment Value: 2mM SA vs. No Treatment
  misc_feature: MA Experiment ID: 20000070 Result: Up-regulated in Transcription
  misc_feature: MA Experiment 20000070 PARAMETER Experiment Name: At_100uM_ABA_Mutants_cDNA_P Parameter: Plant Line Value: CS24
  misc_feature: MA Experiment 20000070 PARAMETER Experiment Name: At_100uM_ABA_Mutants_cDNA_P Parameter: Timepoint (hr) Value: 6
  misc_feature: MA Experiment 20000070 PARAMETER Experiment Name: At_100uM_ABA_Mutants_cDNA_P Parameter: Tissue Value: Aerial
  misc_feature: MA Experiment 20000070 PARAMETER Experiment Name: At_100uM_ABA_Mutants_cDNA_P Parameter: Treatment Value: 100uM ABA vs. No Treatment
  misc_feature: MA Experiment ID: 20000071 Result: Up-regulated in Transcription
  misc_feature: MA Experiment 20000071 PARAMETER Experiment Name: At_100uM_ABA_Mutants_cDNA_P Parameter: Plant Line Value: CS8104
  misc_feature: MA Experiment 20000071 PARAMETER Experiment Name: At_100uM_ABA_Mutants_cDNA_P Parameter: Timepoint (hr) Value: 6
  misc_feature: MA Experiment 20000071 PARAMETER Experiment Name: At_100uM_ABA_Mutants_cDNA_P Parameter: Tissue Value: Aerial
  misc_feature: MA Experiment 20000071 PARAMETER Experiment Name: At_100uM_ABA_Mutants_cDNA_P Parameter: Treatment Value: 100uM ABA vs. No Treatment
  misc_feature: MA Experiment ID: 20000072 Result: Up-regulated in Transcription
  misc_feature: MA Experiment 20000072 PARAMETER Experiment Name: At_100uM_ABA_Mutants_cDNA_P Parameter: Plant Line Value: CS8105
  misc_feature: MA Experiment 20000072 PARAMETER Experiment Name: At_100uM_ABA_Mutants_cDNA_P Parameter: Timepoint (hr) Value: 6
  misc_feature: MA Experiment 20000072 PARAMETER Experiment Name: At_100uM_ABA_Mutants_cDNA_P Parameter: Tissue Value: Aerial
  misc_feature: MA Experiment 20000072 PARAMETER Experiment Name: At_100uM_ABA_Mutants_cDNA_P Parameter: Treatment Value: 100uM ABA vs. No Treatment
  misc_feature: MA Experiment ID: 20000088 Result: Up-regulated in Transcription
  misc_feature: MA Experiment 20000088 PARAMETER Experiment Name: At_100uM_ABA_Mutants_cDNA_P Parameter: Plant Line Value: Landsberg
  misc_feature: MA Experiment 20000088 PARAMETER Experiment Name: At_100uM_ABA_Mutants_cDNA_P Parameter: Timepoint (hr) Value: 6
  misc_feature: MA Experiment 20000088 PARAMETER Experiment Name: At_100uM_ABA_Mutants_cDNA_P Parameter: Tissue Value: Aerial
  misc_feature: MA Experiment 20000088 PARAMETER Experiment Name: At_100uM_ABA_Mutants_cDNA_P Parameter: Treatment Value: 100uM ABA vs. No Treatment
  misc_feature: MA Experiment ID: 20000093 Result: Up-regulated in Transcription
  misc_feature: MA Experiment 20000093 PARAMETER Experiment Name: At_42deg_Heat_cDNA_P Parameter: Temperature (deg C) Value: 42 vs. 22
  misc_feature: MA Experiment 20000093 PARAMETER Experiment Name: At_42deg_Heat_cDNA_P Parameter: Timepoint (hr) Value: 0.5
  misc_feature: MA Experiment 20000093 PARAMETER Experiment Name: At_42deg_Heat_cDNA_P Parameter: Tissue Value: Aerial
  misc_feature: MA Experiment ID: 20000111 Result: Up-regulated in Transcription
  misc_feature: MA Experiment 20000111 PARAMETER Experiment Name: At_42deg_Heat_cDNA_P Parameter: Temperature (deg C) Value: 42 vs. 22
  misc_feature: MA Experiment 20000111 PARAMETER Experiment Name: At_42deg_Heat_cDNA_P Parameter: Timepoint (hr) Value: 6
  misc_feature: MA Experiment 20000111 PARAMETER Experiment Name: At_42deg_Heat_cDNA_P Parameter: Tissue Value: Aerial
  misc_feature: MA Experiment ID: 20000112 Result: Up-regulated in Transcription
  misc_feature: MA Experiment 20000112 PARAMETER Experiment Name: At_42deg_Heat_cDNA_P Parameter: Temperature (deg C) Value: 42 vs. 22
  misc_feature: MA Experiment 20000112 PARAMETER Experiment Name: At_42deg_Heat_cDNA_P Parameter: Timepoint (hr) Value: 2
  misc_feature: MA Experiment 20000112 PARAMETER Experiment Name: At_42deg_Heat_cDNA_P Parameter: Tissue Value: Aerial
  misc_feature: MA Experiment ID: 20000113 Result: Up-regulated in Transcription
  misc_feature: MA Experiment 20000113 PARAMETER Experiment Name: At_42deg_Heat_cDNA_P Parameter: Temperature (deg C) Value: 42 vs. 22
  misc_feature: MA Experiment 20000113 PARAMETER Experiment Name: At_42deg_Heat_cDNA_P Parameter: Timepoint (hr) Value: 8
  misc_feature: MA Experiment 20000113 PARAMETER Experiment Name: At_42deg_Heat_cDNA_P Parameter: Tissue Value: Aerial
  misc_feature: MA Experiment ID: 20000117 Result: Up-regulated in Transcription
  misc_feature: MA Experiment 20000117 PARAMETER Experiment Name: At_100uM_ABA_Mutants_cDNA_P Parameter: Plant Line Value: Columbia
  misc_feature: MA Experiment 20000117 PARAMETER Experiment Name: At_100uM_ABA_Mutants_cDNA_P Parameter: Timepoint (hr) Value: 6
  misc_feature: MA Experiment 20000117 PARAMETER Experiment Name: At_100uM_ABA_Mutants_cDNA_P Parameter: Tissue Value: Aerial
  misc_feature: MA Experiment 20000117 PARAMETER Experiment Name: At_100uM_ABA_Mutants_cDNA_P Parameter: Treatment Value: 100uM ABA vs. No Treatment
  misc_feature: MA Experiment ID: 20000144 Result: Up-regulated in Transcription
  misc_feature: MA Experiment 20000144 PARAMETER Experiment Name: At_42deg_Heat_cDNA_P Parameter: Temperature (deg C) Value: 42 vs. 22
  misc_feature: MA Experiment 20000144 PARAMETER Experiment Name: At_42deg_Heat_cDNA_P Parameter: Timepoint (hr) Value: 1
  misc_feature: MA Experiment 20000144 PARAMETER Experiment Name: At_42deg_Heat_cDNA_P Parameter: Tissue Value: Aerial
  misc_feature: MA Experiment ID: 20000166 Result: Up-regulated in Transcription
  misc_feature: MA Experiment 20000166 PARAMETER Experiment Name: At_100uM_ABA_P Parameter: Age (day) Value: 14
  misc_feature: MA Experiment 20000166 PARAMETER Experiment Name: At_100uM_ABA_P Parameter: Organism Value: A. thaliana
  misc_feature: MA Experiment 20000166 PARAMETER Experiment Name: At_100uM_ABA_P Parameter: Plant Line Value: WS
  misc_feature: MA Experiment 20000166 PARAMETER Experiment Name: At_100uM_ABA_P Parameter: Timepoint (hr) Value: 1
  misc_feature: MA Experiment 20000166 PARAMETER Experiment Name: At_100uM_ABA_P Parameter: Tissue Value: Aerial
  misc_feature: MA Experiment 20000166 PARAMETER Experiment Name: At_100uM_ABA_P Parameter: Treatment Value: 100uM ABA vs. No Treatment
  misc_feature: MA Experiment ID: 20000169 Result: Up-regulated in Transcription
  misc_feature: MA Experiment 20000169 PARAMETER Experiment Name: At_100uM_ABA_P Parameter: Age (day) Value: 14
  misc_feature: MA Experiment 20000169 PARAMETER Experiment Name: At_100uM_ABA_P Parameter: Organism Value: A. thaliana
  misc_feature: MA Experiment 20000169 PARAMETER Experiment Name: At_100uM_ABA_P Parameter: Plant Line Value: WS
  misc_feature: MA Experiment 20000169 PARAMETER Experiment Name: At_100uM_ABA_P Parameter: Timepoint (hr) Value: 6
  misc_feature: MA Experiment 20000169 PARAMETER Experiment Name: At_100uM_ABA_P Parameter: Tissue Value: Aerial
  misc_feature: MA Experiment 20000169 PARAMETER Experiment Name: At_100uM_ABA_P Parameter: Treatment Value: 100uM ABA vs. No Treatment
  misc_feature: MA Experiment ID: 20000171 Result: Up-regulated in Transcription
  misc_feature: MA Experiment 20000171 PARAMETER Experiment Name: At_42deg_Heat_P Parameter: Age (day) Value: 14
  misc_feature: MA Experiment 20000171 PARAMETER Experiment Name: At_42deg_Heat_P Parameter: Organism Value: A. thaliana
  misc_feature: MA Experiment 20000171 PARAMETER Experiment Name: At_42deg_Heat_P Parameter: Plant Line Value: WS
  misc_feature: MA Experiment 20000171 PARAMETER Experiment Name: At_42deg_Heat_P Parameter: Temperature (deg C) Value: 42 vs. 22
  misc_feature: MA Experiment 20000171 PARAMETER Experiment Name: At_42deg_Heat_P Parameter: Timepoint (hr) Value: 1
  misc_feature: MA Experiment 20000171 PARAMETER Experiment Name: At_42deg_Heat_P Parameter: Tissue Value: Aerial
  misc_feature: MA Experiment ID: 20000173 Result: Up-regulated in Transcription
  misc_feature: MA Experiment 20000173 PARAMETER Experiment Name: At_42deg_Heat_P Parameter: Age (day) Value: 14
  misc_feature: MA Experiment 20000173 PARAMETER Experiment Name: At_42deg_Heat_P Parameter: Organism Value: A. thaliana
  misc_feature: MA Experiment 20000173 PARAMETER Experiment Name: At_42deg_Heat_P Parameter: Plant Line Value: WS
  misc_feature: MA Experiment 20000173 PARAMETER Experiment Name: At_42deg_Heat_P Parameter: Temperature (deg C) Value: 42 vs. 22
  misc_feature: MA Experiment 20000173 PARAMETER Experiment Name: At_42deg_Heat_P Parameter: Timepoint (hr) Value: 6
  misc_feature: MA Experiment 20000173 PARAMETER Experiment Name: At_42deg_Heat_P Parameter: Tissue Value: Aerial
  misc_feature: MA Experiment ID: 20000234 Result: Down-regulated in Transcription
  misc_feature: MA Experiment 20000234 PARAMETER Experiment Name: At_Siliques_P Parameter: Age (day) Value: 21
  misc_feature: MA Experiment 20000234 PARAMETER Experiment Name: At_Siliques_P Parameter: Organism Value: A. thaliana
  misc_feature: MA Experiment 20000234 PARAMETER Experiment Name: At_Siliques_P Parameter: Plant Line Value: WS
  misc_feature: MA Experiment 20000234 PARAMETER Experiment Name: At_Siliques_P Parameter: Tissue Value: Less Than 5mm Siliques vs. Whole Plant
  misc_feature: MA Experiment ID: 20000235 Result: Down-regulated in Transcription
  misc_feature: MA Experiment 20000235 PARAMETER Experiment Name: At_Siliques_P Parameter: Age (day) Value: 21
  misc_feature: MA Experiment 20000235 PARAMETER Experiment Name: At_Siliques_P Parameter: Organism Value: A. thaliana
  misc_feature: MA Experiment 20000235 PARAMETER Experiment Name: At_Siliques_P Parameter: Plant Line Value: WS
  misc_feature: MA Experiment 20000235 PARAMETER Experiment Name: At_Siliques_P Parameter: Tissue Value: 5-10mm Siliques vs. Whole Plant
  misc_feature: MA Experiment ID: 20000267 Result: Up-regulated in Transcription
  misc_feature: MA Experiment 20000267 PARAMETER Experiment Name: At_Drought_P Parameter: Age (day) Value: 7
  misc_feature: MA Experiment 20000267 PARAMETER Experiment Name: At_Drought_P Parameter: Organism Value: A. thaliana
  misc_feature: MA Experiment 20000267 PARAMETER Experiment Name: At_Drought_P Parameter: Plant Line Value: WS
  misc_feature: MA Experiment 20000267 PARAMETER Experiment Name: At_Drought_P Parameter: Timepoint (hr) Value: 6
  misc_feature: MA Experiment 20000267 PARAMETER Experiment Name: At_Drought_P Parameter: Tissue Value: Whole Plant
  misc_feature: MA Experiment 20000267 PARAMETER Experiment Name: At_Drought_P Parameter: Treatment Value: Drought vs. No Drought
  misc_feature: MA Experiment ID: 20000268 Result: Up-regulated in Transcription
  misc_feature: MA Experiment 20000268 PARAMETER Experiment Name: At_100mM_NaCl__P Parameter: Age (day) Value: 14
  misc_feature: MA Experiment 20000268 PARAMETER Experiment Name: At_100mM_NaCl__P Parameter: Organism Value: A. thaliana
  misc_feature: MA Experiment 20000268 PARAMETER Experiment Name: At_100mM_NaCl__P Parameter: Plant Line Value: WS
  misc_feature: MA Experiment 20000268 PARAMETER Experiment Name: At_100mM_NaCl__P Parameter: Timepoint (hr) Value: 6
  misc_feature: MA Experiment 20000268 PARAMETER Experiment Name: At_100mM_NaCl__P Parameter: Tissue Value: Whole Plant
  misc_feature: MA Experiment 20000268 PARAMETER Experiment Name: At_100mM_NaCl__P Parameter: Treatment Value: 100mM NaCl vs. No Treatment
  misc_feature: MA Experiment ID: 20000436 Result: Up-regulated in Transcription
  misc_feature: MA Experiment 20000436 PARAMETER Experiment Name: At_Drought_P Parameter: Age (day) Value: 7
  misc_feature: MA Experiment 20000436 PARAMETER Experiment Name: At_Drought_P Parameter: Organism Value: A. thaliana
  misc_feature: MA Experiment 20000436 PARAMETER Experiment Name: At_Drought_P Parameter: Plant Line Value: WS
  misc_feature: MA Experiment 20000436 PARAMETER Experiment Name: At_Drought_P Parameter: Timepoint (hr) Value: 12
  misc_feature: MA Experiment 20000436 PARAMETER Experiment Name: At_Drought_P Parameter: Tissue Value: Whole Plant
  misc_feature: MA Experiment 20000436 PARAMETER Experiment Name: At_Drought_P Parameter: Treatment Value: Drought vs. No Drought
  misc_feature: MA Experiment ID: 20000437 Result: Up-regulated in Transcription
  misc_feature: MA Experiment 20000437 PARAMETER Experiment Name: At_Drought_P Parameter: Age (day) Value: 8
  misc_feature: MA Experiment 20000437 PARAMETER Experiment Name: At_Drought_P Parameter: Organism Value: A. thaliana
  misc_feature: MA Experiment 20000437 PARAMETER Experiment Name: At_Drought_P Parameter: Plant Line Value: WS
  misc_feature: MA Experiment 20000437 PARAMETER Experiment Name: At_Drought_P Parameter: Timepoint (hr) Value: 24
  misc_feature: MA Experiment 20000437 PARAMETER Experiment Name: At_Drought_P Parameter: Tissue Value: Whole Plant
  misc_feature: MA Experiment 20000437 PARAMETER Experiment Name: At_Drought_P Parameter: Treatment Value: Drought vs. No Drought
  misc_feature: MA Experiment ID: 20000453 Result: Up-regulated in Transcription
  misc_feature: MA Experiment 20000453 PARAMETER Experiment Name: At_100uM_ABA_P Parameter: Age (day) Value: 15
  misc_feature: MA Experiment 20000453 PARAMETER Experiment Name: At_100uM_ABA_P Parameter: Organism Value: A. thaliana
  misc_feature: MA Experiment 20000453 PARAMETER Experiment Name: At_100uM_ABA_P Parameter: Plant Line Value: WS
  misc_feature: MA Experiment 20000453 PARAMETER Experiment Name: At_100uM_ABA_P Parameter: Timepoint (hr) Value: 24
  misc_feature: MA Experiment 20000453 PARAMETER Experiment Name: At_100uM_ABA_P Parameter: Tissue Value: Aerial
  misc_feature: MA Experiment 20000453 PARAMETER Experiment Name: At_100uM_ABA_P Parameter: Treatment Value: 100uM ABA vs. No Treatment
  misc_feature: MA Experiment ID: 20000794 Result: Up-regulated in Transcription
  misc_feature: MA Experiment 20000794 PARAMETER Experiment Name: At_Petals_P Parameter: Age (day) Value: 23-25 days
  misc_feature: MA Experiment 20000794 PARAMETER Experiment Name: At_Petals_P Parameter: Plant Line Value: WS
  misc_feature: MA Experiment 20000794 PARAMETER Experiment Name: At_Petals_P Parameter: Tissue Value: Petals vs. Whole plant
  misc_feature: MA Experiment ID: 20001248 Result: Down-regulated in Transcription
  misc_feature: MA Experiment 20001248 PARAMETER Experiment Name: At_Far-red-induction_P Parameter: Age (day) Value: 7
  misc_feature: MA Experiment 20001248 PARAMETER Experiment Name: At_Far-red-induction_P Parameter: Light Value: Far-red vs. White
  misc_feature: MA Experiment 20001248 PARAMETER Experiment Name: At_Far-red-induction_P Parameter: Organism Value: A. thaliana
  misc_feature: MA Experiment 20001248 PARAMETER Experiment Name: At_Far-red-induction_P Parameter: Plant Line Value: Columbia
  misc_feature: MA Experiment 20001248 PARAMETER Experiment Name: At_Far-red-induction_P Parameter: Timepoint (hr) Value: 4
  misc_feature: MA Experiment 20001248 PARAMETER Experiment Name: At_Far-red-induction_P Parameter: Tissue Value: Whole Plant
  misc_feature: MA Experiment ID: 20001554 Result: Up-regulated in Transcription
  misc_feature: MA Experiment 20001554 PARAMETER Experiment Name: At_Drought_Soil_Dry_P Parameter: Age (day) Value: 21
  misc_feature: MA Experiment 20001554 PARAMETER Experiment Name: At_Drought_Soil_Dry_P Parameter: Organism Value: A. thaliana
  misc_feature: MA Experiment 20001554 PARAMETER Experiment Name: At_Drought_Soil_Dry_P Parameter: Plant Line Value: WS
  misc_feature: MA Experiment 20001554 PARAMETER Experiment Name: At_Drought_Soil_Dry_P Parameter: Post Timepoint (hr) Value: None
  misc_feature: MA Experiment 20001554 PARAMETER Experiment Name: At_Drought_Soil_Dry_P Parameter: Post-Treatment Value: None
  misc_feature: MA Experiment 20001554 PARAMETER Experiment Name: At_Drought_Soil_Dry_P Parameter: Timepoint (day) Value: 7
  misc_feature: MA Experiment 20001554 PARAMETER Experiment Name: At_Drought_Soil_Dry_P Parameter: Treatment Value: Drought vs. No Drought
  misc_feature: MA Experiment ID: 20001555 Result: Up-regulated in Transcription
  misc_feature: MA Experiment 20001555 PARAMETER Experiment Name: At_Drought_Soil_Dry_P Parameter: Age (day) Value: 24
  misc_feature: MA Experiment 20001555 PARAMETER Experiment Name: At_Drought_Soil_Dry_P Parameter: Organism Value: A. thaliana
  misc_feature: MA Experiment 20001555 PARAMETER Experiment Name: At_Drought_Soil_Dry_P Parameter: Plant Line Value: WS
  misc_feature: MA Experiment 20001555 PARAMETER Experiment Name: At_Drought_Soil_Dry_P Parameter: Post Timepoint (hr) Value: None
  misc_feature: MA Experiment 20001555 PARAMETER Experiment Name: At_Drought_Soil_Dry_P Parameter: Post-Treatment Value: None
  misc_feature: MA Experiment 20001555 PARAMETER Experiment Name: At_Drought_Soil_Dry_P Parameter: Timepoint (day) Value: 10
  misc_feature: MA Experiment 20001555 PARAMETER Experiment Name: At_Drought_Soil_Dry_P Parameter: Treatment Value: Drought vs. No Drought
  misc_feature: MA Experiment ID: 20001559 Result: Up-regulated in Transcription
  misc_feature: MA Experiment 20001559 PARAMETER Experiment Name: At_Drought_Soil_Dry_P Parameter: Age (day) Value: 28
  misc_feature: MA Experiment 20001559 PARAMETER Experiment Name: At_Drought_Soil_Dry_P Parameter: Organism Value: A. thaliana
  misc_feature: MA Experiment 20001559 PARAMETER Experiment Name: At_Drought_Soil_Dry_P Parameter: Plant Line Value: WS
  misc_feature: MA Experiment 20001559 PARAMETER Experiment Name: At_Drought_Soil_Dry_P Parameter: Post Timepoint (hr) Value: 29
  misc_feature: MA Experiment 20001559 PARAMETER Experiment Name: At_Drought_Soil_Dry_P Parameter: Post-Treatment Value: Re-Water vs. No Drought
  misc_feature: MA Experiment 20001559 PARAMETER Experiment Name: At_Drought_Soil_Dry_P Parameter: Timepoint (day) Value: 14
  misc_feature: MA Experiment 20001559 PARAMETER Experiment Name: At_Drought_Soil_Dry_P Parameter: Treatment Value: Drought vs. No Drought
  misc_feature: MA Experiment ID: 20001904 Result: Up-regulated in Transcription
  misc_feature: MA Experiment 20001904 PARAMETER Experiment Name: At_Drought_Reproduction_P Parameter: Age (day) Value: 37
  misc_feature: MA Experiment 20001904 PARAMETER Experiment Name: At_Drought_Reproduction_P Parameter: Organism Value: A. thaliana
  misc_feature: MA Experiment 20001904 PARAMETER Experiment Name: At_Drought_Reproduction_P Parameter: Plant Line Value: WS
  misc_feature: MA Experiment 20001904 PARAMETER Experiment Name: At_Drought_Reproduction_P Parameter: Timepoint (day) Value: 7
  misc_feature: MA Experiment 20001904 PARAMETER Experiment Name: At_Drought_Reproduction_P Parameter: Tissue Value: Rosettes
  misc_feature: MA Experiment 20001904 PARAMETER Experiment Name: At_Drought_Reproduction_P Parameter: Treatment Value: Drought vs. No Drought
  misc_feature: MA Experiment ID: 20001905 Result: Up-regulated in Transcription
  misc_feature: MA Experiment 20001905 PARAMETER Experiment Name: At_Drought_Reproduction_P Parameter: Age (day) Value: 40
  misc_feature: MA Experiment 20001905 PARAMETER Experiment Name: At_Drought_Reproduction_P Parameter: Organism Value: A. thaliana
  misc_feature: MA Experiment 20001905 PARAMETER Experiment Name: At_Drought_Reproduction_P Parameter: Plant Line Value: WS
  misc_feature: MA Experiment 20001905 PARAMETER Experiment Name: At_Drought_Reproduction_P Parameter: Timepoint (day) Value: 10
  misc_feature: MA Experiment 20001905 PARAMETER Experiment Name: At_Drought_Reproduction_P Parameter: Tissue Value: Rosettes
  misc_feature: MA Experiment 20001905 PARAMETER Experiment Name: At_Drought_Reproduction_P Parameter: Treatment Value: Drought vs. No Drought
  misc_feature: MA Experiment ID: 20001911 Result: Up-regulated in Transcription
  misc_feature: MA Experiment 20001911 PARAMETER Experiment Name: At_Drought_Reproduction_P Parameter: Age (day) Value: 40
  misc_feature: MA Experiment 20001911 PARAMETER Experiment Name: At_Drought_Reproduction_P Parameter: Organism Value: A. thaliana
  misc_feature: MA Experiment 20001911 PARAMETER Experiment Name: At_Drought_Reproduction_P Parameter: Plant Line Value: WS
  misc_feature: MA Experiment 20001911 PARAMETER Experiment Name: At_Drought_Reproduction_P Parameter: Timepoint (day) Value: 10
  misc_feature: MA Experiment 20001911 PARAMETER Experiment Name: At_Drought_Reproduction_P Parameter: Tissue Value: Flowers
  misc_feature: MA Experiment 20001911 PARAMETER Experiment Name: At_Drought_Reproduction_P Parameter: Treatment Value: Drought vs. No Drought
  misc_feature: Phenotype: ROSETTE LEAVES Shape-Serrate
  misc_feature: Phenotype: ROSETTE LEAVES Other
  misc_feature: Phenotype: WHOLE PLANT Other
  misc_feature: Phenotype: ROSETTE LEAVES Curled-Curled 1
  misc_feature: Phenotype: ROSETTE LEAVES Shape-Serrate
  misc_feature: Phenotype: WHOLE PLANT Other
  misc_feature: Phenotype: WHOLE PLANT Other
  misc_feature: Phenotype: ROSETTE LEAVES Shape-Oval
  misc_feature: Phenotype: WHOLE PLANT Color-Dark Green
  misc_feature: Phenotype: WHOLE PLANT Size-Small

SEQ ID NO: 34471 - protein, 360 aa, Arabidopsis thaliana; identical to SEQ ID NO: 30881
  peptide (1)..(360): Ceres Seq. ID no. 13486968
  misc_feature (66)..(271): Homolog of NCBI NO: 37590914 NR Description: Unknown (protein for MGC:73374) [Danio rerio]
  misc_feature (93)..(271): Homolog of NCBI NO: 16306582 NR Description: F-box and leucine-rich repeat protein 2
  misc_feature (93)..(271): Homolog of NCBI NO: 7022695 NR Description: unnamed protein product [Homo sapiens]
  misc_feature (93)..(271): Homolog of NCBI NO: 5919219 NR Description: leucine-rich repeats containing F-box protein
  misc_feature (29)..(343): Homolog of NCBI NO: 31226369 NR Description: ENSANGP00000010053 [Anopheles gambiae]
  misc_feature (215)..(360): Homolog of NCBI NO: 26450797 NR Description: unknown protein [Arabidopsis thaliana]
  misc_feature (22)..(355): Homolog of NCBI NO: 34907434 NR Description: P0018C10.44 [Oryza sativa (japonica
  misc_feature (1)..(360): Homolog of NCBI NO: 18411319 NR Description: F-box protein family [Arabidopsis thaliana]
  misc_feature (1)..(360): Homolog of NCBI NO: 21554029 NR Description: F-box protein AtFBL5 [Arabidopsis thaliana]
  misc_feature (1)..(360): Homolog of NCBI NO: 18394987 NR Description: F-box protein family [Arabidopsis thaliana]

SEQ ID NO: 34472 - protein, 358 aa, Arabidopsis thaliana; identical to SEQ ID NO: 30882
  peptide (1)..(358): Ceres Seq. ID no. 13486969
  misc_feature (64)..(269): Homolog of NCBI NO: 37590914 NR Description: Unknown (protein for MGC:73374) [Danio rerio]
  misc_feature (91)..(269): Homolog of NCBI NO: 16306582 NR Description: F-box and leucine-rich repeat protein 2
  misc_feature (91)..(269): Homolog of NCBI NO: 7022695 NR Description: unnamed protein product [Homo sapiens]
  misc_feature (91)..(269): Homolog of NCBI NO: 5919219 NR Description: leucine-rich repeats containing F-box protein
  misc_feature (27)..(341): Homolog of NCBI NO: 31226369 NR Description: ENSANGP00000010053 [Anopheles gambiae]
  misc_feature (213)..(358): Homolog of NCBI NO: 26450797 NR Description: unknown protein [Arabidopsis thaliana]
  misc_feature (20)..(353): Homolog of NCBI NO: 34907434 NR Description: P0018C10.44 [Oryza sativa (japonica
  misc_feature (1)..(358): Homolog of NCBI NO: 18411319 NR Description: F-box protein family [Arabidopsis thaliana]
  misc_feature (1)..(358): Homolog of NCBI NO: 21554029 NR Description: F-box protein AtFBL5 [Arabidopsis thaliana]
  misc_feature (1)..(358): Homolog of NCBI NO: 18394987 NR Description: F-box protein family [Arabidopsis thaliana]

SEQ ID NO: 34473 - protein, 352 aa, Arabidopsis thaliana; identical to SEQ ID NO: 30883
  peptide (1)..(352): Ceres Seq. ID no. 13486970
  misc_feature (58)..(263): Homolog of NCBI NO: 37590914 NR Description: Unknown (protein for MGC:73374) [Danio rerio]
  misc_feature (85)..(263): Homolog of NCBI NO: 16306582 NR Description: F-box and leucine-rich repeat protein 2
  misc_feature (85)..(263): Homolog of NCBI NO: 7022695 NR Description: unnamed protein product [Homo sapiens]
  misc_feature (85)..(263): Homolog of NCBI NO: 5919219 NR Description: leucine-rich repeats containing F-box protein
  misc_feature (21)..(335): Homolog of NCBI NO: 31226369 NR Description: ENSANGP00000010053 [Anopheles gambiae]
  misc_feature (207)..(352): Homolog of NCBI NO: 26450797 NR Description: unknown protein [Arabidopsis thaliana]
  misc_feature (14)..(347): Homolog of NCBI NO: 34907434 NR Description: P0018C10.44 [Oryza sativa (japonica
  misc_feature (1)..(352): Homolog of NCBI NO: 18411319 NR Description: F-box protein family [Arabidopsis thaliana]
  misc_feature (1)..(352): Homolog of NCBI NO: 21554029 NR Description: F-box protein AtFBL5 [Arabidopsis thaliana]
  misc_feature (1)..(352): Homolog of NCBI NO: 18394987 NR Description: F-box protein family [Arabidopsis thaliana]

SEQ ID NO: 34474 - DNA, 694 bp, Arabidopsis thaliana; identical to SEQ ID NO: 30884
  misc_feature (1)..(694): Ceres Seq. ID no. 12422743
  misc_feature: MA Experiment ID: 20000171 Result: Down-regulated in Transcription
  misc_feature: MA Experiment 20000171 PARAMETER Experiment Name: At_42deg_Heat_P Parameter: Age (day) Value: 14
  misc_feature: MA Experiment 20000171 PARAMETER Experiment Name: At_42deg_Heat_P Parameter: Organism Value: A. thaliana
  misc_feature: MA Experiment 20000171 PARAMETER Experiment Name: At_42deg_Heat_P Parameter: Plant Line Value: WS
  misc_feature: MA Experiment 20000171 PARAMETER Experiment Name: At_42deg_Heat_P Parameter: Temperature (deg C) Value: 42 vs. 22
  misc_feature: MA Experiment 20000171 PARAMETER Experiment Name: At_42deg_Heat_P Parameter: Timepoint (hr) Value: 1
  misc_feature: MA Experiment 20000171 PARAMETER Experiment Name: At_42deg_Heat_P Parameter: Tissue Value: Aerial
  misc_feature: MA Experiment ID: 20000179 Result: Up-regulated in Transcription
  misc_feature: MA Experiment 20000179 PARAMETER Experiment Name: At_Germinating_Seeds_P Parameter: Age (hr) Value: 6 vs. 0
  misc_feature: MA Experiment 20000179 PARAMETER Experiment Name: At_Germinating_Seeds_P Parameter: Tissue Value: Germinating Seeds
  misc_feature: MA Experiment ID: 20000182 Result: Down-regulated in Transcription
  misc_feature: MA Experiment 20000182 PARAMETER Experiment Name: At_2mM_SA_P Parameter: Age (day) Value: 14
  misc_feature: MA Experiment 20000182 PARAMETER Experiment Name: At_2mM_SA_P Parameter: Organism Value: A. thaliana
  misc_feature: MA Experiment 20000182 PARAMETER Experiment Name: At_2mM_SA_P Parameter: Plant Line Value: WS
  misc_feature: MA Experiment 20000182 PARAMETER Experiment Name: At_2mM_SA_P Parameter: Timepoint (hr) Value: 6
  misc_feature: MA Experiment 20000182 PARAMETER Experiment Name: At_2mM_SA_P Parameter: Tissue Value: Aerial
  misc_feature: MA Experiment 20000182 PARAMETER Experiment Name: At_2mM_SA_P Parameter: Treatment Value: 2mM SA vs. No Treatment
  misc_feature: MA Experiment ID: 20000184 Result: Up-regulated in Transcription
  misc_feature: MA Experiment 20000184 PARAMETER Experiment Name: At_Shoots__P Parameter: Age (day) Value: 7
  misc_feature: MA Experiment 20000184 PARAMETER Experiment Name: At_Shoots__P Parameter: Tissue Value: Shoots vs. Whole Plant
  misc_feature: MA Experiment ID: 20000227 Result: Up-regulated in Transcription
  misc_feature: MA Experiment 20000227 PARAMETER Experiment Name: At_Root-Tips-vs-Tops_P Parameter: Tissue Value: Root Tips vs. Root Tops
  misc_feature: MA Experiment ID: 20000234 Result: Up-regulated in Transcription
  misc_feature: MA Experiment 20000234 PARAMETER Experiment Name: At_Siliques_P Parameter: Age (day) Value: 21
  misc_feature: MA Experiment 20000234 PARAMETER Experiment Name: At_Siliques_P Parameter: Organism Value: A. thaliana
  misc_feature: MA Experiment 20000234 PARAMETER Experiment Name: At_Siliques_P Parameter: Plant Line Value: WS
  misc_feature: MA Experiment 20000234 PARAMETER Experiment Name: At_Siliques_P Parameter: Tissue Value: Less Than 5mm Siliques vs. Whole Plant
  misc_feature: MA Experiment ID: 20000264 Result: Up-regulated in Transcription
  misc_feature: MA Experiment 20000264 PARAMETER Experiment Name: At_Open_Flower_P Parameter: Age (day) Value: 21
  misc_feature: MA Experiment 20000264 PARAMETER Experiment Name: At_Open_Flower_P Parameter: Plant Line Value: WS
  misc_feature: MA Experiment 20000264 PARAMETER Experiment Name: At_Open_Flower_P Parameter: Tissue Value: Open Flower vs. Whole Plant
  misc_feature: MA Experiment ID: 20000265 Result: Up-regulated in Transcription
  misc_feature: MA Experiment 20000265 PARAMETER Experiment Name: At_Open_Flower_P Parameter: Age (day) Value: 21
  misc_feature: MA Experiment 20000265 PARAMETER Experiment Name: At_Open_Flower_P Parameter: Plant Line Value: WS
  misc_feature: MA Experiment 20000265 PARAMETER Experiment Name: At_Open_Flower_P Parameter: Tissue Value: Closed Flower vs. Whole Plant
  misc_feature: MA Experiment ID: 20000286 Result: Up-regulated in Transcription
  misc_feature: MA Experiment 20000286 PARAMETER Experiment Name: At_Open_Flower_P Parameter: Age (day) Value: 21
  misc_feature: MA Experiment 20000286 PARAMETER Experiment Name: At_Open_Flower_P Parameter: Plant Line Value: WS
  misc_feature: MA Experiment 20000286 PARAMETER Experiment Name: At_Open_Flower_P Parameter: Tissue Value: Half Open vs. Whole Plant
  misc_feature: MA Experiment ID: 20000438 Result: Up-regulated in Transcription
  misc_feature: MA Experiment 20000438 PARAMETER Experiment Name: At_Shoots__P Parameter: Age (day) Value: 14
  misc_feature: MA Experiment 20000438 PARAMETER Experiment Name: At_Shoots__P Parameter: Tissue Value: Shoots vs. Whole Plant
  misc_feature: MA Experiment ID: 20000495 Result: Up-regulated in Transcription
  misc_feature: MA Experiment 20000495 PARAMETER Experiment Name: At_Guard_Cells_P Parameter: Harvest Date Value: 8/2/2002
  misc_feature: MA Experiment 20000495 PARAMETER Experiment Name: At_Guard_Cells_P Parameter: Organism Value: A. thaliana
  misc_feature: MA Experiment 20000495 PARAMETER Experiment Name: At_Guard_Cells_P Parameter: Tissue Value: Guard Cells vs. Leaves
  misc_feature: MA Experiment ID: 20000794 Result: Down-regulated in Transcription
  misc_feature: MA Experiment 20000794 PARAMETER Experiment Name: At_Petals_P Parameter: Age (day) Value: 23-25 days
  misc_feature: MA Experiment 20000794 PARAMETER Experiment Name: At_Petals_P Parameter: Plant Line Value: WS
  misc_feature: MA Experiment 20000794 PARAMETER Experiment Name: At_Petals_P Parameter: Tissue Value: Petals vs. Whole plant
  misc_feature: MA Experiment ID: 20001248 Result: Down-regulated in Transcription
  misc_feature: MA Experiment 20001248 PARAMETER Experiment Name: At_Far-red-induction_P Parameter: Age (day) Value: 7
  misc_feature: MA Experiment 20001248 PARAMETER Experiment Name: At_Far-red-induction_P Parameter: Light Value: Far-red vs. White
  misc_feature: MA Experiment 20001248 PARAMETER Experiment Name: At_Far-red-induction_P Parameter: Organism Value: A. thaliana
  misc_feature: MA Experiment 20001248 PARAMETER Experiment Name: At_Far-red-induction_P Parameter: Plant Line Value: Columbia
  misc_feature: MA Experiment 20001248 PARAMETER Experiment Name: At_Far-red-induction_P Parameter: Timepoint (hr) Value: 4
  misc_feature: MA Experiment 20001248 PARAMETER Experiment Name: At_Far-red-induction_P Parameter: Tissue Value: Whole Plant
  misc_feature: MA Experiment ID: 20001558 Result: Up-regulated in Transcription
  misc_feature: MA Experiment 20001558 PARAMETER Experiment Name: At_Drought_Soil_Dry_P Parameter: Age (day) Value: 27
  misc_feature: MA Experiment 20001558 PARAMETER Experiment Name: At_Drought_Soil_Dry_P Parameter: Organism Value: A. thaliana
  misc_feature: MA Experiment 20001558 PARAMETER Experiment Name: At_Drought_Soil_Dry_P Parameter: Plant Line Value: WS
  misc_feature: MA Experiment 20001558 PARAMETER Experiment Name: At_Drought_Soil_Dry_P Parameter: Post Timepoint (hr) Value: 6
  misc_feature: MA Experiment 20001558 PARAMETER Experiment Name: At_Drought_Soil_Dry_P Parameter: Post-Treatment Value: Re-Water vs. No Drought
  misc_feature: MA Experiment 20001558 PARAMETER Experiment Name: At_Drought_Soil_Dry_P Parameter: Timepoint (day) Value: 13
  misc_feature: MA Experiment 20001558 PARAMETER Experiment Name: At_Drought_Soil_Dry_P Parameter: Treatment Value: Drought vs. No Drought
  misc_feature: MA Experiment ID: 20001560 Result: Up-regulated in Transcription
  misc_feature: MA Experiment 20001560 PARAMETER Experiment Name: At_Drought_Soil_Dry_P Parameter: Age (day) Value: 28
  misc_feature: MA Experiment 20001560 PARAMETER Experiment Name: At_Drought_Soil_Dry_P Parameter: Organism Value: A. thaliana
  misc_feature: MA Experiment 20001560 PARAMETER Experiment Name: At_Drought_Soil_Dry_P Parameter: Plant Line Value: WS
  misc_feature: MA Experiment 20001560 PARAMETER Experiment Name: At_Drought_Soil_Dry_P Parameter: Post Timepoint (hr) Value: None
  misc_feature: MA Experiment 20001560 PARAMETER Experiment Name: At_Drought_Soil_Dry_P Parameter: Post-Treatment Value: None
  misc_feature: MA Experiment 20001560 PARAMETER Experiment Name: At_Drought_Soil_Dry_P Parameter: Timepoint (day) Value: 14
  misc_feature: MA Experiment 20001560 PARAMETER Experiment Name: At_Drought_Soil_Dry_P Parameter: Treatment Value: Drought vs. No Drought
  misc_feature: MA Experiment ID: 20001905 Result: Up-regulated in Transcription
  misc_feature: MA Experiment 20001905 PARAMETER Experiment Name: At_Drought_Reproduction_P Parameter: Age (day) Value: 40
  misc_feature: MA Experiment 20001905 PARAMETER Experiment Name: At_Drought_Reproduction_P Parameter: Organism Value: A. thaliana
  misc_feature: MA Experiment 20001905 PARAMETER Experiment Name: At_Drought_Reproduction_P Parameter: Plant Line Value: WS
  misc_feature: MA Experiment 20001905 PARAMETER Experiment Name: At_Drought_Reproduction_P Parameter: Timepoint (day) Value: 10
  misc_feature: MA Experiment 20001905 PARAMETER Experiment Name: At_Drought_Reproduction_P Parameter: Tissue Value: Rosettes
  misc_feature: MA Experiment 20001905 PARAMETER Experiment Name: At_Drought_Reproduction_P Parameter: Treatment Value: Drought vs. No Drought
  misc_feature: MA Experiment ID: 20001906 Result: Down-regulated in Transcription
  misc_feature: MA Experiment 20001906 PARAMETER Experiment Name: At_Drought_Reproduction_P Parameter: Age (day) Value: 35
  misc_feature: MA Experiment 20001906 PARAMETER Experiment Name: At_Drought_Reproduction_P Parameter: Organism Value: A. thaliana
  misc_feature: MA Experiment 20001906 PARAMETER Experiment Name: At_Drought_Reproduction_P Parameter: Plant Line Value: WS
  misc_feature: MA Experiment 20001906 PARAMETER Experiment Name: At_Drought_Reproduction_P Parameter: Timepoint (day) Value: 5
  misc_feature: MA Experiment 20001906 PARAMETER Experiment Name: At_Drought_Reproduction_P Parameter: Tissue Value: Siliques
  misc_feature: MA Experiment 20001906 PARAMETER Experiment Name: At_Drought_Reproduction_P Parameter: Treatment Value: Drought vs. No Drought

SEQ ID NO: 34475 - protein, 129 aa, Arabidopsis thaliana; identical to SEQ ID NO: 30885
  peptide (1)..(129): Ceres Seq. ID no. 12422744
  misc_feature (57)..(129): Pfam Name: Rapid ALkalinization Factor (RALF) Pfam Description: Rapid ALkalinization Factor (RALF)
  misc_feature (55)..(128): Homolog of NCBI NO: 34915062 NR Description: P0025H06.15 [Oryza sativa (japonica
  misc_feature (63)..(129): Homolog of NCBI NO: 18397246 NR Description: expressed protein
  misc_feature (70)..(129): Homolog of NCBI NO: 34903676 NR Description: B1015E06.23 [Oryza sativa (japonica
  misc_feature (50)..(128): Homolog of NCBI NO: 16566316 NR Description: RALF precursor [Nicotiana tabacum]
  misc_feature (48)..(129): Homolog of NCBI NO: 18414528 NR Description: Expressed protein
  misc_feature (2)..(129): Homolog of NCBI NO: 18401177 NR Description: expressed protein
  misc_feature (1)..(129): Homolog of NCBI NO: 21593826 NR Description: unknown [Arabidopsis thaliana]
  misc_feature (1)..(129): Homolog of NCBI NO: 15240191 NR Description: putative protein

SEQ ID NO: 34476 - DNA, 1200 bp, Arabidopsis thaliana; identical to SEQ ID NO: 30886
  misc_feature (1)..(1200): Ceres Seq. ID no. 12371656
  misc_feature: MA Experiment ID: 108433 Result: Down-regulated in Transcription
  misc_feature: MA Experiment 108433 PARAMETER Experiment Name: At_rhl_Mutant2_cDNA_P Parameter: Age (day) Value: 7
  misc_feature: MA Experiment 108433 PARAMETER Experiment Name: At_rhl_Mutant2_cDNA_P Parameter: Organism Value: A. thaliana
  misc_feature: MA Experiment 108433 PARAMETER Experiment Name: At_rhl_Mutant2_cDNA_P Parameter: Plant Line Value: rhl Mutant vs. wt landsburg
  misc_feature: MA Experiment 108433 PARAMETER Experiment Name: At_rhl_Mutant2_cDNA_P Parameter: Tissue Value: Roots
  misc_feature: MA Experiment ID: 108434 Result: Up-regulated in Transcription
  misc_feature: MA Experiment 108434 PARAMETER Experiment Name: At_Root_Tips_cDNA_P Parameter: Tissue Value: Root Tips
  misc_feature: MA Experiment ID: 108595 Result: Down-regulated in Transcription
  misc_feature: MA Experiment 108595 PARAMETER Experiment Name: At_Ler-pi_Ovule_cDNA_P Parameter: Plant Line Value: null
  misc_feature: MA Experiment ID: 20000069 Result: Down-regulated in Transcription
  misc_feature: MA Experiment 20000069 PARAMETER Experiment Name: At_100uM_ABA_Mutants_cDNA_P Parameter: Plant Line Value: CS23
  misc_feature: MA Experiment 20000069 PARAMETER Experiment Name: At_100uM_ABA_Mutants_cDNA_P Parameter: Timepoint (hr) Value: 6
  misc_feature: MA Experiment 20000069 PARAMETER Experiment Name: At_100uM_ABA_Mutants_cDNA_P Parameter: Tissue Value: Aerial
  misc_feature: MA Experiment 20000069 PARAMETER Experiment Name: At_100uM_ABA_Mutants_cDNA_P Parameter: Treatment Value: 100uM ABA vs. No Treatment
  misc_feature: MA Experiment ID: 20000070 Result: Down-regulated in Transcription
  misc_feature: MA Experiment 20000070 PARAMETER Experiment Name: At_100uM_ABA_Mutants_cDNA_P Parameter: Plant Line Value: CS24
  misc_feature: MA Experiment 20000070 PARAMETER Experiment Name: At_100uM_ABA_Mutants_cDNA_P Parameter: Timepoint (hr) Value: 6
  misc_feature: MA Experiment 20000070 PARAMETER Experiment Name: At_100uM_ABA_Mutants_cDNA_P Parameter: Tissue Value: Aerial
  misc_feature: MA Experiment 20000070 PARAMETER Experiment Name: At_100uM_ABA_Mutants_cDNA_P Parameter: Treatment Value: 100uM ABA vs. No Treatment
  misc_feature: MA Experiment ID: 20000071 Result: Down-regulated in Transcription
  misc_feature: MA Experiment 20000071 PARAMETER Experiment Name: At_100uM_ABA_Mutants_cDNA_P Parameter: Plant Line Value: CS8104
  misc_feature: MA Experiment 20000071 PARAMETER Experiment Name: At_100uM_ABA_Mutants_cDNA_P Parameter: Timepoint (hr) Value: 6
  misc_feature: MA Experiment 20000071 PARAMETER Experiment Name: At_100uM_ABA_Mutants_cDNA_P Parameter: Tissue Value: Aerial
  misc_feature: MA Experiment 20000071 PARAMETER Experiment Name: At_100uM_ABA_Mutants_cDNA_P Parameter: Treatment Value: 100uM ABA vs. No Treatment
  misc_feature: MA Experiment ID: 20000072 Result: Down-regulated in Transcription
  misc_feature: MA Experiment 20000072 PARAMETER Experiment Name: At_100uM_ABA_Mutants_cDNA_P Parameter: Plant Line Value: CS8105
  misc_feature: MA Experiment 20000072 PARAMETER Experiment Name: At_100uM_ABA_Mutants_cDNA_P Parameter: Timepoint (hr) Value: 6
  misc_feature: MA Experiment 20000072 PARAMETER Experiment Name: At_100uM_ABA_Mutants_cDNA_P Parameter: Tissue Value: Aerial
  misc_feature: MA Experiment 20000072 PARAMETER Experiment Name: At_100uM_ABA_Mutants_cDNA_P Parameter: Treatment Value: 100uM ABA vs. No Treatment
  misc_feature: MA Experiment ID: 20000087 Result: Down-regulated in Transcription
  misc_feature: MA Experiment 20000087 PARAMETER Experiment Name: At_100uM_ABA_Mutants_cDNA_P Parameter: Plant Line Value: WS
  misc_feature: MA Experiment 20000087 PARAMETER Experiment Name: At_100uM_ABA_Mutants_cDNA_P Parameter: Timepoint (hr) Value: 6
  misc_feature: MA Experiment 20000087 PARAMETER Experiment Name: At_100uM_ABA_Mutants_cDNA_P Parameter: Tissue Value: Aerial
  misc_feature: MA Experiment 20000087 PARAMETER Experiment Name: At_100uM_ABA_Mutants_cDNA_P Parameter: Treatment Value: 100uM ABA vs. No Treatment
  misc_feature: MA Experiment ID: 20000088 Result: Down-regulated in Transcription
  misc_feature: MA Experiment 20000088 PARAMETER Experiment Name: At_100uM_ABA_Mutants_cDNA_P Parameter: Plant Line Value: Landsberg
  misc_feature: MA Experiment 20000088 PARAMETER Experiment Name: At_100uM_ABA_Mutants_cDNA_P Parameter: Timepoint (hr) Value: 6
  misc_feature: MA Experiment 20000088 PARAMETER Experiment Name: At_100uM_ABA_Mutants_cDNA_P Parameter: Tissue Value: Aerial
  misc_feature: MA Experiment 20000088 PARAMETER Experiment Name: At_100uM_ABA_Mutants_cDNA_P Parameter: Treatment Value: 100uM ABA vs. No Treatment
  misc_feature: MA Experiment ID: 20000089 Result: Down-regulated in Transcription
  misc_feature: MA Experiment ID: 20000090 Result: Down-regulated in Transcription
  misc_feature: MA Experiment ID: 20000111 Result: Up-regulated in Transcription
  misc_feature: MA Experiment 20000111 PARAMETER Experiment Name: At_42deg_Heat_cDNA_P Parameter: Temperature (deg C) Value: 42 vs. 22
  misc_feature: MA Experiment 20000111 PARAMETER Experiment Name: At_42deg_Heat_cDNA_P Parameter: Timepoint (hr) Value: 6
  misc_feature: MA Experiment 20000111 PARAMETER Experiment Name: At_42deg_Heat_cDNA_P Parameter: Tissue Value: Aerial
  misc_feature: MA Experiment ID: 20000113 Result: Up-regulated in Transcription
  misc_feature: MA Experiment 20000113 PARAMETER Experiment Name: At_42deg_Heat_cDNA_P Parameter: Temperature (deg C) Value: 42 vs. 22
  misc_feature: MA Experiment 20000113 PARAMETER Experiment Name: At_42deg_Heat_cDNA_P Parameter: Timepoint (hr) Value: 8
  misc_feature: MA Experiment 20000113 PARAMETER Experiment Name: At_42deg_Heat_cDNA_P Parameter: Tissue Value: Aerial
  misc_feature: MA Experiment ID: 20000117 Result: Down-regulated in Transcription
  misc_feature: MA Experiment 20000117 PARAMETER Experiment Name: At_100uM_ABA_Mutants_cDNA_P Parameter: Plant Line Value: Columbia
  misc_feature: MA Experiment 20000117 PARAMETER Experiment Name: At_100uM_ABA_Mutants_cDNA_P Parameter: Timepoint (hr) Value: 6
  misc_feature: MA Experiment 20000117 PARAMETER Experiment Name: At_100uM_ABA_Mutants_cDNA_P Parameter: Tissue Value: Aerial
  misc_feature: MA Experiment 20000117 PARAMETER Experiment Name: At_100uM_ABA_Mutants_cDNA_P Parameter: Treatment Value: 100uM ABA vs. No Treatment
  misc_feature: MA Experiment ID: 20000179 Result: Up-regulated in Transcription
  misc_feature: MA Experiment 20000179 PARAMETER Experiment Name: At_Germinating_Seeds_P Parameter: Age (hr) Value: 6 vs. 0
  misc_feature: MA Experiment 20000179 PARAMETER Experiment Name: At_Germinating_Seeds_P Parameter: Tissue Value: Germinating Seeds
  misc_feature: MA Experiment ID: 20000437 Result: Down-regulated in Transcription
  misc_feature: MA Experiment 20000437 PARAMETER Experiment Name: At_Drought_P Parameter: Age (day) Value: 8
  misc_feature: MA Experiment 20000437 PARAMETER Experiment Name: At_Drought_P Parameter: Organism Value: A. thaliana
  misc_feature: MA Experiment 20000437 PARAMETER Experiment Name: At_Drought_P Parameter: Plant Line Value: WS
  misc_feature: MA Experiment 20000437 PARAMETER Experiment Name: At_Drought_P Parameter: Timepoint (hr) Value: 24
  misc_feature: MA Experiment 20000437 PARAMETER Experiment Name: At_Drought_P Parameter: Tissue Value: Whole Plant
  misc_feature: MA Experiment 20000437 PARAMETER Experiment Name: At_Drought_P Parameter: Treatment Value: Drought vs. No Drought

SEQ ID NO: 34477 - protein, 298 aa, Arabidopsis thaliana; identical to SEQ ID NO: 30887
  peptide (1)..(298): Ceres Seq. ID no. 12371657
  misc_feature (81)..(298): Homolog of NCBI NO: 2331139 NR Description: 2-oxoglutarate/malate translocator [Oryza sativa]
  misc_feature (74)..(298): Homolog of NCBI NO: 19913111 NR Description: dicarboxylate/tricarboxylate carrier [Nicotiana
  misc_feature (3)..(298): Homolog of NCBI NO: 2130090 NR Description: 2-oxoglutarate/malate translocator (clones OMT134
  misc_feature (3)..(298): Homolog of NCBI NO: 2130089 NR Description: 2-oxoglutarate/malate translocator (clone
  misc_feature (4)..(298): Homolog of NCBI NO: 19913107 NR Description: dicarboxylate/tricarboxylate carrier [Nicotiana
  misc_feature (1)..(298): Homolog of NCBI NO: 10798640 NR Description: mitochondrial 2-oxoglutarate/malate carrier
  misc_feature (1)..(298): Homolog of NCBI NO: 19913105 NR Description: dicarboxylate/tricarboxylate carrier [Nicotiana
  misc_feature (4)..(298): Homolog of NCBI NO: 7489246 NR Description: oxoglutarate/malate translocator - potato
  misc_feature (1)..(298): Homolog of NCBI NO: 19913109 NR Description: dicarboxylate/tricarboxylate carrier [Nicotiana
  misc_feature (1)..(298): Homolog of NCBI NO: 15241167 NR Description: mitochondrial 2-oxoglutarate/malate translocator,

SEQ ID NO: 34478 - protein, 273 aa, Arabidopsis thaliana; identical to SEQ ID NO: 30888
  peptide (1)..(273): Ceres Seq. ID no. 12371658
  misc_feature (56)..(273): Homolog of NCBI NO: 2331139 NR Description: 2-oxoglutarate/malate translocator [Oryza sativa]
  misc_feature (49)..(273): Homolog of NCBI NO: 19913111 NR Description: dicarboxylate/tricarboxylate carrier [Nicotiana
  misc_feature (1)..(273): Homolog of NCBI NO: 2130090 NR Description: 2-oxoglutarate/malate translocator (clones OMT134
  misc_feature (1)..(273): Homolog of NCBI NO: 2130089 NR Description: 2-oxoglutarate/malate translocator (clone
  misc_feature (1)..(273): Homolog of NCBI NO: 19913107 NR Description: dicarboxylate/tricarboxylate carrier [Nicotiana
  misc_feature (1)..(273): Homolog of NCBI NO: 10798640 NR Description: mitochondrial 2-oxoglutarate/malate carrier
  misc_feature (1)..(273): Homolog of NCBI NO: 19913105 NR Description: dicarboxylate/tricarboxylate carrier [Nicotiana
  misc_feature (1)..(273): Homolog of NCBI NO: 7489246 NR Description: oxoglutarate/malate translocator - potato
  misc_feature (1)..(273): Homolog of NCBI NO: 19913109 NR Description: dicarboxylate/tricarboxylate carrier [Nicotiana
  misc_feature (1)..(273): Homolog of NCBI NO: 15241167 NR Description: mitochondrial 2-oxoglutarate/malate translocator,

SEQ ID NO: 34479 - protein, 262 aa, Arabidopsis thaliana; identical to SEQ ID NO: 30889
  peptide (1)..(262): Ceres Seq. ID no. 12371659
  misc_feature (45)..(262): Homolog of NCBI NO: 2331139 NR Description: 2-oxoglutarate/malate translocator [Oryza sativa]
  misc_feature (38)..(262): Homolog of NCBI NO: 19913111 NR Description: dicarboxylate/tricarboxylate carrier [Nicotiana
  misc_feature (1)..(262): Homolog of NCBI NO: 2130090 NR Description: 2-oxoglutarate/malate translocator (clones OMT134
  misc_feature (1)..(262): Homolog of NCBI NO: 2130089 NR Description: 2-oxoglutarate/malate translocator (clone
  misc_feature (1)..(262): Homolog of NCBI NO: 19913107 NR Description: dicarboxylate/tricarboxylate carrier [Nicotiana
  misc_feature (1)..(262): Homolog of NCBI NO: 10798640 NR Description: mitochondrial 2-oxoglutarate/malate carrier
  misc_feature (1)..(262): Homolog of NCBI NO: 19913105 NR Description: dicarboxylate/tricarboxylate carrier [Nicotiana
  misc_feature (1)..(262): Homolog of NCBI NO: 7489246 NR Description: oxoglutarate/malate translocator - potato
  misc_feature (1)..(262): Homolog of NCBI NO: 19913109 NR Description: dicarboxylate/tricarboxylate carrier [Nicotiana
  misc_feature (1)..(262): Homolog of NCBI NO: 15241167 NR Description: mitochondrial 2-oxoglutarate/malate translocator,

SEQ ID NO: 34480 - DNA, 1501 bp, Arabidopsis thaliana; identical to SEQ ID NO: 30890
  misc_feature (1)..(1501): Ceres Seq. ID no. 12321354
  misc_feature: MA Experiment ID: 108473 Result: Up-regulated in Transcription
  misc_feature: MA Experiment 108473 PARAMETER Experiment Name: At_Drought_Flowers_cDNA_P Parameter: Timepoint (hr) Value: 7 d
  misc_feature: MA Experiment 108473 PARAMETER Experiment Name: At_Drought_Flowers_cDNA_P Parameter: Tissue Value: Flower
  misc_feature: MA Experiment 108473 PARAMETER Experiment Name: At_Drought_Flowers_cDNA_P Parameter: Treatment Value: Drought vs. No Drought
  misc_feature: MA Experiment ID: 108572 Result: Up-regulated in Transcription
  misc_feature: MA Experiment 108572 PARAMETER Experiment Name: At_Drought_cDNA_P Parameter: Timepoint (hr) Value: 1
  misc_feature: MA Experiment 108572 PARAMETER Experiment Name: At_Drought_cDNA_P Parameter: Tissue Value: Aerial
  misc_feature: MA Experiment 108572 PARAMETER Experiment Name: At_Drought_cDNA_P Parameter: Treatment Value: Drought vs. No Drought
  misc_feature: MA Experiment ID: 108573 Result: Up-regulated in Transcription
  misc_feature: MA Experiment 108573 PARAMETER Experiment Name: At_Drought_cDNA_P Parameter: Timepoint (hr) Value: 6
  misc_feature: MA Experiment 108573 PARAMETER Experiment Name: At_Drought_cDNA_P Parameter: Tissue Value: Aerial
  misc_feature: MA Experiment 108573 PARAMETER Experiment Name: At_Drought_cDNA_P Parameter: Treatment Value: Drought vs. No Drought
  misc_feature: MA Experiment ID: 108579 Result: Down-regulated in Transcription
  misc_feature: MA Experiment 108579 PARAMETER Experiment Name: At_4deg_Cold_cDNA_P Parameter: Temperature (deg C) Value: 4 vs. 22
  misc_feature: MA Experiment 108579 PARAMETER Experiment Name: At_4deg_Cold_cDNA_P Parameter: Timepoint (hr) Value: 6
  misc_feature: MA Experiment 108579 PARAMETER Experiment Name: At_4deg_Cold_cDNA_P Parameter: Tissue Value: Aerial
  misc_feature: MA Experiment ID: 108585 Result: Up-regulated in Transcription
  misc_feature: MA Experiment 108585 PARAMETER Experiment Name: At_5mM_NaNP_cDNA_P Parameter: Timepoint (hr) Value: 6
  misc_feature: MA Experiment 108585 PARAMETER Experiment Name: At_5mM_NaNP_cDNA_P Parameter: Tissue Value: Aerial
  misc_feature: MA Experiment 108585 PARAMETER Experiment Name: At_5mM_NaNP_cDNA_P Parameter: Treatment Value: null
  misc_feature: MA Experiment ID: 20000113 Result: Down-regulated in Transcription
  misc_feature: MA Experiment 20000113 PARAMETER Experiment Name: At_42deg_Heat_cDNA_P Parameter: Temperature (deg C) Value: 42 vs. 22
  misc_feature: MA Experiment 20000113 PARAMETER Experiment Name: At_42deg_Heat_cDNA_P Parameter: Timepoint (hr) Value: 8
  misc_feature: MA Experiment 20000113 PARAMETER Experiment Name: At_42deg_Heat_cDNA_P Parameter: Tissue Value: Aerial

SEQ ID NO: 34481 - protein, 375 aa, Arabidopsis thaliana; identical to SEQ ID NO: 30891
  peptide (1)..(375): Ceres Seq. ID no. 12321355
  misc_feature (1)..(375): Pfam Name: Transcription factor IIA, alpha/beta subunit Pfam Description: Transcription factor IIA, alpha/beta subunit
  misc_feature (303)..(375): Homolog of NCBI NO: 15237841 NR Description: putative protein; protein id: At5g59230.1
  misc_feature (1)..(327): Homolog of NCBI NO: 25406976 NR Description: protein F22G5.18 [imported] - Arabidopsis
  misc_feature (59)..(368): Homolog of NCBI NO: 25406978 NR Description: protein F22G5.14 [imported] - Arabidopsis
  misc_feature (163)..(375): Homolog of NCBI NO: 17065294 NR Description: similar to TFIIA [Arabidopsis thaliana]
  misc_feature (59)..(375): Homolog of NCBI NO: 25406976 NR Description: protein F22G5.18 [imported] - Arabidopsis
  misc_feature (1)..(341): Homolog of NCBI NO: 25406978 NR Description: protein F22G5.14 [imported] - Arabidopsis
  misc_feature (222)..(375): Homolog of NCBI NO: 1429226 NR Description: TFIIA [Arabidopsis thaliana]
  misc_feature (1)..(174): Homolog of NCBI NO: 1429226 NR Description: TFIIA [Arabidopsis thaliana]
  misc_feature (1)..(375): Homolog of NCBI NO: 30680148 NR Description: transcription factor IIA large subunit
  misc_feature (1)..(375): Homolog of NCBI NO: 18390773 NR Description: transcription factor IIA large subunit

SEQ ID NO: 34482 - protein, 328 aa, Arabidopsis thaliana; identical to SEQ ID NO: 30892
  peptide (1)..(328): Ceres Seq. ID no. 12321356
  misc_feature (1)..(328): Pfam Name: Transcription factor IIA, alpha/beta subunit Pfam Description: Transcription factor IIA, alpha/beta subunit
  misc_feature (256)..(328): Homolog of NCBI NO: 15237841 NR Description: putative protein; protein id: At5g59230.1
  misc_feature (1)..(280): Homolog of NCBI NO: 25406976 NR Description: protein F22G5.18 [imported] - Arabidopsis
  misc_feature (12)..(321): Homolog of NCBI NO: 25406978 NR Description: protein F22G5.14 [imported] - Arabidopsis
  misc_feature (116)..(328): Homolog of NCBI NO: 17065294 NR Description: similar to TFIIA [Arabidopsis thaliana]
  misc_feature (12)..(328): Homolog of NCBI NO: 25406976 NR Description: protein F22G5.18 [imported] - Arabidopsis
  misc_feature (1)..(294): Homolog of NCBI NO: 25406978 NR Description: protein F22G5.14 [imported] - Arabidopsis
  misc_feature (175)..(328): Homolog of NCBI NO: 1429226 NR Description: TFIIA [Arabidopsis thaliana]
  misc_feature (1)..(127): Homolog of NCBI NO: 1429226 NR Description: TFIIA [Arabidopsis thaliana]
  misc_feature (1)..(328): Homolog of NCBI NO: 30680148 NR Description: transcription factor IIA large subunit
  misc_feature (1)..(328): Homolog of NCBI NO: 18390773 NR Description: transcription factor IIA large subunit

SEQ ID NO: 34483 - protein, 327 aa, Arabidopsis thaliana; identical to SEQ ID NO: 30893
  peptide (1)..(327): Ceres Seq. ID no. 12321357
  misc_feature (1)..(327): Pfam Name: Transcription factor IIA, alpha/beta subunit Pfam Description: Transcription factor IIA, alpha/beta subunit
  misc_feature (255)..(327): Homolog of NCBI NO: 15237841 NR Description: putative protein; protein id: At5g59230.1
  misc_feature (1)..(279): Homolog of NCBI NO: 25406976 NR Description: protein F22G5.18 [imported] - Arabidopsis
  misc_feature (11)..(320): Homolog of NCBI NO: 25406978 NR Description: protein F22G5.14 [imported] - Arabidopsis
  misc_feature (115)..(327): Homolog of NCBI NO: 17065294 NR Description: similar to TFIIA [Arabidopsis thaliana]
  misc_feature (11)..(327): Homolog of NCBI NO: 25406976 NR Description: protein F22G5.18 [imported] - Arabidopsis
  misc_feature (1)..(293): Homolog of NCBI NO: 25406978 NR Description: protein F22G5.14 [imported] - Arabidopsis
  misc_feature (174)..(327): Homolog of NCBI NO: 1429226 NR Description: TFIIA [Arabidopsis thaliana]
  misc_feature (1)..(126): Homolog of NCBI NO: 1429226 NR Description: TFIIA [Arabidopsis thaliana]
  misc_feature (1)..(327): Homolog of NCBI NO: 30680148 NR Description: transcription factor IIA large subunit
  misc_feature (1)..(327): Homolog of NCBI NO: 18390773 NR Description: transcription factor IIA large subunit

SEQ ID NO: 34484 - DNA, 540 bp, Arabidopsis thaliana; identical to SEQ ID NO: 26058
  misc_feature (1)..(540): Ceres Seq. ID no. 12599931
  misc_feature: MA Experiment ID: 108595 Result: Up-regulated in Transcription
  misc_feature: MA Experiment 108595 PARAMETER Experiment Name: At_Ler-pi_Ovule_cDNA_P Parameter: Plant Line Value: null
  misc_feature: MA Experiment ID: 20000113 Result: Up-regulated in Transcription
  misc_feature: MA Experiment 20000113 PARAMETER Experiment Name: At_42deg_Heat_cDNA_P Parameter: Temperature (deg C) Value: 42 vs. 22
  misc_feature: MA Experiment 20000113 PARAMETER Experiment Name: At_42deg_Heat_cDNA_P Parameter: Timepoint (hr) Value: 8
  misc_feature: MA Experiment 20000113 PARAMETER Experiment Name: At_42deg_Heat_cDNA_P Parameter: Tissue Value: Aerial
  misc_feature: MA Experiment ID: 20001451 Result: Up-regulated in Transcription
  misc_feature: MA Experiment 20001451 PARAMETER Experiment Name: At_Far-red-induction_P Parameter: Age (day) Value: 7
  misc_feature: MA Experiment 20001451 PARAMETER Experiment Name: At_Far-red-induction_P Parameter: Light Value: Far-red vs. White
  misc_feature: MA Experiment 20001451 PARAMETER Experiment Name: At_Far-red-induction_P Parameter: Organism Value: A. thaliana
  misc_feature: MA Experiment 20001451 PARAMETER Experiment Name: At_Far-red-induction_P Parameter: Plant Line Value: Columbia
  misc_feature: MA Experiment 20001451 PARAMETER Experiment Name: At_Far-red-induction_P Parameter: Timepoint (hr) Value: 24
  misc_feature: MA Experiment 20001451 PARAMETER Experiment Name: At_Far-red-induction_P Parameter: Tissue Value: Whole Plant

SEQ ID NO: 34485 - protein, 93 aa, Arabidopsis thaliana; identical to SEQ ID NO: 26059
  peptide (1)..(93): Ceres Seq. ID no. 12599932
  misc_feature (5)..(80): Pfam Name: Uncharacterised protein family (UPF0185) Pfam Description: Uncharacterised protein family (UPF0185)
  misc_feature (5)..(80): Pfam Name: Uncharacterised protein family (UPF0185) Pfam Description: Uncharacterised protein family (UPF0185)
  misc_feature (6)..(80): Homolog of NCBI NO: 1235522 NR Description: ORF is homologous to hypothetical 9.8 kD protein
  misc_feature (6)..(86): Homolog of NCBI NO: 28277496 NR Description: Similar to RIKEN cDNA 1810045K17 gene [Danio
  misc_feature (6)..(86): Homolog of NCBI NO: 37595394 NR Description: hypothetical protein BM-002 [Danio rerio]
  misc_feature (6)..(87): Homolog of NCBI NO: 7705300 NR Description: hypothetical protein BM-002 [Homo sapiens]
  misc_feature (4)..(86): Homolog of NCBI NO: 17557033 NR Description: Eukaryotic protein similar to human bone marrow
  misc_feature (6)..(80): Homolog of NCBI NO: 1235522 NR Description: ORF is homologous to hypothetical 9.8 kD protein
  misc_feature (6)..(86): Homolog of NCBI NO: 37595394 NR Description: hypothetical protein BM-002 [Danio rerio]
  misc_feature (4)..(86): Homolog of NCBI NO: 17557033 NR Description: Eukaryotic protein similar to human bone marrow
  misc_feature (1)..(93): Homolog of NCBI NO: 15217447 NR Description: unknown protein
  misc_feature (2)..(88): Homolog of NCBI NO: 34905822 NR Description: P0483G10.15 [Oryza sativa (japonica
  misc_feature (1)..(88): Homolog of NCBI NO: 20140686 NR Description: Hypothetical protein pr46A
  misc_feature (1)..(87): Homolog of NCBI NO: 40889046 NR Description: Chain A, Solution Structure Of Mouse Hypothetical
  misc_feature (1)..(86): Homolog of NCBI NO: 39589640 NR Description: Hypothetical protein CBG12253 [Caenorhabditis
  misc_feature (6)..(87): Homolog of NCBI NO: 7705300 NR Description: hypothetical protein BM-002 [Homo sapiens]
  misc_feature (6)..(86): Homolog of NCBI NO: 28277496 NR Description: Similar to RIKEN cDNA 1810045K17 gene [Danio
  misc_feature (1)..(86): Homolog of NCBI NO: 39589640 NR Description: Hypothetical protein CBG12253 [Caenorhabditis
  misc_feature (1)..(87): Homolog of NCBI NO: 40889046 NR Description: Chain A, Solution Structure Of Mouse Hypothetical
  misc_feature (1)..(88): Homolog of NCBI NO: 20140686 NR Description: Hypothetical protein pr46A
  misc_feature (2)..(88): Homolog of NCBI NO: 34905822 NR Description: P0483G10.15 [Oryza sativa (japonica
  misc_feature (1)..(93): Homolog of NCBI NO: 15217447 NR Description: unknown protein

SEQ ID NO: 34486 - DNA, 844 bp, Arabidopsis thaliana; identical to SEQ ID NO: 30896
  misc_feature (1)..(844): Ceres Seq. ID no. 12337495
  misc_feature: MA Experiment ID: 108434 Result: Up-regulated in Transcription
  misc_feature: MA Experiment 108434 PARAMETER Experiment Name: At_Root_Tips_cDNA_P Parameter: Tissue Value: Root Tips
  misc_feature: MA Experiment ID: 108462 Result: Down-regulated in Transcription
  misc_feature: MA Experiment 108462 PARAMETER Experiment Name: At_Germinating_Seeds_cDNA_P Parameter: Age (day) Value: 2 vs. 0
  misc_feature: MA Experiment 108462 PARAMETER Experiment Name: At_Germinating_Seeds_cDNA_P Parameter: Tissue Value: Germinating Seeds
  misc_feature: MA Experiment ID: 108463 Result: Down-regulated in Transcription
  misc_feature: MA Experiment 108463 PARAMETER Experiment Name: At_Germinating_Seeds_cDNA_P Parameter: Age (day) Value: 3 vs. 0
  misc_feature: MA Experiment 108463 PARAMETER Experiment Name: At_Germinating_Seeds_cDNA_P Parameter: Tissue Value: Germinating Seeds
  misc_feature: MA Experiment ID: 108464 Result: Down-regulated in Transcription
  misc_feature: MA Experiment 108464 PARAMETER Experiment Name: At_Germinating_Seeds_cDNA_P Parameter: Age (day) Value: 4 vs. 0
  misc_feature: MA Experiment 108464 PARAMETER Experiment Name: At_Germinating_Seeds_cDNA_P Parameter: Tissue Value: Germinating Seeds
  misc_feature: MA Experiment ID: 20000180 Result: Down-regulated in Transcription
  misc_feature: MA Experiment 20000180 PARAMETER Experiment Name: At_Germinating_Seeds_P Parameter: Age (hr) Value: 24 vs. 0
  misc_feature: MA Experiment 20000180 PARAMETER Experiment Name: At_Germinating_Seeds_P Parameter: Tissue Value: Germinating Seeds

SEQ ID NO: 34487 - protein, 222 aa, Arabidopsis thaliana; identical to SEQ ID NO: 30897
  peptide (1)..(222): Ceres Seq. ID no. 12337496
  misc_feature (88)..(120): Pfam Name: Ankyrin repeat Pfam Description: Ankyrin repeat
  misc_feature (58)..(221): Homolog of NCBI NO: 3929221 NR Description: TRF1-interacting ankyrin-related ADP-ribose
  misc_feature (31)..(221): Homolog of NCBI NO: 27461955 NR Description: tankyrase 1 [Gallus gallus]
  misc_feature (33)..(213): Homolog of NCBI NO: 28274854 NR Description: ankyrin repeat protein E4_8 [synthetic construct]
  misc_feature (58)..(214): Homolog of NCBI NO: 30684671 NR Description: ankyrin-related protein [Arabidopsis thaliana]
  misc_feature (57)..(213): Homolog of NCBI NO: 28373666 NR Description: Chain A, Sank E3_5: An Artificial Ankyrin Repeat
  misc_feature (93)..(215): Homolog of NCBI NO: 28373837 NR Description: Chain A, 4ank: A Designed Ankyrin Repeat Protein
  misc_feature (17)..(107): Homolog of NCBI NO: 27497215 NR Description: Unknown protein [Oryza sativa (japonica
  misc_feature (17)..(211): Homolog of NCBI NO: 15451616 NR Description: Hypothetical protein with similarity to ankyrins
  misc_feature (17)..(196): Homolog of NCBI NO: 6681330 NR Description: hypothetical protein [Arabidopsis thaliana]
  misc_feature (17)..(222): Homolog of NCBI NO: 18398673 NR Description: expressed protein

SEQ ID NO: 34488 - protein, 206 aa, Arabidopsis thaliana; identical to SEQ ID NO: 30898
  peptide (1)..(206): Ceres Seq. ID no. 12337497
  misc_feature (72)..(104): Pfam Name: Ankyrin repeat Pfam Description: Ankyrin repeat
  misc_feature (42)..(205): Homolog of NCBI NO: 3929221 NR Description: TRF1-interacting ankyrin-related ADP-ribose
  misc_feature (15)..(205): Homolog of NCBI NO: 27461955 NR Description: tankyrase 1 [Gallus gallus]
  misc_feature (17)..(197): Homolog of NCBI NO: 28274854 NR Description: ankyrin repeat protein E4_8 [synthetic construct]
  misc_feature (42)..(198): Homolog of NCBI NO: 30684671 NR Description: ankyrin-related protein [Arabidopsis thaliana]
  misc_feature (41)..(197): Homolog of NCBI NO: 28373666 NR Description: Chain A, Sank E3_5: An Artificial Ankyrin Repeat
  misc_feature (77)..(199): Homolog of NCBI NO: 28373837 NR Description: Chain A, 4ank: A Designed Ankyrin Repeat Protein
  misc_feature (1)..(91): Homolog of NCBI NO: 27497215 NR Description: Unknown protein [Oryza sativa (japonica
  misc_feature (1)..(195): Homolog of NCBI NO: 15451616 NR Description: Hypothetical protein with similarity to ankyrins
  misc_feature (1)..(180): Homolog of NCBI NO: 6681330 NR Description: hypothetical protein [Arabidopsis thaliana]
  misc_feature (1)..(206): Homolog of NCBI NO: 18398673 NR Description: expressed protein

SEQ ID NO: 34489 - DNA, 869 bp, Arabidopsis thaliana; identical to SEQ ID NO: 30899
  misc_feature (1)..(869): Ceres Seq. ID no. 12332915
  misc_feature: MA Experiment ID: 108434 Result: Down-regulated in Transcription
  misc_feature: MA Experiment 108434 PARAMETER Experiment Name: At_Root_Tips_cDNA_P Parameter: Tissue Value: Root Tips
  misc_feature: MA Experiment ID: 108488 Result: Down-regulated in Transcription
  misc_feature: MA Experiment ID: 108577 Result: Down-regulated in Transcription
  misc_feature: MA Experiment 108577 PARAMETER Experiment Name: At_42deg_Heat_cDNA_P Parameter: Temperature (deg C) Value: 42 vs. 22
  misc_feature: MA Experiment 108577 PARAMETER Experiment Name: At_42deg_Heat_cDNA_P Parameter: Timepoint (hr) Value: 6
  misc_feature: MA Experiment 108577 PARAMETER Experiment Name: At_42deg_Heat_cDNA_P Parameter: Tissue Value: Aerial
  misc_feature: MA Experiment ID: 108605 Result: Up-regulated in Transcription
  misc_feature: MA Experiment 108605 PARAMETER Experiment Name: At_100uM_ABA_cDNA_P Parameter: Timepoint (hr) Value: 6
  misc_feature: MA Experiment 108605 PARAMETER Experiment Name: At_100uM_ABA_cDNA_P Parameter: Tissue Value: Aerial
  misc_feature: MA Experiment 108605 PARAMETER Experiment Name: At_100uM_ABA_cDNA_P Parameter: Treatment Value: 100uM ABA vs. No Treatment
  misc_feature: MA Experiment ID: 108668 Result: Up-regulated in Transcription
  misc_feature: MA Experiment 108668 PARAMETER Experiment Name: At_2mM_SA_cDNA_P Parameter: Plant Line Value: WS
  misc_feature: MA Experiment 108668 PARAMETER Experiment Name: At_2mM_SA_cDNA_P Parameter: Timepoint (hr) Value: 6
  misc_feature: MA Experiment 108668 PARAMETER Experiment Name: At_2mM_SA_cDNA_P Parameter: Treatment Value: 2mM SA vs. No Treatment
  misc_feature: MA Experiment ID: 20000069 Result: Up-regulated in Transcription
  misc_feature: MA Experiment 20000069 PARAMETER Experiment Name: At_100uM_ABA_Mutants_cDNA_P Parameter: Plant Line Value: CS23
  misc_feature: MA Experiment 20000069 PARAMETER Experiment Name: At_100uM_ABA_Mutants_cDNA_P Parameter: Timepoint (hr) Value: 6
  misc_feature: MA Experiment 20000069 PARAMETER Experiment Name: At_100uM_ABA_Mutants_cDNA_P Parameter: Tissue Value: Aerial
  misc_feature: MA Experiment 20000069 PARAMETER Experiment Name: At_100uM_ABA_Mutants_cDNA_P Parameter: Treatment Value: 100uM ABA vs. No Treatment
  misc_feature: MA Experiment ID: 20000070 Result: Up-regulated in Transcription
  misc_feature: MA Experiment 20000070 PARAMETER Experiment Name: At_100uM_ABA_Mutants_cDNA_P Parameter: Plant Line Value: CS24
  misc_feature: MA Experiment 20000070 PARAMETER Experiment Name: At_100uM_ABA_Mutants_cDNA_P Parameter: Timepoint (hr) Value: 6
  misc_feature: MA Experiment 20000070 PARAMETER Experiment Name: At_100uM_ABA_Mutants_cDNA_P Parameter: Tissue Value: Aerial
  misc_feature: MA Experiment 20000070 PARAMETER Experiment Name: At_100uM_ABA_Mutants_cDNA_P Parameter: Treatment Value: 100uM ABA vs. No Treatment
  misc_feature: MA Experiment ID: 20000071 Result: Up-regulated in Transcription
  misc_feature: MA Experiment 20000071 PARAMETER Experiment Name: At_100uM_ABA_Mutants_cDNA_P Parameter: Plant Line Value: CS8104
  misc_feature: MA Experiment 20000071 PARAMETER Experiment Name: At_100uM_ABA_Mutants_cDNA_P Parameter: Timepoint (hr) Value: 6
  misc_feature: MA Experiment 20000071 PARAMETER Experiment Name: At_100uM_ABA_Mutants_cDNA_P Parameter: Tissue Value: Aerial
  misc_feature: MA Experiment 20000071 PARAMETER Experiment Name: At_100uM_ABA_Mutants_cDNA_P Parameter: Treatment Value: 100uM ABA vs. No Treatment
  misc_feature: MA Experiment ID: 20000086 Result: Up-regulated in Transcription
  misc_feature: MA Experiment 20000086 PARAMETER Experiment Name: At_100uM_ABA_Mutants_cDNA_P Parameter: Plant Line Value: CS22
  misc_feature: MA Experiment 20000086 PARAMETER Experiment Name: At_100uM_ABA_Mutants_cDNA_P Parameter: Timepoint (hr) Value: 6
  misc_feature: MA Experiment 20000086 PARAMETER Experiment Name: At_100uM_ABA_Mutants_cDNA_P Parameter: Tissue Value: Aerial
  misc_feature: MA Experiment 20000086 PARAMETER Experiment Name: At_100uM_ABA_Mutants_cDNA_P Parameter: Treatment Value: 100uM ABA vs. No Treatment
  misc_feature: MA Experiment ID: 20000087 Result: Up-regulated in Transcription
  misc_feature: MA Experiment 20000087 PARAMETER Experiment Name: At_100uM_ABA_Mutants_cDNA_P Parameter: Plant Line Value: WS
  misc_feature: MA Experiment 20000087 PARAMETER Experiment Name: At_100uM_ABA_Mutants_cDNA_P Parameter: Timepoint (hr) Value: 6
  misc_feature: MA Experiment 20000087 PARAMETER Experiment Name: At_100uM_ABA_Mutants_cDNA_P Parameter: Tissue Value: Aerial
  misc_feature: MA Experiment 20000087 PARAMETER Experiment Name: At_100uM_ABA_Mutants_cDNA_P Parameter: Treatment Value: 100uM ABA vs. No Treatment
  misc_feature: MA Experiment ID: 20000088 Result: Up-regulated in Transcription
  misc_feature: MA Experiment 20000088 PARAMETER Experiment Name: At_100uM_ABA_Mutants_cDNA_P Parameter: Plant Line Value: Landsberg
  misc_feature: MA Experiment 20000088 PARAMETER Experiment Name: At_100uM_ABA_Mutants_cDNA_P Parameter: Timepoint (hr) Value: 6
  misc_feature: MA Experiment 20000088 PARAMETER Experiment Name: At_100uM_ABA_Mutants_cDNA_P Parameter: Tissue Value: Aerial
  misc_feature: MA Experiment 20000088 PARAMETER Experiment Name: At_100uM_ABA_Mutants_cDNA_P Parameter: Treatment Value: 100uM ABA vs. No Treatment
  misc_feature: MA Experiment ID: 20000089 Result: Up-regulated in Transcription
  misc_feature: MA Experiment ID: 20000090 Result: Up-regulated in Transcription
  misc_feature: MA Experiment ID: 20000117 Result: Up-regulated in Transcription
  misc_feature: MA Experiment 20000117 PARAMETER Experiment Name: At_100uM_ABA_Mutants_cDNA_P Parameter: Plant Line Value: Columbia
  misc_feature: MA Experiment 20000117 PARAMETER Experiment Name: At_100uM_ABA_Mutants_cDNA_P Parameter: Timepoint (hr) Value: 6
  misc_feature: MA Experiment 20000117 PARAMETER Experiment Name: At_100uM_ABA_Mutants_cDNA_P Parameter: Tissue Value: Aerial
  misc_feature: MA Experiment 20000117 PARAMETER Experiment Name: At_100uM_ABA_Mutants_cDNA_P Parameter: Treatment Value: 100uM ABA vs. No Treatment
  misc_feature: MA Experiment ID: 20000166 Result: Up-regulated in Transcription
  misc_feature: MA Experiment 20000166 PARAMETER Experiment Name: At_100uM_ABA_P Parameter: Age (day) Value: 14
  misc_feature: MA Experiment 20000166 PARAMETER Experiment Name: At_100uM_ABA_P Parameter: Organism Value: A. thaliana
  misc_feature: MA Experiment 20000166 PARAMETER Experiment Name: At_100uM_ABA_P Parameter: Plant Line Value: WS
  misc_feature: MA Experiment 20000166 PARAMETER Experiment Name: At_100uM_ABA_P Parameter: Timepoint (hr) Value: 1
  misc_feature: MA Experiment 20000166 PARAMETER Experiment Name: At_100uM_ABA_P Parameter: Tissue Value: Aerial
  misc_feature: MA Experiment 20000166 PARAMETER Experiment Name: At_100uM_ABA_P Parameter: Treatment Value: 100uM ABA vs. No Treatment
  misc_feature: MA Experiment ID: 20000171 Result: Down-regulated in Transcription
  misc_feature: MA Experiment 20000171 PARAMETER Experiment Name: At_42deg_Heat_P Parameter: Age (day) Value: 14
  misc_feature: MA Experiment 20000171 PARAMETER Experiment Name: At_42deg_Heat_P Parameter: Organism Value: A. thaliana
  misc_feature: MA Experiment 20000171 PARAMETER Experiment Name: At_42deg_Heat_P Parameter: Plant Line Value: WS
  misc_feature: MA Experiment 20000171 PARAMETER Experiment Name: At_42deg_Heat_P Parameter: Temperature (deg C) Value: 42 vs. 22
  misc_feature: MA Experiment 20000171 PARAMETER Experiment Name: At_42deg_Heat_P Parameter: Timepoint (hr) Value: 1
  misc_feature: MA Experiment 20000171 PARAMETER Experiment Name: At_42deg_Heat_P Parameter: Tissue Value: Aerial
  misc_feature: MA Experiment ID: 20000173 Result: Down-regulated in Transcription
  misc_feature: MA Experiment 20000173 PARAMETER Experiment Name: At_42deg_Heat_P Parameter: Age (day) Value: 14
  misc_feature: MA Experiment 20000173 PARAMETER Experiment Name: At_42deg_Heat_P Parameter: Organism Value: A. thaliana
  misc_feature: MA Experiment 20000173 PARAMETER Experiment Name: At_42deg_Heat_P Parameter: Plant Line Value: WS
  misc_feature: MA Experiment 20000173 PARAMETER Experiment Name: At_42deg_Heat_P Parameter: Temperature (deg C) Value: 42 vs. 22
  misc_feature: MA Experiment 20000173 PARAMETER Experiment Name: At_42deg_Heat_P Parameter: Timepoint (hr) Value: 6
  misc_feature: MA Experiment 20000173 PARAMETER Experiment Name: At_42deg_Heat_P Parameter: Tissue Value: Aerial
  misc_feature: MA Experiment ID: 20000182 Result: Up-regulated in Transcription
  misc_feature: MA Experiment 20000182 PARAMETER Experiment Name: At_2mM_SA_P Parameter: Age (day) Value: 14
  misc_feature: MA Experiment 20000182 PARAMETER Experiment Name: At_2mM_SA_P Parameter: Organism Value: A. thaliana
  misc_feature: MA Experiment 20000182 PARAMETER Experiment Name: At_2mM_SA_P Parameter: Plant Line Value: WS
  misc_feature: MA Experiment 20000182 PARAMETER Experiment Name: At_2mM_SA_P Parameter: Timepoint (hr) Value: 6
  misc_feature: MA Experiment 20000182 PARAMETER Experiment Name: At_2mM_SA_P Parameter: Tissue Value: Aerial
  misc_feature: MA Experiment 20000182 PARAMETER Experiment Name: At_2mM_SA_P Parameter: Treatment Value: 2mM SA vs. No Treatment
  misc_feature: MA Experiment ID: 20000184 Result: Down-regulated in Transcription
  misc_feature: MA Experiment 20000184 PARAMETER Experiment Name: At_Shoots__P Parameter: Age (day) Value: 7
  misc_feature: MA Experiment 20000184 PARAMETER Experiment Name: At_Shoots__P Parameter: Tissue Value: Shoots vs. Whole Plant
  misc_feature: MA Experiment ID: 20000224 Result: Down-regulated in Transcription
  misc_feature: MA Experiment ID: 20000227 Result: Down-regulated in Transcription
  misc_feature: MA Experiment 20000227 PARAMETER Experiment Name: At_Root-Tips-vs-Tops_P Parameter: Tissue Value: Root Tips vs. Root Tops
  misc_feature: MA Experiment ID: 20000234 Result: Down-regulated in Transcription
  misc_feature: MA Experiment 20000234 PARAMETER Experiment Name: At_Siliques_P Parameter: Age (day) Value: 21
  misc_feature: MA Experiment 20000234 PARAMETER Experiment Name: At_Siliques_P Parameter: Organism Value: A. thaliana
  misc_feature: MA Experiment 20000234 PARAMETER Experiment Name: At_Siliques_P Parameter: Plant Line Value: WS
  misc_feature: MA Experiment 20000234 PARAMETER Experiment Name: At_Siliques_P Parameter: Tissue Value: Less Than 5mm Siliques vs. Whole Plant
  misc_feature: MA Experiment ID: 20000235 Result: Down-regulated in Transcription
  misc_feature: MA Experiment 20000235 PARAMETER Experiment Name: At_Siliques_P Parameter: Age (day) Value: 21
  misc_feature: MA Experiment 20000235 PARAMETER Experiment Name: At_Siliques_P Parameter: Organism Value: A. thaliana
  misc_feature: MA Experiment 20000235 PARAMETER Experiment Name: At_Siliques_P Parameter: Plant Line Value: WS
  misc_feature: MA Experiment 20000235 PARAMETER Experiment Name: At_Siliques_P Parameter: Tissue Value: 5-10mm Siliques vs. Whole Plant
  misc_feature: MA Experiment ID: 20000265 Result: Down-regulated in Transcription
  misc_feature: MA Experiment 20000265 PARAMETER Experiment Name: At_Open_Flower_P Parameter: Age (day) Value: 21
  misc_feature: MA Experiment 20000265 PARAMETER Experiment Name: At_Open_Flower_P Parameter: Plant Line Value: WS
  misc_feature: MA Experiment 20000265 PARAMETER Experiment Name: At_Open_Flower_P Parameter: Tissue Value: Closed Flower vs. Whole Plant
  misc_feature: MA Experiment ID: 20000438 Result: Down-regulated in Transcription
  misc_feature: MA Experiment 20000438 PARAMETER Experiment Name: At_Shoots__P Parameter: Age (day) Value: 14
  misc_feature: MA Experiment 20000438 PARAMETER Experiment Name: At_Shoots__P Parameter: Tissue Value: Shoots vs. Whole Plant
  misc_feature: MA Experiment ID: 20001248 Result: Up-regulated in Transcription
  misc_feature: MA Experiment 20001248 PARAMETER Experiment Name: At_Far-red-induction_P Parameter: Age (day) Value: 7
  misc_feature: MA Experiment 20001248 PARAMETER Experiment Name: At_Far-red-induction_P Parameter: Light Value: Far-red vs. White
  misc_feature: MA Experiment 20001248 PARAMETER Experiment Name: At_Far-red-induction_P Parameter: Organism Value: A. thaliana
  misc_feature: MA Experiment 20001248 PARAMETER Experiment Name: At_Far-red-induction_P Parameter: Plant Line Value: Columbia
  misc_feature: MA Experiment 20001248 PARAMETER Experiment Name: At_Far-red-induction_P Parameter: Timepoint (hr) Value: 4
  misc_feature: MA Experiment 20001248 PARAMETER Experiment Name: At_Far-red-induction_P Parameter: Tissue Value: Whole Plant
  misc_feature: MA Experiment ID: 20001558 Result: Down-regulated in Transcription
  misc_feature: MA Experiment 20001558 PARAMETER Experiment Name: At_Drought_Soil_Dry_P Parameter: Age (day) Value: 27
  misc_feature: MA Experiment 20001558 PARAMETER Experiment Name: At_Drought_Soil_Dry_P Parameter: Organism Value: A. thaliana
  misc_feature: MA Experiment 20001558 PARAMETER Experiment Name: At_Drought_Soil_Dry_P Parameter: Plant Line Value: WS
  misc_feature: MA Experiment 20001558 PARAMETER Experiment Name: At_Drought_Soil_Dry_P Parameter: Post Timepoint (hr) Value: 6
  misc_feature: MA Experiment 20001558 PARAMETER Experiment Name: At_Drought_Soil_Dry_P Parameter: Post-Treatment Value: Re-Water vs. No Drought
  misc_feature: MA Experiment 20001558 PARAMETER Experiment Name: At_Drought_Soil_Dry_P Parameter: Timepoint (day) Value: 13
  misc_feature: MA Experiment 20001558 PARAMETER Experiment Name: At_Drought_Soil_Dry_P Parameter: Treatment Value: Drought vs. No Drought

SEQ ID NO: 34490 - protein, 207 aa, Arabidopsis thaliana; identical to SEQ ID NO: 30900
  peptide (1)..(207): Ceres Seq. ID no. 12332916
  misc_feature (50)..(190): Pfam Name: Protein of unknown function, DUF538 Pfam Description: Protein of unknown function, DUF538
  misc_feature (41)..(200): Homolog of NCBI NO: 18420052 NR Description: unknown protein; protein id: At5g19860.1
  misc_feature (43)..(184): Homolog of NCBI NO: 15241137 NR Description: putative protein; protein id: At5g19590.1
  misc_feature (41)..(191): Homolog of NCBI NO: 28273408 NR Description: unknown protein [Oryza sativa (japonica
  misc_feature (37)..(184): Homolog of NCBI NO: 34912320 NR Description: P0451D05.23 [Oryza sativa (japonica
  misc_feature (52)..(190): Homolog of NCBI NO: 21553750 NR Description: unknown [Arabidopsis thaliana]
  misc_feature (52)..(190): Homolog of NCBI NO: 18379012 NR Description: Expressed protein
  misc_feature (50)..(195): Homolog of NCBI NO: 15235335 NR Description: putative protein; protein id: At4g02360.1
  misc_feature (41)..(206): Homolog of NCBI NO: 18379014 NR Description: Expressed protein
  misc_feature (41)..(207): Homolog of NCBI NO: 21554037 NR Description: unknown [Arabidopsis thaliana]
  misc_feature (41)..(207): Homolog of NCBI NO: 18411923 NR Description: coded for by A. thaliana cDNA R64991

SEQ ID NO: 34491 - protein, 167 aa, Arabidopsis thaliana; identical to SEQ ID NO: 30901
  peptide (1)..(167): Ceres Seq. ID no. 12332917
  misc_feature (10)..(150): Pfam Name: Protein of unknown function, DUF538 Pfam Description: Protein of unknown function, DUF538
  misc_feature (1)..(160): Homolog of NCBI NO: 18420052 NR Description: unknown protein; protein id: At5g19860.1
  misc_feature (3)..(144): Homolog of NCBI NO: 15241137 NR Description: putative protein; protein id: At5g19590.1
  misc_feature (1)..(151): Homolog of NCBI NO: 28273408 NR Description: unknown protein [Oryza sativa (japonica
  misc_feature (1)..(144): Homolog of NCBI NO: 34912320 NR Description: P0451D05.23 [Oryza sativa (japonica
  misc_feature (12)..(150): Homolog of NCBI NO: 21553750 NR Description: unknown [Arabidopsis thaliana]
  misc_feature (12)..(150): Homolog of NCBI NO: 18379012 NR Description: Expressed protein
  misc_feature (10)..(155): Homolog of NCBI NO: 15235335 NR Description: putative protein; protein id: At4g02360.1
  misc_feature (1)..(166): Homolog of NCBI NO: 18379014 NR Description: Expressed protein
  misc_feature (1)..(167): Homolog of NCBI NO: 21554037 NR Description: unknown [Arabidopsis thaliana]
  misc_feature (1)..(167): Homolog of NCBI NO: 18411923 NR Description: coded for by A. thaliana cDNA R64991

SEQ ID NO: 34492 - DNA, 856 bp, Arabidopsis thaliana; identical to SEQ ID NO: 30902
  misc_feature (1)..(856): Ceres Seq. ID no. 12421566
  misc_feature: MA Experiment ID: 108461 Result: Down-regulated in Transcription
  misc_feature: MA Experiment 108461 PARAMETER Experiment Name: At_Germinating_Seeds_cDNA_P Parameter: Age (day) Value: 1 vs. 0
  misc_feature: MA Experiment 108461 PARAMETER Experiment Name: At_Germinating_Seeds_cDNA_P Parameter: Tissue Value: Germinating Seeds
  misc_feature: MA Experiment ID: 108462 Result: Down-regulated in Transcription
  misc_feature: MA Experiment 108462 PARAMETER Experiment Name: At_Germinating_Seeds_cDNA_P Parameter: Age (day) Value: 2 vs. 0
  misc_feature: MA Experiment 108462 PARAMETER Experiment Name: At_Germinating_Seeds_cDNA_P Parameter: Tissue Value: Germinating Seeds
  misc_feature: MA Experiment ID: 108463 Result: Down-regulated in Transcription
  misc_feature: MA Experiment 108463 PARAMETER Experiment Name: At_Germinating_Seeds_cDNA_P Parameter: Age (day) Value: 3 vs. 0
  misc_feature: MA Experiment 108463 PARAMETER Experiment Name: At_Germinating_Seeds_cDNA_P Parameter: Tissue Value: Germinating Seeds
  misc_feature: MA Experiment ID: 108464 Result: Down-regulated in Transcription
  misc_feature: MA Experiment 108464 PARAMETER Experiment Name: At_Germinating_Seeds_cDNA_P Parameter: Age (day) Value: 4 vs. 0
  misc_feature: MA Experiment 108464 PARAMETER Experiment Name: At_Germinating_Seeds_cDNA_P Parameter: Tissue Value: Germinating Seeds
  misc_feature: MA Experiment ID: 108488 Result: Down-regulated in Transcription
  misc_feature: MA Experiment ID: 20000111 Result: Up-regulated in Transcription
  misc_feature: MA Experiment 20000111 PARAMETER Experiment Name: At_42deg_Heat_cDNA_P Parameter: Temperature (deg C) Value: 42 vs. 22
  misc_feature: MA Experiment 20000111 PARAMETER Experiment Name: At_42deg_Heat_cDNA_P Parameter: Timepoint (hr) Value: 6
  misc_feature: MA Experiment 20000111 PARAMETER Experiment Name: At_42deg_Heat_cDNA_P Parameter: Tissue Value: Aerial
  misc_feature: MA Experiment ID: 20000113 Result: Up-regulated in Transcription
  misc_feature: MA Experiment 20000113 PARAMETER Experiment Name: At_42deg_Heat_cDNA_P Parameter: Temperature (deg C) Value: 42 vs. 22
  misc_feature: MA Experiment 20000113 PARAMETER Experiment Name: At_42deg_Heat_cDNA_P Parameter: Timepoint (hr) Value: 8
  misc_feature: MA Experiment 20000113 PARAMETER Experiment Name: At_42deg_Heat_cDNA_P Parameter: Tissue Value: Aerial
  misc_feature: MA Experiment ID: 20000173 Result: Up-regulated in Transcription
  misc_feature: MA Experiment 20000173 PARAMETER Experiment Name: At_42deg_Heat_P Parameter: Age (day) Value: 14
  misc_feature: MA Experiment 20000173 PARAMETER Experiment Name: At_42deg_Heat_P Parameter: Organism Value: A. thaliana
  misc_feature: MA Experiment 20000173 PARAMETER Experiment Name: At_42deg_Heat_P Parameter: Plant Line Value: WS
  misc_feature: MA Experiment 20000173 PARAMETER Experiment Name: At_42deg_Heat_P Parameter: Temperature (deg C) Value: 42 vs. 22
  misc_feature: MA Experiment 20000173 PARAMETER Experiment Name: At_42deg_Heat_P Parameter: Timepoint (hr) Value: 6
  misc_feature: MA Experiment 20000173 PARAMETER Experiment Name: At_42deg_Heat_P Parameter: Tissue Value: Aerial

SEQ ID NO: 34493 - protein, 187 aa, Arabidopsis thaliana; identical to SEQ ID NO: 30903
  peptide (1)..(187): Ceres Seq. ID no. 12421567
  misc_feature (48)..(175): Pfam Name: NifU-like N terminal domain Pfam Description: NifU-like N terminal domain
  misc_feature (49)..(181): Homolog of NCBI NO: 33592862 NR Description: [Fe-S] cluster formation/repair protein
  misc_feature (47)..(172): Homolog of NCBI NO: 21313484 NR Description: RIKEN cDNA 2310020H20 [Mus musculus]
  misc_feature (47)..(172): Homolog of NCBI NO: 20381021 NR Description: RIKEN cDNA 2310020H20 gene [Mus musculus]
  misc_feature (47)..(179): Homolog of NCBI NO: 11545707 NR Description: ISCU2 [Homo sapiens]
  misc_feature (47)..(180): Homolog of NCBI NO: 16798388 NR Description: iron-sulfur cluster assembly protein IscU
  misc_feature (22)..(174): Homolog of NCBI NO: 34912076 NR Description: putative nifU-like protein
  misc_feature (21)..(187): Homolog of NCBI NO: 15232028 NR Description: unknown protein; protein id: At3g01020.1
  misc_feature (22)..(187): Homolog of NCBI NO: 15233385 NR Description: putative NifU-like metallocluster assembly factor
  misc_feature (22)..(187): Homolog of NCBI NO: 21595581 NR Description: nifU-like protein [Arabidopsis thaliana]
  misc_feature (21)..(187): Homolog of NCBI NO: 15235569 NR Description: nifU-like protein

SEQ ID NO: 34494 - protein, 167 aa, Arabidopsis thaliana; identical to SEQ ID NO: 30904
  peptide (1)..(167): Ceres Seq. ID no. 12421568
  misc_feature (28)..(155): Pfam Name: NifU-like N terminal domain Pfam Description: NifU-like N terminal domain
  misc_feature (29)..(161): Homolog of NCBI NO: 33592862 NR Description: [Fe-S] cluster formation/repair protein
  misc_feature (27)..(152): Homolog of NCBI NO: 21313484 NR Description: RIKEN cDNA 2310020H20 [Mus musculus]
  misc_feature (27)..(152): Homolog of NCBI NO: 20381021 NR Description: RIKEN cDNA 2310020H20 gene [Mus musculus]
  misc_feature (27)..(159): Homolog of NCBI NO: 11545707 NR Description: ISCU2 [Homo sapiens]
  misc_feature (27)..(160): Homolog of NCBI NO: 16798388 NR Description: iron-sulfur cluster assembly protein IscU
  misc_feature (2)..(154): Homolog of NCBI NO: 34912076 NR Description: putative nifU-like protein
  misc_feature (1)..(167): Homolog of NCBI NO: 15232028 NR Description: unknown protein; protein id: At3g01020.1
  misc_feature (2)..(167): Homolog of NCBI NO: 15233385 NR Description: putative NifU-like metallocluster assembly factor
  misc_feature (2)..(167): Homolog of NCBI NO: 21595581 NR Description: nifU-like protein [Arabidopsis thaliana]
  misc_feature (1)..(167): Homolog of NCBI NO: 15235569 NR Description: nifU-like protein

SEQ ID NO: 34495 - protein, 166 aa, Arabidopsis thaliana; identical to SEQ ID NO: 30905
  peptide (1)..(166): Ceres Seq. ID no. 12421569
  misc_feature (27)..(154): Pfam Name: NifU-like N terminal domain Pfam Description: NifU-like N terminal domain
  misc_feature (28)..(160): Homolog of NCBI NO: 33592862 NR Description: [Fe-S] cluster formation/repair protein
  misc_feature (26)..(151): Homolog of NCBI NO: 21313484 NR Description: RIKEN cDNA 2310020H20 [Mus musculus]
  misc_feature (26)..(151): Homolog of NCBI NO: 20381021 NR Description: RIKEN cDNA 2310020H20 gene [Mus musculus]
  misc_feature (26)..(158): Homolog of NCBI NO: 11545707 NR Description: ISCU2 [Homo sapiens]
  misc_feature (26)..(159): Homolog of NCBI NO: 16798388 NR Description: iron-sulfur cluster assembly protein IscU
  misc_feature (1)..(153): Homolog of NCBI NO: 34912076 NR Description: putative nifU-like protein
  misc_feature (1)..(166): Homolog of NCBI NO: 15232028 NR Description: unknown protein; protein id: At3g01020.1
  misc_feature (1)..(166): Homolog of NCBI NO: 15233385 NR Description: putative NifU-like metallocluster assembly factor
  misc_feature (1)..(166): Homolog of NCBI NO: 21595581 NR Description: nifU-like protein [Arabidopsis thaliana]
  misc_feature (1)..(166): Homolog of NCBI NO: 15235569 NR Description: nifU-like protein

SEQ ID NO: 34496 - DNA, 1210 bp, Arabidopsis thaliana; identical to SEQ ID NO: 30906
  misc_feature (1)..(1210): Ceres Seq. ID no. 12482053
  misc_feature: MA Experiment ID: 108463 Result: Down-regulated in Transcription
  misc_feature: MA Experiment 108463 PARAMETER Experiment Name: At_Germinating_Seeds_cDNA_P Parameter: Age (day) Value: 3 vs. 0
  misc_feature: MA Experiment 108463 PARAMETER Experiment Name: At_Germinating_Seeds_cDNA_P Parameter: Tissue Value: Germinating Seeds
  misc_feature: MA Experiment ID: 108464 Result: Down-regulated in Transcription
  misc_feature: MA Experiment 108464 PARAMETER Experiment Name: At_Germinating_Seeds_cDNA_P Parameter: Age (day) Value: 4 vs. 0
  misc_feature: MA Experiment 108464 PARAMETER Experiment Name: At_Germinating_Seeds_cDNA_P Parameter: Tissue Value: Germinating Seeds
  misc_feature: MA Experiment ID: 20000070 Result: Down-regulated in Transcription
  misc_feature: MA Experiment 20000070 PARAMETER Experiment Name: At_100uM_ABA_Mutants_cDNA_P Parameter: Plant Line Value: CS24
  misc_feature: MA Experiment 20000070 PARAMETER Experiment Name: At_100uM_ABA_Mutants_cDNA_P Parameter: Timepoint (hr) Value: 6
  misc_feature: MA Experiment 20000070 PARAMETER Experiment Name: At_100uM_ABA_Mutants_cDNA_P Parameter: Tissue Value: Aerial
  misc_feature: MA Experiment 20000070 PARAMETER Experiment Name: At_100uM_ABA_Mutants_cDNA_P Parameter: Treatment Value: 100uM ABA vs. No Treatment
  misc_feature: MA Experiment ID: 20000071 Result: Down-regulated in Transcription
  misc_feature: MA Experiment 20000071 PARAMETER Experiment Name: At_100uM_ABA_Mutants_cDNA_P Parameter: Plant Line Value: CS8104
  misc_feature: MA Experiment 20000071 PARAMETER Experiment Name: At_100uM_ABA_Mutants_cDNA_P Parameter: Timepoint (hr) Value: 6
  misc_feature: MA Experiment 20000071 PARAMETER Experiment Name: At_100uM_ABA_Mutants_cDNA_P Parameter: Tissue Value: Aerial
  misc_feature: MA Experiment 20000071 PARAMETER Experiment Name: At_100uM_ABA_Mutants_cDNA_P Parameter: Treatment Value: 100uM ABA vs. No Treatment
  misc_feature: MA Experiment ID: 20000144 Result: Up-regulated in Transcription
  misc_feature: MA Experiment 20000144 PARAMETER Experiment Name: At_42deg_Heat_cDNA_P Parameter: Temperature (deg C) Value: 42 vs. 22
  misc_feature: MA Experiment 20000144 PARAMETER Experiment Name: At_42deg_Heat_cDNA_P Parameter: Timepoint (hr) Value: 1
  misc_feature: MA Experiment 20000144 PARAMETER Experiment Name: At_42deg_Heat_cDNA_P Parameter: Tissue Value: Aerial

SEQ ID NO: 34497 - protein, 310 aa, Arabidopsis thaliana; identical to SEQ ID NO: 30907
  peptide (1)..(310): Ceres Seq. ID no. 12482054
  misc_feature (158)..(259): Pfam Name: 2OG-Fe(II) oxygenase superfamily Pfam Description: 2OG-Fe(II) oxygenase superfamily
  misc_feature (9)..(304): Homolog of NCBI NO: 642062 NR Description: 1-aminocyclopropane-1-carboxylate oxidase
  misc_feature (6)..(310): Homolog of NCBI NO: 15221170 NR Description: putative amino-cyclopropane-carboxylic acid
  misc_feature (9)..(302): Homolog of NCBI NO: 1944152 NR Description: ACC-oxidase [Vigna angularis]
  misc_feature (6)..(307): Homolog of NCBI NO: 587086 NR Description: ACC oxidase [Brassica oleracea]
  misc_feature (6)..(304): Homolog of NCBI NO: 7433206 NR Description: probable 1-aminocyclopropane-1-carboxylate
  misc_feature (6)..(302): Homolog of NCBI NO: 7433194 NR Description: probable 1-aminocyclopropane-1-carboxylate
  misc_feature (9)..(304): Homolog of NCBI NO: 30060226 NR Description: 1-aminocyclopropane-1-carboxylic acid oxidase
  misc_feature (9)..(304): Homolog of NCBI NO: 2129503 NR Description: ACC oxidase (clone ACO2) oxidase - muskmelon
  misc_feature (11)..(306): Homolog of NCBI NO: 25989506 NR Description: ACC oxidase [Solanum tuberosum]
  misc_feature (1)..(310): Homolog of NCBI NO: 15224803 NR Description: 1-aminocyclopropane-1-carboxylate oxidase

SEQ ID NO: 34498 - protein, 302 aa, Arabidopsis thaliana; identical to SEQ ID NO: 30908
  peptide (1)..(302): Ceres Seq. ID no. 12482055
  misc_feature (150)..(251): Pfam Name: 2OG-Fe(II) oxygenase superfamily Pfam Description: 2OG-Fe(II) oxygenase superfamily
  misc_feature (1)..(296): Homolog of NCBI NO: 642062 NR Description: 1-aminocyclopropane-1-carboxylate oxidase
  misc_feature (1)..(302): Homolog of NCBI NO: 15221170 NR Description: putative amino-cyclopropane-carboxylic acid
  misc_feature (1)..(294): Homolog of NCBI NO: 1944152 NR Description: ACC-oxidase [Vigna angularis]
  misc_feature (1)..(299): Homolog of NCBI NO: 587086 NR Description: ACC oxidase [Brassica oleracea]
  misc_feature (1)..(296): Homolog of NCBI NO: 7433206 NR Description: probable 1-aminocyclopropane-1-carboxylate
  misc_feature (1)..(294): Homolog of NCBI NO: 7433194 NR Description: probable 1-aminocyclopropane-1-carboxylate
  misc_feature (1)..(296): Homolog of NCBI NO: 30060226 NR Description: 1-aminocyclopropane-1-carboxylic acid oxidase
  misc_feature (1)..(296): Homolog of NCBI NO: 2129503 NR Description: ACC oxidase (clone ACO2) oxidase - muskmelon
  misc_feature (3)..(298): Homolog of NCBI NO: 25989506 NR Description: ACC oxidase [Solanum tuberosum]
  misc_feature (1)..(302): Homolog of NCBI NO: 15224803 NR Description: 1-aminocyclopropane-1-carboxylate oxidase

SEQ ID NO: 34499 - protein, 283 aa, Arabidopsis thaliana; identical to SEQ ID NO: 30909
  peptide (1)..(283): Ceres Seq. ID no. 12482056
  misc_feature (131)..(232): Pfam Name: 2OG-Fe(II) oxygenase superfamily Pfam Description: 2OG-Fe(II) oxygenase superfamily
  misc_feature (1)..(277): Homolog of NCBI NO: 642062 NR Description: 1-aminocyclopropane-1-carboxylate oxidase
  misc_feature (1)..(283): Homolog of NCBI NO: 15221170 NR Description: putative amino-cyclopropane-carboxylic acid
  misc_feature (1)..(275): Homolog of NCBI NO: 1944152 NR Description: ACC-oxidase [Vigna angularis]
  misc_feature (1)..(280): Homolog of NCBI NO: 587086 NR Description: ACC oxidase [Brassica oleracea]
  misc_feature (1)..(277): Homolog of NCBI NO: 7433206 NR Description: probable 1-aminocyclopropane-1-carboxylate
  misc_feature (1)..(275): Homolog of NCBI NO: 7433194 NR Description: probable 1-aminocyclopropane-1-carboxylate
  misc_feature (1)..(277): Homolog of NCBI NO: 30060226 NR Description: 1-aminocyclopropane-1-carboxylic acid oxidase
  misc_feature (1)..(277): Homolog of NCBI NO: 2129503 NR Description: ACC oxidase (clone ACO2) oxidase - muskmelon
  misc_feature (1)..(279): Homolog of NCBI NO: 25989506 NR Description: ACC oxidase [Solanum tuberosum]
  misc_feature (1)..(283): Homolog of NCBI NO: 15224803 NR Description: 1-aminocyclopropane-1-carboxylate oxidase

SEQ ID NO: 34500 - DNA, 1333 bp, Arabidopsis thaliana; identical to SEQ ID NO: 30910
  misc_feature (1)..(1333): Ceres Seq. ID no. 12370509
  misc_feature: MA Experiment ID: 108434 Result: Down-regulated in Transcription
  misc_feature: MA Experiment 108434 PARAMETER Experiment Name: At_Root_Tips_cDNA_P Parameter: Tissue Value: Root Tips
  misc_feature: MA Experiment ID: 108435 Result: Down-regulated in Transcription
  misc_feature: MA Experiment 108435 PARAMETER Experiment Name: At_stm_Mutants_cDNA_P Parameter: Plant Line Value: wt Landsburg vs stm
  misc_feature: MA Experiment 108435 PARAMETER Experiment Name: At_stm_Mutants_cDNA_P Parameter: Tissue Value: Shoot Apical Meristem Region
  misc_feature: MA Experiment ID: 108461 Result: Up-regulated in Transcription
  misc_feature: MA Experiment 108461 PARAMETER Experiment Name: At_Germinating_Seeds_cDNA_P Parameter: Age (day) Value: 1 vs. 0
  misc_feature: MA Experiment 108461 PARAMETER Experiment Name: At_Germinating_Seeds_cDNA_P Parameter: Tissue Value: Germinating Seeds
  misc_feature: MA Experiment ID: 108462 Result: Up-regulated in Transcription
  misc_feature: MA Experiment 108462 PARAMETER Experiment Name: At_Germinating_Seeds_cDNA_P Parameter: Age (day) Value: 2 vs. 0
  misc_feature: MA Experiment 108462 PARAMETER Experiment Name: At_Germinating_Seeds_cDNA_P Parameter: Tissue Value: Germinating Seeds
  misc_feature: MA Experiment ID: 108463 Result: Up-regulated in Transcription
  misc_feature: MA Experiment 108463 PARAMETER Experiment Name: At_Germinating_Seeds_cDNA_P Parameter: Age (day) Value: 3 vs. 0
  misc_feature: MA Experiment 108463 PARAMETER Experiment Name: At_Germinating_Seeds_cDNA_P Parameter: Tissue Value: Germinating Seeds
  misc_feature: MA Experiment ID: 108464 Result: Up-regulated in Transcription
  misc_feature: MA Experiment 108464 PARAMETER Experiment Name: At_Germinating_Seeds_cDNA_P Parameter: Age (day) Value: 4 vs. 0
  misc_feature: MA Experiment 108464 PARAMETER Experiment Name: At_Germinating_Seeds_cDNA_P Parameter: Tissue Value: Germinating Seeds
  misc_feature: MA Experiment ID: 108488 Result: Down-regulated in Transcription
  misc_feature: MA Experiment ID: 108501 Result: Down-regulated in Transcription
  misc_feature: MA Experiment 108501 PARAMETER Experiment Name: At_ap2_floral_buds_cDNA_P Parameter: Plant Line Value: ap2 (Ler.)
  misc_feature: MA Experiment 108501 PARAMETER Experiment Name: At_ap2_floral_buds_cDNA_P Parameter: Tissue Value: Closed Flower
  misc_feature: MA Experiment ID: 108572 Result: Down-regulated in Transcription
  misc_feature: MA Experiment 108572 PARAMETER Experiment Name: At_Drought_cDNA_P Parameter: Timepoint (hr) Value: 1
  misc_feature: MA Experiment 108572 PARAMETER Experiment Name: At_Drought_cDNA_P Parameter: Tissue Value: Aerial
  misc_feature: MA Experiment 108572 PARAMETER Experiment Name: At_Drought_cDNA_P Parameter: Treatment Value: Drought vs. No Drought
  misc_feature: MA Experiment ID: 108594 Result: Up-regulated in Transcription
  misc_feature: MA Experiment 108594 PARAMETER Experiment Name: At_Ler-rhl_Root_cDNA_P Parameter: Plant Line Value: null
  misc_feature: MA Experiment ID: 108595 Result: Down-regulated in Transcription
  misc_feature: MA Experiment 108595 PARAMETER Experiment Name: At_Ler-pi_Ovule_cDNA_P Parameter: Plant Line Value: null
  misc_feature: MA Experiment ID: 108607 Result: Down-regulated in Transcription
  misc_feature: MA Experiment 108607 PARAMETER Experiment Name: At_100uM_ABA_cDNA_P Parameter: Timepoint (hr) Value: 4
  misc_feature: MA Experiment 108607 PARAMETER Experiment Name: At_100uM_ABA_cDNA_P Parameter: Tissue Value: Aerial
  misc_feature: MA Experiment 108607 PARAMETER Experiment Name: At_100uM_ABA_cDNA_P Parameter: Treatment Value: 100uM ABA vs. No Treatment
  misc_feature: MA Experiment ID: 108608 Result: Down-regulated in Transcription
  misc_feature: MA Experiment 108608 PARAMETER Experiment Name: At_100uM_ABA_cDNA_P Parameter: Timepoint (hr) Value: 1
  misc_feature: MA Experiment 108608 PARAMETER Experiment Name: At_100uM_ABA_cDNA_P Parameter: Tissue Value: Aerial
  misc_feature: MA Experiment 108608 PARAMETER Experiment Name: At_100uM_ABA_cDNA_P Parameter: Treatment Value: 100uM ABA vs. No Treatment
  misc_feature: MA Experiment ID: 108609 Result: Down-regulated in Transcription
  misc_feature: MA Experiment 108609 PARAMETER Experiment Name: At_100uM_ABA_cDNA_P Parameter: Timepoint (hr) Value: 24
  misc_feature: MA Experiment 108609 PARAMETER Experiment Name: At_100uM_ABA_cDNA_P Parameter: Tissue Value: Aerial
  misc_feature: MA Experiment 108609 PARAMETER Experiment Name: At_100uM_ABA_cDNA_P Parameter: Treatment Value: 100uM ABA vs. No Treatment
  misc_feature: MA Experiment ID: 20000071 Result: Down-regulated in Transcription
  misc_feature: MA Experiment 20000071 PARAMETER Experiment Name: At_100uM_ABA_Mutants_cDNA_P Parameter: Plant Line Value: CS8104
  misc_feature: MA Experiment 20000071 PARAMETER Experiment Name: At_100uM_ABA_Mutants_cDNA_P Parameter: Timepoint (hr) Value: 6
  misc_feature: MA Experiment 20000071 PARAMETER Experiment Name: At_100uM_ABA_Mutants_cDNA_P Parameter: Tissue Value: Aerial
  misc_feature: MA Experiment 20000071 PARAMETER Experiment Name: At_100uM_ABA_Mutants_cDNA_P Parameter: Treatment Value: 100uM ABA vs. No Treatment
  misc_feature: MA Experiment ID: 20000089 Result: Down-regulated in Transcription
  misc_feature: MA Experiment ID: 20000090 Result: Down-regulated in Transcription
  misc_feature: MA Experiment ID: 20000117 Result: Down-regulated in Transcription
  misc_feature: MA Experiment 20000117 PARAMETER Experiment Name: At_100uM_ABA_Mutants_cDNA_P Parameter: Plant Line Value: Columbia
  misc_feature: MA Experiment 20000117 PARAMETER Experiment Name: At_100uM_ABA_Mutants_cDNA_P Parameter: Timepoint (hr) Value: 6
  misc_feature: MA Experiment 20000117 PARAMETER Experiment Name: At_100uM_ABA_Mutants_cDNA_P Parameter: Tissue Value: Aerial
  misc_feature: MA Experiment 20000117 PARAMETER Experiment Name: At_100uM_ABA_Mutants_cDNA_P Parameter: Treatment Value: 100uM ABA vs. No Treatment
  misc_feature: MA Experiment ID: 20000166 Result: Down-regulated in Transcription
  misc_feature: MA Experiment 20000166 PARAMETER Experiment Name: At_100uM_ABA_P Parameter: Age (day) Value: 14
  misc_feature: MA Experiment 20000166 PARAMETER Experiment Name: At_100uM_ABA_P Parameter: Organism Value: A. thaliana
  misc_feature: MA Experiment 20000166 PARAMETER Experiment Name: At_100uM_ABA_P Parameter: Plant Line Value: WS
  misc_feature: MA Experiment 20000166 PARAMETER Experiment Name: At_100uM_ABA_P Parameter: Timepoint (hr) Value: 1
  misc_feature: MA Experiment 20000166 PARAMETER Experiment Name: At_100uM_ABA_P Parameter: Tissue Value: Aerial
  misc_feature: MA Experiment 20000166 PARAMETER Experiment Name: At_100uM_ABA_P Parameter: Treatment Value: 100uM ABA vs. No Treatment
  misc_feature: MA Experiment ID: 20000180 Result: Up-regulated in Transcription
  misc_feature: MA Experiment 20000180 PARAMETER Experiment Name: At_Germinating_Seeds_P Parameter: Age (hr) Value: 24 vs. 0
  misc_feature: MA Experiment 20000180 PARAMETER Experiment Name: At_Germinating_Seeds_P Parameter: Tissue Value: Germinating Seeds
  misc_feature: MA Experiment ID: 20000184 Result: Up-regulated in Transcription
  misc_feature: MA Experiment 20000184 PARAMETER Experiment Name: At_Shoots__P Parameter: Age (day) Value: 7
  misc_feature: MA Experiment 20000184 PARAMETER Experiment Name: At_Shoots__P Parameter: Tissue Value: Shoots vs. Whole Plant
  misc_feature: MA Experiment ID: 20000214 Result: Down-regulated in Transcription
  misc_feature: MA Experiment 20000214 PARAMETER Experiment Name: At_4deg_Cold_P Parameter: Timepoint (hr) Value: 6
  misc_feature: MA Experiment ID: 20000234 Result: Down-regulated in Transcription
  misc_feature: MA Experiment 20000234 PARAMETER Experiment Name: At_Siliques_P Parameter: Age (day) Value: 21
  misc_feature: MA Experiment 20000234 PARAMETER Experiment Name: At_Siliques_P Parameter: Organism Value: A. thaliana
  misc_feature: MA Experiment 20000234 PARAMETER Experiment Name: At_Siliques_P Parameter: Plant Line Value: WS
  misc_feature: MA Experiment 20000234 PARAMETER Experiment Name: At_Siliques_P Parameter: Tissue Value: Less Than 5mm Siliques vs. Whole Plant
  misc_feature: MA Experiment ID: 20000235 Result: Down-regulated in Transcription
  misc_feature: MA Experiment 20000235 PARAMETER Experiment Name: At_Siliques_P Parameter: Age (day) Value: 21
  misc_feature: MA Experiment 20000235 PARAMETER Experiment Name: At_Siliques_P Parameter: Organism Value: A. thaliana
  misc_feature: MA Experiment 20000235 PARAMETER Experiment Name: At_Siliques_P Parameter: Plant Line Value: WS
  misc_feature: MA Experiment 20000235 PARAMETER Experiment Name: At_Siliques_P Parameter: Tissue Value: 5-10mm Siliques vs. Whole Plant
  misc_feature: MA Experiment ID: 20000264 Result: Down-regulated in Transcription
  misc_feature: MA Experiment 20000264 PARAMETER Experiment Name: At_Open_Flower_P Parameter: Age (day) Value: 21
  misc_feature: MA Experiment 20000264 PARAMETER Experiment Name: At_Open_Flower_P Parameter: Plant Line Value: WS
  misc_feature: MA Experiment 20000264 PARAMETER Experiment Name: At_Open_Flower_P Parameter: Tissue Value: Open Flower vs. Whole Plant
  misc_feature: MA Experiment ID: 20000265 Result: Down-regulated in Transcription
  misc_feature: MA Experiment 20000265 PARAMETER Experiment Name: At_Open_Flower_P Parameter: Age (day) Value: 21
  misc_feature: MA Experiment 20000265 PARAMETER Experiment Name: At_Open_Flower_P Parameter: Plant Line Value: WS
  misc_feature: MA Experiment 20000265 PARAMETER Experiment Name: At_Open_Flower_P Parameter: Tissue Value: Closed Flower vs. Whole Plant
  misc_feature: MA Experiment ID: 20000267 Result: Down-regulated in Transcription
  misc_feature: MA Experiment 20000267 PARAMETER Experiment Name: At_Drought_P Parameter: Age (day) Value: 7
  misc_feature: MA Experiment 20000267 PARAMETER Experiment Name: At_Drought_P Parameter: Organism Value: A. thaliana
  misc_feature: MA Experiment 20000267 PARAMETER Experiment Name: At_Drought_P Parameter: Plant Line Value: WS
  misc_feature: MA Experiment 20000267 PARAMETER Experiment Name: At_Drought_P Parameter: Timepoint (hr) Value: 6
  misc_feature: MA Experiment 20000267 PARAMETER Experiment Name: At_Drought_P Parameter: Tissue Value: Whole Plant
  misc_feature: MA Experiment 20000267 PARAMETER Experiment Name: At_Drought_P Parameter: Treatment Value: Drought vs. No Drought
  misc_feature: MA Experiment ID: 20000268 Result: Down-regulated in Transcription
  misc_feature: MA Experiment 20000268 PARAMETER Experiment Name: At_100mM_NaCl__P Parameter: Age (day) Value: 14
  misc_feature: MA Experiment 20000268 PARAMETER Experiment Name: At_100mM_NaCl__P Parameter: Organism Value: A. thaliana
  misc_feature: MA Experiment 20000268 PARAMETER Experiment Name: At_100mM_NaCl__P Parameter: Plant Line Value: WS
  misc_feature: MA Experiment 20000268 PARAMETER Experiment Name: At_100mM_NaCl__P Parameter: Timepoint (hr) Value: 6
  misc_feature: MA Experiment 20000268 PARAMETER Experiment Name: At_100mM_NaCl__P Parameter: Tissue Value: Whole Plant
  misc_feature: MA Experiment 20000268 PARAMETER Experiment Name: At_100mM_NaCl__P Parameter: Treatment Value: 100mM NaCl vs. No Treatment
  misc_feature: MA Experiment ID: 20000286 Result: Down-regulated in Transcription
  misc_feature: MA Experiment 20000286 PARAMETER Experiment Name: At_Open_Flower_P Parameter: Age (day) Value: 21
  misc_feature: MA Experiment 20000286 PARAMETER Experiment Name: At_Open_Flower_P Parameter: Plant Line Value: WS
  misc_feature: MA Experiment 20000286 PARAMETER Experiment Name: At_Open_Flower_P Parameter: Tissue Value: Half Open vs. Whole Plant
  misc_feature: MA Experiment ID: 20000308 Result: Down-regulated in Transcription
  misc_feature: MA Experiment 20000308 PARAMETER Experiment Name: At_100mM_NaCl__P Parameter: Age (day) Value: 17
  misc_feature: MA Experiment 20000308 PARAMETER Experiment Name: At_100mM_NaCl__P Parameter: Organism Value: A. thaliana
  misc_feature: MA Experiment 20000308 PARAMETER Experiment Name: At_100mM_NaCl__P Parameter: Plant Line Value: WS
  misc_feature: MA Experiment 20000308 PARAMETER Experiment Name: At_100mM_NaCl__P Parameter: Timepoint (hr) Value: 72
  misc_feature: MA Experiment 20000308 PARAMETER Experiment Name: At_100mM_NaCl__P Parameter: Tissue Value: Whole Plant
  misc_feature: MA Experiment 20000308 PARAMETER Experiment Name: At_100mM_NaCl__P Parameter: Treatment Value: 100mM NaCl vs. No Treatment
  misc_feature: MA Experiment ID: 20000436 Result: Down-regulated in Transcription
  misc_feature: MA Experiment 20000436 PARAMETER Experiment Name: At_Drought_P Parameter: Age (day) Value: 7
  misc_feature: MA Experiment 20000436 PARAMETER Experiment Name: At_Drought_P Parameter: Organism Value: A. thaliana
  misc_feature: MA Experiment 20000436 PARAMETER Experiment Name: At_Drought_P Parameter: Plant Line Value: WS
  misc_feature: MA Experiment 20000436 PARAMETER Experiment Name: At_Drought_P Parameter: Timepoint (hr) Value: 12
  misc_feature: MA Experiment 20000436 PARAMETER Experiment Name: At_Drought_P Parameter: Tissue Value: Whole Plant
  misc_feature: MA Experiment 20000436 PARAMETER Experiment Name: At_Drought_P Parameter: Treatment Value: Drought vs. No Drought
  misc_feature: MA Experiment ID: 20000437 Result: Down-regulated in Transcription
  misc_feature: MA Experiment 20000437 PARAMETER Experiment Name: At_Drought_P Parameter: Age (day) Value: 8
  misc_feature: MA Experiment 20000437 PARAMETER Experiment Name: At_Drought_P Parameter: Organism Value: A. thaliana
  misc_feature: MA Experiment 20000437 PARAMETER Experiment Name: At_Drought_P Parameter: Plant Line Value: WS
  misc_feature: MA Experiment 20000437 PARAMETER Experiment Name: At_Drought_P Parameter: Timepoint (hr) Value: 24
  misc_feature: MA Experiment 20000437 PARAMETER Experiment Name: At_Drought_P Parameter: Tissue Value: Whole Plant
  misc_feature: MA Experiment 20000437 PARAMETER Experiment Name: At_Drought_P Parameter: Treatment Value: Drought vs. No Drought
  misc_feature: MA Experiment ID: 20000438 Result: Up-regulated in Transcription
  misc_feature: MA Experiment 20000438 PARAMETER Experiment Name: At_Shoots__P Parameter: Age (day) Value: 14
  misc_feature: MA Experiment 20000438 PARAMETER Experiment Name: At_Shoots__P Parameter: Tissue Value: Shoots vs. Whole Plant
  misc_feature: MA Experiment ID: 20000441 Result: Up-regulated in Transcription
  misc_feature: MA Experiment 20000441 PARAMETER Experiment Name: At_1uM_BR-BRZ__P Parameter: Tissue Value: Shoot Apices
  misc_feature: MA Experiment 20000441 PARAMETER Experiment Name: At_1uM_BR-BRZ__P Parameter: Treatment Value: 1uM BR vs. No Treatment
  misc_feature: MA Experiment ID: 20000443 Result: Up-regulated in Transcription
  misc_feature: MA Experiment 20000443 PARAMETER Experiment Name: At_1uM_BR-BRZ__P Parameter: Tissue Value: Shoot Apices
  misc_feature: MA Experiment 20000443 PARAMETER Experiment Name: At_1uM_BR-BRZ__P Parameter: Treatment Value: 1uM BRZ vs. No Treatment
  misc_feature: MA Experiment ID: 20000453 Result: Down-regulated in Transcription
  misc_feature: MA Experiment 20000453 PARAMETER Experiment Name: At_100uM_ABA_P Parameter: Age (day) Value: 15
  misc_feature: MA Experiment 20000453 PARAMETER Experiment Name: At_100uM_ABA_P Parameter: Organism Value: A. thaliana
  misc_feature: MA Experiment 20000453 PARAMETER Experiment Name: At_100uM_ABA_P Parameter: Plant Line Value: WS
  misc_feature: MA Experiment 20000453 PARAMETER Experiment Name: At_100uM_ABA_P Parameter: Timepoint (hr) Value: 24
  misc_feature: MA Experiment 20000453 PARAMETER Experiment Name: At_100uM_ABA_P Parameter: Tissue Value: Aerial
  misc_feature: MA Experiment 20000453 PARAMETER Experiment Name: At_100uM_ABA_P Parameter: Treatment Value: 100uM ABA vs. No Treatment
  misc_feature: MA Experiment ID: 20000455 Result: Down-regulated in Transcription
  misc_feature: MA Experiment 20000455 PARAMETER Experiment Name: At_100uM_ABA_P Parameter: Age (day) Value: 16
  misc_feature: MA Experiment 20000455 PARAMETER Experiment Name: At_100uM_ABA_P Parameter: Organism Value: A. thaliana
  misc_feature: MA Experiment 20000455 PARAMETER Experiment Name: At_100uM_ABA_P Parameter: Plant Line Value: WS
  misc_feature: MA Experiment 20000455 PARAMETER Experiment Name: At_100uM_ABA_P Parameter: Timepoint (hr) Value: 48
  misc_feature: MA Experiment 20000455 PARAMETER Experiment Name: At_100uM_ABA_P Parameter: Tissue Value: Aerial
  misc_feature: MA Experiment 20000455 PARAMETER Experiment Name: At_100uM_ABA_P Parameter: Treatment Value: 100uM ABA vs. No Treatment
  misc_feature: MA Experiment ID: 20000573 Result: Down-regulated in Transcription
  misc_feature: MA Experiment 20000573 PARAMETER Experiment Name: At_100uM_ABA_Mutants__P Parameter: Organism Value: A. thaliana
  misc_feature: MA Experiment 20000573 PARAMETER Experiment Name: At_100uM_ABA_Mutants__P Parameter: Plant Line Value: CS22 vs. Ler wt
  misc_feature: MA Experiment 20000573 PARAMETER Experiment Name: At_100uM_ABA_Mutants__P Parameter: Timepoint (hr) Value: N/A
  misc_feature: MA Experiment 20000573 PARAMETER Experiment Name: At_100uM_ABA_Mutants__P Parameter: Tissue Value: Whole Plant
  misc_feature: MA Experiment 20000573 PARAMETER Experiment Name: At_100uM_ABA_Mutants__P Parameter: Treatment Value: None
  misc_feature: MA Experiment ID: 20000574 Result: Down-regulated in Transcription
  misc_feature: MA Experiment 20000574 PARAMETER Experiment Name: At_100uM_ABA_Mutants__P Parameter: Organism Value: A. thaliana
  misc_feature: MA Experiment 20000574 PARAMETER Experiment Name: At_100uM_ABA_Mutants__P Parameter: Plant Line Value: CS23 vs. Ler wt
  misc_feature: MA Experiment 20000574 PARAMETER Experiment Name: At_100uM_ABA_Mutants__P Parameter: Timepoint (hr) Value: N/A
  misc_feature: MA Experiment 20000574 PARAMETER Experiment Name: At_100uM_ABA_Mutants__P Parameter: Tissue Value: Whole Plant
  misc_feature: MA Experiment 20000574 PARAMETER Experiment Name: At_100uM_ABA_Mutants__P Parameter: Treatment Value: None
  misc_feature: MA Experiment ID: 20000794 Result: Down-regulated in Transcription
  misc_feature: MA Experiment 20000794 PARAMETER Experiment Name: At_Petals_P Parameter: Age (day) Value: 23-25 days
  misc_feature: MA Experiment 20000794 PARAMETER Experiment Name: At_Petals_P Parameter: Plant Line Value: WS
  misc_feature: MA Experiment 20000794 PARAMETER Experiment Name: At_Petals_P Parameter: Tissue Value: Petals vs. Whole plant
  misc_feature: MA Experiment ID: 20001247 Result: Up-regulated in Transcription
  misc_feature: MA Experiment 20001247 PARAMETER Experiment Name: At_Far-red-induction_P Parameter: Age (day) Value: 7
  misc_feature: MA Experiment 20001247 PARAMETER Experiment Name: At_Far-red-induction_P Parameter: Light Value: Far-red vs. White
  misc_feature: MA Experiment 20001247 PARAMETER Experiment Name: At_Far-red-induction_P Parameter: Organism Value: A. thaliana
  misc_feature: MA Experiment 20001247 PARAMETER Experiment Name: At_Far-red-induction_P Parameter: Plant Line Value: Columbia
  misc_feature: MA Experiment 20001247 PARAMETER Experiment Name: At_Far-red-induction_P Parameter: Timepoint (hr) Value: 1
  misc_feature: MA Experiment 20001247 PARAMETER Experiment Name: At_Far-red-induction_P Parameter: Tissue Value: Whole Plant
  misc_feature: MA Experiment ID: 20001248 Result: Up-regulated in Transcription
  misc_feature: MA Experiment 20001248 PARAMETER Experiment Name: At_Far-red-induction_P Parameter: Age (day) Value: 7
  misc_feature: MA Experiment 20001248 PARAMETER Experiment Name: At_Far-red-induction_P Parameter: Light Value: Far-red vs. White
  misc_feature: MA Experiment 20001248 PARAMETER Experiment Name: At_Far-red-induction_P Parameter: Organism Value: A. thaliana
  misc_feature: MA Experiment 20001248 PARAMETER Experiment Name: At_Far-red-induction_P Parameter: Plant Line Value: Columbia
  misc_feature: MA Experiment 20001248 PARAMETER Experiment Name: At_Far-red-induction_P Parameter: Timepoint (hr) Value: 4
  misc_feature: MA Experiment 20001248 PARAMETER Experiment Name: At_Far-red-induction_P Parameter: Tissue Value: Whole Plant
  misc_feature: MA Experiment ID: 20001450 Result: Up-regulated in Transcription
  misc_feature: MA Experiment 20001450 PARAMETER Experiment Name: At_Far-red-induction_P Parameter: Age (day) Value: 7
  misc_feature: MA Experiment 20001450 PARAMETER Experiment Name: At_Far-red-induction_P Parameter: Light Value: Far-red vs. White
  misc_feature: MA Experiment 20001450 PARAMETER Experiment Name: At_Far-red-induction_P Parameter: Organism Value: A. thaliana
  misc_feature: MA Experiment 20001450 PARAMETER Experiment Name: At_Far-red-induction_P Parameter: Plant Line Value: Columbia
  misc_feature: MA Experiment 20001450 PARAMETER Experiment Name: At_Far-red-induction_P Parameter: Timepoint (hr) Value: 8
  misc_feature: MA Experiment 20001450 PARAMETER Experiment Name: At_Far-red-induction_P Parameter: Tissue Value: Whole Plant
  misc_feature: MA Experiment ID: 20001451 Result: Up-regulated in Transcription
  misc_feature: MA Experiment 20001451 PARAMETER Experiment Name: At_Far-red-induction_P Parameter: Age (day) Value: 7
  misc_feature: MA Experiment 20001451 PARAMETER Experiment Name: At_Far-red-induction_P Parameter: Light Value: Far-red vs. White
  misc_feature: MA Experiment 20001451 PARAMETER Experiment Name: At_Far-red-induction_P Parameter: Organism Value: A. thaliana
  misc_feature: MA Experiment 20001451 PARAMETER Experiment Name: At_Far-red-induction_P Parameter: Plant Line Value: Columbia
  misc_feature: MA Experiment 20001451 PARAMETER Experiment Name: At_Far-red-induction_P Parameter: Timepoint (hr) Value: 24
  misc_feature: MA Experiment 20001451 PARAMETER Experiment Name: At_Far-red-induction_P Parameter: Tissue Value: Whole Plant
  misc_feature: MA Experiment ID: 20001504 Result: Down-regulated in Transcription
  misc_feature: MA Experiment 20001504 PARAMETER Experiment Name: At_Far-red-enriched_P Parameter: Age (day) Value: 10
  misc_feature: MA Experiment 20001504 PARAMETER Experiment Name: At_Far-red-enriched_P Parameter: Light Value: Far-red enriched vs. White
  misc_feature: MA Experiment 20001504 PARAMETER Experiment Name: At_Far-red-enriched_P Parameter: Organism Value: A. thaliana
  misc_feature: MA Experiment 20001504 PARAMETER Experiment Name: At_Far-red-enriched_P Parameter: Plant Line Value: Columbia
  misc_feature: MA Experiment 20001504 PARAMETER Experiment Name: At_Far-red-enriched_P Parameter: Timepoint (day) Value: 6
  misc_feature: MA Experiment 20001504 PARAMETER Experiment Name: At_Far-red-enriched_P Parameter: Tissue Value: Whole Plant
  misc_feature: MA Experiment ID: 20001554 Result: Down-regulated in Transcription
  misc_feature: MA Experiment 20001554 PARAMETER Experiment Name: At_Drought_Soil_Dry_P Parameter: Age (day) Value: 21
  misc_feature: MA Experiment 20001554 PARAMETER Experiment Name: At_Drought_Soil_Dry_P Parameter: Organism Value: A. thaliana
  misc_feature: MA Experiment 20001554 PARAMETER Experiment Name: At_Drought_Soil_Dry_P Parameter: Plant Line Value: WS
  misc_feature: MA Experiment 20001554 PARAMETER Experiment Name: At_Drought_Soil_Dry_P Parameter: Post Timepoint (hr) Value: None
  misc_feature: MA Experiment 20001554 PARAMETER Experiment Name: At_Drought_Soil_Dry_P Parameter: Post-Treatment Value: None
  misc_feature: MA Experiment 20001554 PARAMETER Experiment Name: At_Drought_Soil_Dry_P Parameter: Timepoint (day) Value: 7
  misc_feature: MA Experiment 20001554 PARAMETER Experiment Name: At_Drought_Soil_Dry_P Parameter: Treatment Value: Drought vs. No Drought
  misc_feature: MA Experiment ID: 20001556 Result: Down-regulated in Transcription
  misc_feature: MA Experiment 20001556 PARAMETER Experiment Name: At_Drought_Soil_Dry_P Parameter: Age (day) Value: 26
  misc_feature: MA Experiment 20001556 PARAMETER Experiment Name: At_Drought_Soil_Dry_P Parameter: Organism Value: A. thaliana
  misc_feature: MA Experiment 20001556 PARAMETER Experiment Name: At_Drought_Soil_Dry_P Parameter: Plant Line Value: WS
  misc_feature: MA Experiment 20001556 PARAMETER Experiment Name: At_Drought_Soil_Dry_P Parameter: Post Timepoint (hr) Value: None
  misc_feature: MA Experiment 20001556 PARAMETER Experiment Name: At_Drought_Soil_Dry_P Parameter: Post-Treatment Value: None
  misc_feature: MA Experiment 20001556 PARAMETER Experiment Name: At_Drought_Soil_Dry_P Parameter: Timepoint (day) Value: 12
  misc_feature: MA Experiment 20001556 PARAMETER Experiment Name: At_Drought_Soil_Dry_P Parameter: Treatment Value: Drought vs. No Drought
  misc_feature: MA Experiment ID: 20001560 Result: Down-regulated in Transcription
  misc_feature: MA Experiment 20001560 PARAMETER Experiment Name: At_Drought_Soil_Dry_P Parameter: Age (day) Value: 28
  misc_feature: MA Experiment 20001560 PARAMETER Experiment Name: At_Drought_Soil_Dry_P Parameter: Organism Value: A. thaliana
  misc_feature: MA Experiment 20001560 PARAMETER Experiment Name: At_Drought_Soil_Dry_P Parameter: Plant Line Value: WS
  misc_feature: MA Experiment 20001560 PARAMETER Experiment Name: At_Drought_Soil_Dry_P Parameter: Post Timepoint (hr) Value: None
  misc_feature: MA Experiment 20001560 PARAMETER Experiment Name: At_Drought_Soil_Dry_P Parameter: Post-Treatment Value: None
  misc_feature: MA Experiment 20001560 PARAMETER Experiment Name: At_Drought_Soil_Dry_P Parameter: Timepoint (day) Value: 14
  misc_feature: MA Experiment 20001560 PARAMETER Experiment Name: At_Drought_Soil_Dry_P Parameter: Treatment Value: Drought vs. No Drought
  misc_feature: MA Experiment ID: 20001760 Result: Down-regulated in Transcription
  misc_feature: MA Experiment 20001760 PARAMETER Experiment Name: At_50mM_NH4NO3_L-to-H_P Parameter: Timepoint (hr) Value: 2
  misc_feature: MA Experiment 20001760 PARAMETER Experiment Name: At_50mM_NH4NO3_L-to-H_P Parameter: Tissue Value: Siliques
  misc_feature: MA Experiment 20001760 PARAMETER Experiment Name: At_50mM_NH4NO3_L-to-H_P Parameter: Treatment Value: 50mM NH4NO3 vs 100mM Mannitol
  misc_feature: MA Experiment ID: 20001774 Result: Down-regulated in Transcription
  misc_feature: MA Experiment 20001774 PARAMETER Experiment Name: At_Far-red-enriched-adult_P Parameter: Age (day) Value: 31
  misc_feature: MA Experiment 20001774 PARAMETER Experiment Name: At_Far-red-enriched-adult_P Parameter: Light Value: Far-red enriched vs. White
  misc_feature: MA Experiment 20001774 PARAMETER Experiment Name: At_Far-red-enriched-adult_P Parameter: Organism Value: A. thaliana
  misc_feature: MA Experiment 20001774 PARAMETER Experiment Name: At_Far-red-enriched-adult_P Parameter: Plant Line Value: Columbia
  misc_feature: MA Experiment 20001774 PARAMETER Experiment Name: At_Far-red-enriched-adult_P Parameter: Timepoint (hr) Value: 72
  misc_feature: MA Experiment 20001774 PARAMETER Experiment Name: At_Far-red-enriched-adult_P Parameter: Tissue Value: Aerial
  misc_feature: MA Experiment ID: 20001904 Result: Down-regulated in Transcription
  misc_feature: MA Experiment 20001904 PARAMETER Experiment Name: At_Drought_Reproduction_P Parameter: Age (day) Value: 37
  misc_feature: MA Experiment 20001904 PARAMETER Experiment Name: At_Drought_Reproduction_P Parameter: Organism Value: A. thaliana
  misc_feature: MA Experiment 20001904 PARAMETER Experiment Name: At_Drought_Reproduction_P Parameter: Plant Line Value: WS
  misc_feature: MA Experiment 20001904 PARAMETER Experiment Name: At_Drought_Reproduction_P Parameter: Timepoint (day) Value: 7
  misc_feature: MA Experiment 20001904 PARAMETER Experiment Name: At_Drought_Reproduction_P Parameter: Tissue Value: Rosettes
  misc_feature: MA Experiment 20001904 PARAMETER Experiment Name: At_Drought_Reproduction_P Parameter: Treatment Value: Drought vs. No Drought
  misc_feature: MA Experiment ID: 20001905 Result: Down-regulated in Transcription
  misc_feature: MA Experiment 20001905 PARAMETER Experiment Name: At_Drought_Reproduction_P Parameter: Age (day) Value: 40
  misc_feature: MA Experiment 20001905 PARAMETER Experiment Name: At_Drought_Reproduction_P Parameter: Organism Value: A. thaliana
  misc_feature: MA Experiment 20001905 PARAMETER Experiment Name: At_Drought_Reproduction_P Parameter: Plant Line Value: WS
  misc_feature: MA Experiment 20001905 PARAMETER Experiment Name: At_Drought_Reproduction_P Parameter: Timepoint (day) Value: 10
  misc_feature: MA Experiment 20001905 PARAMETER Experiment Name: At_Drought_Reproduction_P Parameter: Tissue Value: Rosettes
  misc_feature: MA Experiment 20001905 PARAMETER Experiment Name: At_Drought_Reproduction_P Parameter: Treatment Value: Drought vs. No Drought

SEQ ID NO: 34501 - protein, 352 aa, Arabidopsis thaliana; identical to SEQ ID NO: 30911
  peptide (1)..(352): Ceres Seq. ID no. 12370510
  misc_feature (187)..(295): Pfam Name: B3 DNA binding domain Pfam Description: B3 DNA binding domain
  misc_feature (39)..(293): Homolog of NCBI NO: 34911404 NR Description: DNA-binding protein RAV2-like
  misc_feature (10)..(311): Homolog of NCBI NO: 34895690 NR Description: putative DNA binding protein RAV2
  misc_feature (61)..(311): Homolog of NCBI NO: 34895676 NR Description: putative DNA binding protein RAV2
  misc_feature (1)..(349): Homolog of NCBI NO: 21593532 NR Description: AP2 domain transcription factor [Arabidopsis
  misc_feature (1)..(349): Homolog of NCBI NO: 15230871 NR Description: AP2 domain transcription factor RAV, putative
  misc_feature (1)..(351): Homolog of NCBI NO: 15222217 NR Description: DNA-binding protein (RAV1)
  misc_feature (1)..(352): Homolog of NCBI NO: 15222622 NR Description: DNA-binding protein RAV2, putative
  misc_feature (19)..(352): Homolog of NCBI NO: 2281641 NR Description: AP2 domain containing protein RAP2.8 [Arabidopsis
  misc_feature (1)..(352): Homolog of NCBI NO: 21554039 NR Description: putative RAV2-like DNA-binding protein
  misc_feature (1)..(352): Homolog of NCBI NO: 18409138 NR Description: AP2 domain protein RAP2.8 (RAV2)

SEQ ID NO: 34502 - protein, 315 aa, Arabidopsis thaliana; identical to SEQ ID NO: 30912
  peptide (1)..(315): Ceres Seq. ID no. 12370511
  misc_feature (150)..(258): Pfam Name: B3 DNA binding domain Pfam Description: B3 DNA binding domain
  misc_feature (2)..(256): Homolog of NCBI NO: 34911404 NR Description: DNA-binding protein RAV2-like
  misc_feature (1)..(274): Homolog of NCBI NO: 34895690 NR Description: putative DNA binding protein RAV2
  misc_feature (24)..(274): Homolog of NCBI NO: 34895676 NR Description: putative DNA binding protein RAV2
  misc_feature (1)..(312): Homolog of NCBI NO: 21593532 NR Description: AP2 domain transcription factor [Arabidopsis
  misc_feature (1)..(312): Homolog of NCBI NO: 15230871 NR Description: AP2 domain transcription factor RAV, putative
  misc_feature (1)..(314): Homolog of NCBI NO: 15222217 NR Description: DNA-binding protein (RAV1)
  misc_feature (1)..(315): Homolog of NCBI NO: 15222622 NR Description: DNA-binding protein RAV2, putative
  misc_feature (1)..(315): Homolog of NCBI NO: 2281641 NR Description: AP2 domain containing protein RAP2.8 [Arabidopsis
  misc_feature (1)..(315): Homolog of NCBI NO: 21554039 NR Description: putative RAV2-like DNA-binding protein
  misc_feature (1)..(315): Homolog of NCBI NO: 18409138 NR Description: AP2 domain protein RAP2.8 (RAV2)

SEQ ID NO: 34503 - protein, 212 aa, Arabidopsis thaliana; identical to SEQ ID NO: 30913
  peptide (1)..(212): Ceres Seq. ID no. 12370512
  misc_feature (47)..(155): Pfam Name: B3 DNA binding domain Pfam Description: B3 DNA binding domain
  misc_feature (1)..(153): Homolog of NCBI NO: 34911404 NR Description: DNA-binding protein RAV2-like
  misc_feature (1)..(171): Homolog of NCBI NO: 34895690 NR Description: putative DNA binding protein RAV2
  misc_feature (1)..(171): Homolog of NCBI NO: 34895676 NR Description: putative DNA binding protein RAV2
  misc_feature (1)..(209): Homolog of NCBI NO: 21593532 NR Description: AP2 domain transcription factor [Arabidopsis
  misc_feature (1)..(209): Homolog of NCBI NO: 15230871 NR Description: AP2 domain transcription factor RAV, putative
  misc_feature (1)..(211): Homolog of NCBI NO: 15222217 NR Description: DNA-binding protein (RAV1)
  misc_feature (1)..(212): Homolog of NCBI NO: 15222622 NR Description: DNA-binding protein RAV2, putative
  misc_feature (1)..(212): Homolog of NCBI NO: 2281641 NR Description: AP2 domain containing protein RAP2.8 [Arabidopsis
  misc_feature (1)..(212): Homolog of NCBI NO: 21554039 NR Description: putative RAV2-like DNA-binding protein
  misc_feature (1)..(212): Homolog of NCBI NO: 18409138 NR Description: AP2 domain protein RAP2.8 (RAV2)

SEQ ID NO: 34504 - DNA, 1903 bp, Arabidopsis thaliana; identical to SEQ ID NO: 30914
  misc_feature (1)..(1903): Ceres Seq. ID no. 12384905
  misc_feature: MA Experiment ID: 108434 Result: Down-regulated in Transcription
  misc_feature: MA Experiment 108434 PARAMETER Experiment Name: At_Root_Tips_cDNA_P Parameter: Tissue Value: Root Tips
  misc_feature: MA Experiment ID: 108463 Result: Down-regulated in Transcription
  misc_feature: MA Experiment 108463 PARAMETER Experiment Name: At_Germinating_Seeds_cDNA_P Parameter: Age (day) Value: 3 vs. 0
  misc_feature: MA Experiment 108463 PARAMETER Experiment Name: At_Germinating_Seeds_cDNA_P Parameter: Tissue Value: Germinating Seeds
  misc_feature: MA Experiment ID: 108464 Result: Down-regulated in Transcription
  misc_feature: MA Experiment 108464 PARAMETER Experiment Name: At_Germinating_Seeds_cDNA_P Parameter: Age (day) Value: 4 vs. 0
  misc_feature: MA Experiment 108464 PARAMETER Experiment Name: At_Germinating_Seeds_cDNA_P Parameter: Tissue Value: Germinating Seeds
  misc_feature: MA Experiment ID: 20000088 Result: Up-regulated in Transcription
  misc_feature: MA Experiment 20000088 PARAMETER Experiment Name: At_100uM_ABA_Mutants_cDNA_P Parameter: Plant Line Value: Landsberg
  misc_feature: MA Experiment 20000088 PARAMETER Experiment Name: At_100uM_ABA_Mutants_cDNA_P Parameter: Timepoint (hr) Value: 6
  misc_feature: MA Experiment 20000088 PARAMETER Experiment Name: At_100uM_ABA_Mutants_cDNA_P Parameter: Tissue Value: Aerial
  misc_feature: MA Experiment 20000088 PARAMETER Experiment Name: At_100uM_ABA_Mutants_cDNA_P Parameter: Treatment Value: 100uM ABA vs. No Treatment

SEQ ID NO: 34505 - protein, 549 aa, Arabidopsis thaliana; identical to SEQ ID NO: 30915
  peptide (1)..(549): Ceres Seq. ID no. 12384906
  misc_feature (98)..(535): Pfam Name: Class-II DAHP synthetase family Pfam Description: Class-II DAHP synthetase family
  misc_feature (3)..(548): Homolog of NCBI NO: 7488957 NR Description: probable 2-dehydro-3-deoxy-phosphoheptonate
  misc_feature (25)..(547): Homolog of NCBI NO: 2398679 NR Description: 3-deoxy-D-arabino-heptulosonate 7-phosphate
  misc_feature (25)..(548): Homolog of NCBI NO: 114193 NR Description: Phospho-2-dehydro-3-deoxyheptonate aldolase 1, precursor (Phospho-2-keto-3-deoxyheptonate aldolase 1) (DAHP
  misc_feature (25)..(547): Homolog of NCBI NO: 15219878 NR Description: 3-deoxy-D-arabino-heptulosonate 7-phosphate,
  misc_feature (25)..(548): Homolog of NCBI NO: 584776 NR Description: Phospho-2-dehydro-3-deoxyheptonate aldolase 1, precursor (Phospho-2-keto-3-deoxyheptonate aldolase 1) (DAHP
  misc_feature (25)..(548): Homolog of NCBI NO: 584779 NR Description: Phospho-2-dehydro-3-deoxyheptonate aldolase 2, precursor (Phospho-2-keto-3-deoxyheptonate aldolase 2) (DAHP
  misc_feature (25)..(547): Homolog of NCBI NO: 2546988 NR Description: 2-dehydro-3-deoxyphosphoheptonate aldolase
  misc_feature (25)..(549): Homolog of NCBI NO: 99742 NR Description: 2-dehydro-3-deoxy-phosphoheptonate aldolase (EC
  misc_feature (25)..(549): Homolog of NCBI NO: 166688 NR Description: 3-deoxy-D-arabino-heptulosonate y-phosphate
  misc_feature (25)..(549): Homolog of NCBI NO: 15236093 NR Description: 2-dehydro-3-deoxyphosphoheptonate aldolase

SEQ ID NO: 34506 - protein, 525 aa, Arabidopsis thaliana; identical to SEQ ID NO: 30916
  peptide (1)..(525): Ceres Seq. ID no. 12384907
  misc_feature (74)..(511): Pfam Name: Class-II DAHP synthetase family Pfam Description: Class-II DAHP synthetase family
  misc_feature (1)..(524): Homolog of NCBI NO: 7488957 NR Description: probable 2-dehydro-3-deoxy-phosphoheptonate
  misc_feature (1)..(523): Homolog of NCBI NO: 2398679 NR Description: 3-deoxy-D-arabino-heptulosonate 7-phosphate
  misc_feature (1)..(524): Homolog of NCBI NO: 114193 NR Description: Phospho-2-dehydro-3-deoxyheptonate aldolase 1, precursor (Phospho-2-keto-3-deoxyheptonate aldolase 1) (DAHP
  misc_feature (1)..(523): Homolog of NCBI NO: 15219878 NR Description: 3-deoxy-D-arabino-heptulosonate 7-phosphate,
  misc_feature (1)..(524): Homolog of NCBI NO: 584776 NR Description: Phospho-2-dehydro-3-deoxyheptonate aldolase 1, precursor (Phospho-2-keto-3-deoxyheptonate aldolase 1) (DAHP
  misc_feature (1)..(524): Homolog of NCBI NO: 584779 NR Description: Phospho-2-dehydro-3-deoxyheptonate aldolase 2, precursor (Phospho-2-keto-3-deoxyheptonate aldolase 2) (DAHP
  misc_feature (1)..(523): Homolog of NCBI NO: 2546988 NR Description: 2-dehydro-3-deoxyphosphoheptonate aldolase
  misc_feature (1)..(525): Homolog of NCBI NO: 99742 NR Description: 2-dehydro-3-deoxy-phosphoheptonate aldolase (EC
  misc_feature (1)..(525): Homolog of NCBI NO: 166688 NR Description: 3-deoxy-D-arabino-heptulosonate y-phosphate
  misc_feature (1)..(525): Homolog of NCBI NO: 15236093 NR Description: 2-dehydro-3-deoxyphosphoheptonate aldolase

SEQ ID NO: 34507 - protein, 365 aa, Arabidopsis thaliana; identical to SEQ ID NO: 30917
  peptide (1)..(365): Ceres Seq. ID no. 12384908
  misc_feature (1)..(351): Pfam Name: Class-II DAHP synthetase family Pfam Description: Class-II DAHP synthetase family
  misc_feature (1)..(364): Homolog of NCBI NO: 7488957 NR Description: probable 2-dehydro-3-deoxy-phosphoheptonate
  misc_feature (1)..(363): Homolog of NCBI NO: 2398679 NR Description: 3-deoxy-D-arabino-heptulosonate 7-phosphate
  misc_feature (1)..(364): Homolog of NCBI NO: 114193 NR Description: Phospho-2-dehydro-3-deoxyheptonate aldolase 1, precursor (Phospho-2-keto-3-deoxyheptonate aldolase 1) (DAHP
  misc_feature (1)..(363): Homolog of NCBI NO: 15219878 NR Description: 3-deoxy-D-arabino-heptulosonate 7-phosphate,
  misc_feature (1)..(364): Homolog of NCBI NO: 584776 NR Description: Phospho-2-dehydro-3-deoxyheptonate aldolase 1, precursor (Phospho-2-keto-3-deoxyheptonate aldolase 1) (DAHP
  misc_feature (1)..(364): Homolog of NCBI NO: 584779 NR Description: Phospho-2-dehydro-3-deoxyheptonate aldolase 2, precursor (Phospho-2-keto-3-deoxyheptonate aldolase 2) (DAHP
  misc_feature (1)..(363): Homolog of NCBI NO: 2546988 NR Description: 2-dehydro-3-deoxyphosphoheptonate aldolase
  misc_feature (1)..(365): Homolog of NCBI NO: 99742 NR Description: 2-dehydro-3-deoxy-phosphoheptonate aldolase (EC
  misc_feature (1)..(365): Homolog of NCBI NO: 166688 NR Description: 3-deoxy-D-arabino-heptulosonate y-phosphate
  misc_feature (1)..(365): Homolog of NCBI NO: 15236093 NR Description: 2-dehydro-3-deoxyphosphoheptonate aldolase

SEQ ID NO: 34508 - DNA, 1132 bp, Arabidopsis thaliana; identical to SEQ ID NO: 30918
  misc_feature (1)..(1132): Ceres Seq. ID no. 12326010
  misc_feature: MA Experiment ID: 108462 Result: Up-regulated in Transcription
  misc_feature: MA Experiment 108462 PARAMETER Experiment Name: At_Germinating_Seeds_cDNA_P Parameter: Age (day) Value: 2 vs. 0
  misc_feature: MA Experiment 108462 PARAMETER Experiment Name: At_Germinating_Seeds_cDNA_P Parameter: Tissue Value: Germinating Seeds
  misc_feature: MA Experiment ID: 108464 Result: Up-regulated in Transcription
  misc_feature: MA Experiment 108464 PARAMETER Experiment Name: At_Germinating_Seeds_cDNA_P Parameter: Age (day) Value: 4 vs. 0
  misc_feature: MA Experiment 108464 PARAMETER Experiment Name: At_Germinating_Seeds_cDNA_P Parameter: Tissue Value: Germinating Seeds
  misc_feature: MA Experiment ID: 108488 Result: Up-regulated in Transcription
  misc_feature: MA Experiment ID: 108595 Result: Down-regulated in Transcription
  misc_feature: MA Experiment 108595 PARAMETER Experiment Name: At_Ler-pi_Ovule_cDNA_P Parameter: Plant Line Value: null
  misc_feature: MA Experiment ID: 20000185 Result: Down-regulated in Transcription
  misc_feature: MA Experiment 20000185 PARAMETER Experiment Name: At_Roots__P Parameter: Age (day) Value: 7 vs. 21
  misc_feature: MA Experiment 20000185 PARAMETER Experiment Name: At_Roots__P Parameter: Organism Value: A. thaliana
  misc_feature: MA Experiment 20000185 PARAMETER Experiment Name: At_Roots__P Parameter: Tissue Value: Roots vs. Whole Plant
  misc_feature: MA Experiment ID: 20000437 Result: Down-regulated in Transcription
  misc_feature: MA Experiment 20000437 PARAMETER Experiment Name: At_Drought_P Parameter: Age (day) Value: 8
  misc_feature: MA Experiment 20000437 PARAMETER Experiment Name: At_Drought_P Parameter: Organism Value: A. thaliana
  misc_feature: MA Experiment 20000437 PARAMETER Experiment Name: At_Drought_P Parameter: Plant Line Value: WS
  misc_feature: MA Experiment 20000437 PARAMETER Experiment Name: At_Drought_P Parameter: Timepoint (hr) Value: 24
  misc_feature: MA Experiment 20000437 PARAMETER Experiment Name: At_Drought_P Parameter: Tissue Value: Whole Plant
  misc_feature: MA Experiment 20000437 PARAMETER Experiment Name: At_Drought_P Parameter: Treatment Value: Drought vs. No Drought
  misc_feature: MA Experiment ID: 20000439 Result: Down-regulated in Transcription
  misc_feature: MA Experiment 20000439 PARAMETER Experiment Name: At_Roots__P Parameter: Age (day) Value: 14 vs. 21
  misc_feature: MA Experiment 20000439 PARAMETER Experiment Name: At_Roots__P Parameter: Organism Value: A. thaliana
  misc_feature: MA Experiment 20000439 PARAMETER Experiment Name: At_Roots__P Parameter: Tissue Value: Roots vs. Whole Plant
  misc_feature: MA Experiment ID: 20000573 Result: Down-regulated in Transcription
  misc_feature: MA Experiment 20000573 PARAMETER Experiment Name: At_100uM_ABA_Mutants__P Parameter: Organism Value: A. thaliana
  misc_feature: MA Experiment 20000573 PARAMETER Experiment Name: At_100uM_ABA_Mutants__P Parameter: Plant Line Value: CS22 vs. Ler wt
  misc_feature: MA Experiment 20000573 PARAMETER Experiment Name: At_100uM_ABA_Mutants__P Parameter: Timepoint (hr) Value: N/A
  misc_feature: MA Experiment 20000573 PARAMETER Experiment Name: At_100uM_ABA_Mutants__P Parameter: Tissue Value: Whole Plant
  misc_feature: MA Experiment 20000573 PARAMETER Experiment Name: At_100uM_ABA_Mutants__P Parameter: Treatment Value: None
  misc_feature: MA Experiment ID: 20000574 Result: Down-regulated in Transcription
  misc_feature: MA Experiment 20000574 PARAMETER Experiment Name: At_100uM_ABA_Mutants__P Parameter: Organism Value: A. thaliana
  misc_feature: MA Experiment 20000574 PARAMETER Experiment Name: At_100uM_ABA_Mutants__P Parameter: Plant Line Value: CS23 vs. Ler wt
  misc_feature: MA Experiment 20000574 PARAMETER Experiment Name: At_100uM_ABA_Mutants__P Parameter: Timepoint (hr) Value: N/A
  misc_feature: MA Experiment 20000574 PARAMETER Experiment Name: At_100uM_ABA_Mutants__P Parameter: Tissue Value: Whole Plant
  misc_feature: MA Experiment 20000574 PARAMETER Experiment Name: At_100uM_ABA_Mutants__P Parameter: Treatment Value: None
  misc_feature: MA Experiment ID: 20001248 Result: Down-regulated in Transcription
  misc_feature: MA Experiment 20001248 PARAMETER Experiment Name: At_Far-red-induction_P Parameter: Age (day) Value: 7
  misc_feature: MA Experiment 20001248 PARAMETER Experiment Name: At_Far-red-induction_P Parameter: Light Value: Far-red vs. White
  misc_feature: MA Experiment 20001248 PARAMETER Experiment Name: At_Far-red-induction_P Parameter: Organism Value: A. thaliana
  misc_feature: MA Experiment 20001248 PARAMETER Experiment Name: At_Far-red-induction_P Parameter: Plant Line Value: Columbia
  misc_feature: MA Experiment 20001248 PARAMETER Experiment Name: At_Far-red-induction_P Parameter: Timepoint (hr) Value: 4
  misc_feature: MA Experiment 20001248 PARAMETER Experiment Name: At_Far-red-induction_P Parameter: Tissue Value: Whole Plant
  misc_feature: MA Experiment ID: 20001450 Result: Down-regulated in Transcription
  misc_feature: MA Experiment 20001450 PARAMETER Experiment Name: At_Far-red-induction_P Parameter: Age (day) Value: 7
  misc_feature: MA Experiment 20001450 PARAMETER Experiment Name: At_Far-red-induction_P Parameter: Light Value: Far-red vs. White
  misc_feature: MA Experiment 20001450 PARAMETER Experiment Name: At_Far-red-induction_P Parameter: Organism Value: A. thaliana
  misc_feature: MA Experiment 20001450 PARAMETER Experiment Name: At_Far-red-induction_P Parameter: Plant Line Value: Columbia
  misc_feature: MA Experiment 20001450 PARAMETER Experiment Name: At_Far-red-induction_P Parameter: Timepoint (hr) Value: 8
  misc_feature: MA Experiment 20001450 PARAMETER Experiment Name: At_Far-red-induction_P Parameter: Tissue Value: Whole Plant
  misc_feature: MA Experiment ID: 20001905 Result: Down-regulated in Transcription
  misc_feature: MA Experiment 20001905 PARAMETER Experiment Name: At_Drought_Reproduction_P Parameter: Age (day) Value: 40
  misc_feature: MA Experiment 20001905 PARAMETER Experiment Name: At_Drought_Reproduction_P Parameter: Organism Value: A. thaliana
  misc_feature: MA Experiment 20001905 PARAMETER Experiment Name: At_Drought_Reproduction_P Parameter: Plant Line Value: WS
  misc_feature: MA Experiment 20001905 PARAMETER Experiment Name: At_Drought_Reproduction_P Parameter: Timepoint (day) Value: 10
  misc_feature: MA Experiment 20001905 PARAMETER Experiment Name: At_Drought_Reproduction_P Parameter: Tissue Value: Rosettes
  misc_feature: MA Experiment 20001905 PARAMETER Experiment Name: At_Drought_Reproduction_P Parameter: Treatment Value: Drought vs. No Drought

SEQ ID NO: 34509 - protein, 261 aa, Arabidopsis thaliana; identical to SEQ ID NO: 30919
  peptide (1)..(261): Ceres Seq. ID no. 12326011
  misc_feature (106)..(226): Homolog of NCBI NO: 25029256 NR Description: conserved hypothetical protein [Corynebacterium
  misc_feature (109)..(224): Homolog of NCBI NO: 22970530 NR Description: hypothetical protein [Chloroflexus aurantiacus]
  misc_feature (6)..(261): Homolog of NCBI NO: 28273393 NR Description: unknown protein [Oryza sativa (japonica
  misc_feature (4)..(259): Homolog of NCBI NO: 25405875 NR Description: protein F27F5.3 [imported] - Arabidopsis thaliana
  misc_feature (4)..(261): Homolog of NCBI NO: 18401414 NR Description: expressed protein

SEQ ID NO: 34510 - protein, 258 aa, Arabidopsis thaliana; identical to SEQ ID NO: 30920
  peptide (1)..(258): Ceres Seq. ID no. 12326012
  misc_feature (103)..(223): Homolog of NCBI NO: 25029256 NR Description: conserved hypothetical protein [Corynebacterium
  misc_feature (106)..(221): Homolog of NCBI NO: 22970530 NR Description: hypothetical protein [Chloroflexus aurantiacus]
  misc_feature (3)..(258): Homolog of NCBI NO: 28273393 NR Description: unknown protein [Oryza sativa (japonica
  misc_feature (1)..(256): Homolog of NCBI NO: 25405875 NR Description: protein F27F5.3 [imported] - Arabidopsis thaliana
  misc_feature (1)..(258): Homolog of NCBI NO: 18401414 NR Description: expressed protein

SEQ ID NO: 34511 - protein, 256 aa, Arabidopsis thaliana; identical to SEQ ID NO: 30921
  peptide (1)..(256): Ceres Seq. ID no. 12326013
  misc_feature (101)..(221): Homolog of NCBI NO: 25029256 NR Description: conserved hypothetical protein [Corynebacterium
  misc_feature (104)..(219): Homolog of NCBI NO: 22970530 NR Description: hypothetical protein [Chloroflexus aurantiacus]
  misc_feature (1)..(256): Homolog of NCBI NO: 28273393 NR Description: unknown protein [Oryza sativa (japonica
  misc_feature (1)..(254): Homolog of NCBI NO: 25405875 NR Description: protein F27F5.3 [imported] - Arabidopsis thaliana
  misc_feature (1)..(256): Homolog of NCBI NO: 18401414 NR Description: expressed protein

SEQ ID NO: 34512 - DNA, 1337 bp, Arabidopsis thaliana; identical to SEQ ID NO: 30922
  misc_feature (1)..(1337): Ceres Seq. ID no. 12321402
  misc_feature: MA Experiment ID: 108434 Result: Down-regulated in Transcription
  misc_feature: MA Experiment 108434 PARAMETER Experiment Name: At_Root_Tips_cDNA_P Parameter: Tissue Value: Root Tips
  misc_feature: MA Experiment ID: 108435 Result: Down-regulated in Transcription
  misc_feature: MA Experiment 108435 PARAMETER Experiment Name: At_stm_Mutants_cDNA_P Parameter: Plant Line Value: wt Landsburg vs stm
  misc_feature: MA Experiment 108435 PARAMETER Experiment Name: At_stm_Mutants_cDNA_P Parameter: Tissue Value: Shoot Apical Meristem Region
  misc_feature: MA Experiment ID: 108464 Result: Up-regulated in Transcription
  misc_feature: MA Experiment 108464 PARAMETER Experiment Name: At_Germinating_Seeds_cDNA_P Parameter: Age (day) Value: 4 vs. 0
  misc_feature: MA Experiment 108464 PARAMETER Experiment Name: At_Germinating_Seeds_cDNA_P Parameter: Tissue Value: Germinating Seeds
  misc_feature: MA Experiment ID: 108488 Result: Down-regulated in Transcription
  misc_feature: MA Experiment ID: 108489 Result: Up-regulated in Transcription
  misc_feature: MA Experiment ID: 108561 Result: Up-regulated in Transcription
  misc_feature: MA Experiment 108561 PARAMETER Experiment Name: At_100uM_ABA_cDNA_P Parameter: Timepoint (hr) Value: 6
  misc_feature: MA Experiment 108561 PARAMETER Experiment Name: At_100uM_ABA_cDNA_P Parameter: Tissue Value: Aerial
  misc_feature: MA Experiment 108561 PARAMETER Experiment Name: At_100uM_ABA_cDNA_P Parameter: Treatment Value: 100uM ABA vs. No Treatment
  misc_feature: MA Experiment ID: 108576 Result: Up-regulated in Transcription
  misc_feature: MA Experiment 108576 PARAMETER Experiment Name: At_42deg_Heat_cDNA_P Parameter: Temperature (deg C) Value: 42 vs. 22
  misc_feature: MA Experiment 108576 PARAMETER Experiment Name: At_42deg_Heat_cDNA_P Parameter: Timepoint (hr) Value: 1
  misc_feature: MA Experiment 108576 PARAMETER Experiment Name: At_42deg_Heat_cDNA_P Parameter: Tissue Value: Aerial
  misc_feature: MA Experiment ID: 108585 Result: Up-regulated in Transcription
  misc_feature: MA Experiment 108585 PARAMETER Experiment Name: At_5mM_NaNP_cDNA_P Parameter: Timepoint (hr) Value: 6
  misc_feature: MA Experiment 108585 PARAMETER Experiment Name: At_5mM_NaNP_cDNA_P Parameter: Tissue Value: Aerial
  misc_feature: MA Experiment 108585 PARAMETER Experiment Name: At_5mM_NaNP_cDNA_P Parameter: Treatment Value: null
  misc_feature: MA Experiment ID: 108667 Result: Up-regulated in Transcription
  misc_feature: MA Experiment 108667 PARAMETER Experiment Name: At_2mM_SA_cDNA_P Parameter: Plant Line Value: WS
  misc_feature: MA Experiment 108667 PARAMETER Experiment Name: At_2mM_SA_cDNA_P Parameter: Timepoint (hr) Value: 1
  misc_feature: MA Experiment 108667 PARAMETER Experiment Name: At_2mM_SA_cDNA_P Parameter: Treatment Value: 2mM SA vs. No Treatment
  misc_feature: MA Experiment ID: 20000090 Result: Down-regulated in Transcription
  misc_feature: MA Experiment ID: 20000112 Result: Up-regulated in Transcription
  misc_feature: MA Experiment 20000112 PARAMETER Experiment Name: At_42deg_Heat_cDNA_P Parameter: Temperature (deg C) Value: 42 vs. 22
  misc_feature: MA Experiment 20000112 PARAMETER Experiment Name: At_42deg_Heat_cDNA_P Parameter: Timepoint (hr) Value: 2
  misc_feature: MA Experiment 20000112 PARAMETER Experiment Name: At_42deg_Heat_cDNA_P Parameter: Tissue Value: Aerial
  misc_feature: MA Experiment ID: 20000113 Result: Up-regulated in Transcription
  misc_feature: MA Experiment 20000113 PARAMETER Experiment Name: At_42deg_Heat_cDNA_P Parameter: Temperature (deg C) Value: 42 vs. 22
  misc_feature: MA Experiment 20000113 PARAMETER Experiment Name: At_42deg_Heat_cDNA_P Parameter: Timepoint (hr) Value: 8
  misc_feature: MA Experiment 20000113 PARAMETER Experiment Name: At_42deg_Heat_cDNA_P Parameter: Tissue Value: Aerial
  misc_feature: MA Experiment ID: 20000224 Result: Up-regulated in Transcription
  misc_feature: MA Experiment ID: 20000328 Result: Up-regulated in Transcription
  misc_feature: MA Experiment 20000328 PARAMETER Experiment Name: At_42deg_Heat_Sub_P Parameter: Age (day) Value: 14
  misc_feature: MA Experiment 20000328 PARAMETER Experiment Name: At_42deg_Heat_Sub_P Parameter: Organism Value: A. thaliana
  misc_feature: MA Experiment 20000328 PARAMETER Experiment Name: At_42deg_Heat_Sub_P Parameter: Plant Line Value: WS
  misc_feature: MA Experiment 20000328 PARAMETER Experiment Name: At_42deg_Heat_Sub_P Parameter: Temperature (deg C) Value: 42 vs. 22
  misc_feature: MA Experiment 20000328 PARAMETER Experiment Name: At_42deg_Heat_Sub_P Parameter: Timepoint (hr) Value: 6
  misc_feature: MA Experiment 20000328 PARAMETER Experiment Name: At_42deg_Heat_Sub_P Parameter: Tissue Value: Aerial
  misc_feature: MA Experiment ID: 20000346 Result: Up-regulated in Transcription
  misc_feature: MA Experiment 20000346 PARAMETER Experiment Name: At_2mM_SA_Sub_P Parameter: Age (day) Value: 14
  misc_feature: MA Experiment 20000346 PARAMETER Experiment Name: At_2mM_SA_Sub_P Parameter: Organism Value: A. thaliana
  misc_feature: MA Experiment 20000346 PARAMETER Experiment Name: At_2mM_SA_Sub_P Parameter: Plant Line Value: WS
  misc_feature: MA Experiment 20000346 PARAMETER Experiment Name: At_2mM_SA_Sub_P Parameter: Timepoint (hr) Value: 1
  misc_feature: MA Experiment 20000346 PARAMETER Experiment Name: At_2mM_SA_Sub_P Parameter: Tissue Value: Aerial
  misc_feature: MA Experiment 20000346 PARAMETER Experiment Name: At_2mM_SA_Sub_P Parameter: Treatment Value: 2mM SA vs. No Treatment
  misc_feature: MA Experiment ID: 20000355 Result: Down-regulated in Transcription
  misc_feature: MA Experiment 20000355 PARAMETER Experiment Name: At_Siliques_Sub_P Parameter: Age (day) Value: 21
  misc_feature: MA Experiment 20000355 PARAMETER Experiment Name: At_Siliques_Sub_P Parameter: Organism Value: A. thaliana
  misc_feature: MA Experiment 20000355 PARAMETER Experiment Name: At_Siliques_Sub_P Parameter: Plant Line Value: WS
  misc_feature: MA Experiment 20000355 PARAMETER Experiment Name: At_Siliques_Sub_P Parameter: Tissue Value: Less Than 5mm Siliques vs. Whole Plant
  misc_feature: MA Experiment ID: 20000440 Result: Down-regulated in Transcription
  misc_feature: MA Experiment 20000440 PARAMETER Experiment Name: At_Closed-Flower__Sub_P Parameter: Tissue Value: Closed Flower vs. Whole Plant

SEQ ID NO: 34513 - protein, 386 aa, Arabidopsis thaliana; identical to SEQ ID NO: 30923
  peptide (1)..(386): Ceres Seq. ID no. 12321403
  misc_feature (5)..(385): Homolog of NCBI NO: 31193908 NR Description: putative heavy-metal-associated protein
  misc_feature (1)..(331): Homolog of NCBI NO: 9758294 NR Description: contains similarity to ATFP3~gene_id:MLE2.16
  misc_feature (1)..(331): Homolog of NCBI NO: 18424719 NR Description: copper chaperone (CCH)-related
  misc_feature (28)..(362): Homolog of NCBI NO: 15242741 NR Description: expressed protein
  misc_feature (27)..(261): Homolog of NCBI NO: 22327990 NR Description: expressed protein; protein id: At5g60800.1
  misc_feature (1)..(350): Homolog of NCBI NO: 38344582 NR Description: OSJNBa0053B21.14 [Oryza sativa (japonica
  misc_feature (77)..(386): Homolog of NCBI NO: 15242741 NR Description: expressed protein
  misc_feature (142)..(386): Homolog of NCBI NO: 4097545 NR Description: ATFP2 [Arabidopsis thaliana]
  misc_feature (58)..(386): Homolog of NCBI NO: 25408515 NR Description: probable farnesylated protein [imported] -
  misc_feature (1)..(386): Homolog of NCBI NO: 18404283 NR Description: expressed protein

SEQ ID NO: 34514 - protein, 329 aa, Arabidopsis thaliana; identical to SEQ ID NO: 30924
  peptide (1)..(329): Ceres Seq. ID no. 12321404
  misc_feature (1)..(328): Homolog of NCBI NO: 31193908 NR Description: putative heavy-metal-associated protein
  misc_feature (1)..(274): Homolog of NCBI NO: 9758294 NR Description: contains similarity to ATFP3~gene_id:MLE2.16
  misc_feature (1)..(274): Homolog of NCBI NO: 18424719 NR Description: copper chaperone (CCH)-related
  misc_feature (1)..(305): Homolog of NCBI NO: 15242741 NR Description: expressed protein
  misc_feature (1)..(204): Homolog of NCBI NO: 22327990 NR Description: expressed protein; protein id: At5g60800.1
  misc_feature (1)..(293): Homolog of NCBI NO: 38344582 NR Description: OSJNBa0053B21.14 [Oryza sativa (japonica
  misc_feature (20)..(329): Homolog of NCBI NO: 15242741 NR Description: expressed protein
  misc_feature (85)..(329): Homolog of NCBI NO: 4097545 NR Description: ATFP2 [Arabidopsis thaliana]
  misc_feature (1)..(329): Homolog of NCBI NO: 25408515 NR Description: probable farnesylated protein [imported] -
  misc_feature (1)..(329): Homolog of NCBI NO: 18404283 NR Description: expressed protein

SEQ ID NO: 34515 - protein, 317 aa, Arabidopsis thaliana; identical to SEQ ID NO: 30925
  peptide (1)..(317): Ceres Seq. ID no. 12321405
  misc_feature (1)..(316): Homolog of NCBI NO: 31193908 NR Description: putative heavy-metal-associated protein
  misc_feature (1)..(262): Homolog of NCBI NO: 9758294 NR Description: contains similarity to ATFP3~gene_id:MLE2.16
  misc_feature (1)..(262): Homolog of NCBI NO: 18424719 NR Description: copper chaperone (CCH)-related
  misc_feature (1)..(293): Homolog of NCBI NO: 15242741 NR Description: expressed protein
  misc_feature (1)..(192): Homolog of NCBI NO: 22327990 NR Description: expressed protein; protein id: At5g60800.1
  misc_feature (1)..(281): Homolog of NCBI NO: 38344582 NR Description: OSJNBa0053B21.14 [Oryza sativa (japonica
  misc_feature (8)..(317): Homolog of NCBI NO: 15242741 NR Description: expressed protein
  misc_feature (73)..(317): Homolog of NCBI NO: 4097545 NR Description: ATFP2 [Arabidopsis thaliana]
  misc_feature (1)..(317): Homolog of NCBI NO: 25408515 NR Description: probable farnesylated protein [imported] -
  misc_feature (1)..(317): Homolog of NCBI NO: 18404283 NR Description: expressed protein

SEQ ID NO: 34516 - DNA, 1373 bp, Arabidopsis thaliana; identical to SEQ ID NO: 30926
  misc_feature (1)..(1373): Ceres Seq. ID no. 12372173
  misc_feature: MA Experiment ID: 108595 Result: Down-regulated in Transcription
  misc_feature: MA Experiment 108595 PARAMETER Experiment Name: At_Ler-pi_Ovule_cDNA_P Parameter: Plant Line Value: null

SEQ ID NO: 34517 - protein, 380 aa, Arabidopsis thaliana; identical to SEQ ID NO: 30927
  peptide (1)..(380): Ceres Seq. ID no. 12372174
  misc_feature (25)..(147): Pfam Name: Oxidoreductase family, NAD-binding Rossmann fold Pfam Description: Oxidoreductase family, NAD-binding Rossmann fold
  misc_feature (25)..(287): Homolog of NCBI NO: 15616405 NR Description: oxidoreductase [Bacillus halodurans]
  misc_feature (9)..(364): Homolog of NCBI NO: 17549134 NR Description: CONSERVED HYPOTHETICAL PROTEIN [Ralstonia
  misc_feature (21)..(367): Homolog of NCBI NO: 32474689 NR Description: putative oxidoreductase [Pirellula sp.]
  misc_feature (21)..(377): Homolog of NCBI NO: 15218937 NR Description: oxidoreductase, putative; protein id: At1g66130.1
  misc_feature (10)..(333): Homolog of NCBI NO: 37534168 NR Description: putative oxidoreductase [Oryza sativa (japonica
  misc_feature (25)..(368): Homolog of NCBI NO: 7488933 NR Description: protein AX110P - carrot
  misc_feature (19)..(380): Homolog of NCBI NO: 25518452 NR Description: hypothetical protein F23M19.12 [imported] -
  misc_feature (19)..(380): Homolog of NCBI NO: 18399170 NR Description: expressed protein
  misc_feature (43)..(380): Homolog of NCBI NO: 21954073 NR Description: putative AX110P protein [Arabidopsis thaliana]
  misc_feature (19)..(380): Homolog of NCBI NO: 15233990 NR Description: AX110P -like protein

SEQ ID NO: 34518 - protein, 362 aa, Arabidopsis thaliana; identical to SEQ ID NO: 30928
  peptide (1)..(362): Ceres Seq. ID no. 12372175
  misc_feature (7)..(129): Pfam Name: Oxidoreductase family, NAD-binding Rossmann fold Pfam Description: Oxidoreductase family, NAD-binding Rossmann fold
  misc_feature (7)..(269): Homolog of NCBI NO: 15616405 NR Description: oxidoreductase [Bacillus halodurans]
  misc_feature (1)..(346): Homolog of NCBI NO: 17549134 NR Description: CONSERVED HYPOTHETICAL PROTEIN [Ralstonia
  misc_feature (3)..(349): Homolog of NCBI NO: 32474689 NR Description: putative oxidoreductase [Pirellula sp.]
  misc_feature (3)..(359): Homolog of NCBI NO: 15218937 NR Description: oxidoreductase, putative; protein id: At1g66130.1
  misc_feature (1)..(315): Homolog of NCBI NO: 37534168 NR Description: putative oxidoreductase [Oryza sativa (japonica
  misc_feature (7)..(350): Homolog of NCBI NO: 7488933 NR Description: protein AX110P - carrot
  misc_feature (1)..(362): Homolog of NCBI NO: 25518452 NR Description: hypothetical protein F23M19.12 [imported] -
  misc_feature (1)..(362): Homolog of NCBI NO: 18399170 NR Description: expressed protein
  misc_feature (25)..(362): Homolog of NCBI NO: 21954073 NR Description: putative AX110P protein [Arabidopsis thaliana]
  misc_feature (1)..(362): Homolog of NCBI NO: 15233990 NR Description: AX110P -like protein

SEQ ID NO: 34519 - protein, 351 aa, Arabidopsis thaliana; identical to SEQ ID NO: 30929
  peptide (1)..(351): Ceres Seq. ID no. 12372176
  misc_feature (1)..(118): Pfam Name: Oxidoreductase family, NAD-binding Rossmann fold Pfam Description: Oxidoreductase family, NAD-binding Rossmann fold
  misc_feature (1)..(258): Homolog of NCBI NO: 15616405 NR Description: oxidoreductase [Bacillus halodurans]
  misc_feature (1)..(335): Homolog of NCBI NO: 17549134 NR Description: CONSERVED HYPOTHETICAL PROTEIN [Ralstonia
  misc_feature (1)..(338): Homolog of NCBI NO: 32474689 NR Description: putative oxidoreductase [Pirellula sp.]
  misc_feature (1)..(348): Homolog of NCBI NO: 15218937 NR Description: oxidoreductase, putative; protein id: At1g66130.1
  misc_feature (1)..(304): Homolog of NCBI NO: 37534168 NR Description: putative oxidoreductase [Oryza sativa (japonica
  misc_feature (1)..(339): Homolog of NCBI NO: 7488933 NR Description: protein AX110P - carrot
  misc_feature (1)..(351): Homolog of NCBI NO: 25518452 NR Description: hypothetical protein F23M19.12 [imported] -
  misc_feature (1)..(351): Homolog of NCBI NO: 18399170 NR Description: expressed protein
  misc_feature (14)..(351): Homolog of NCBI NO: 21954073 NR Description: putative AX110P protein [Arabidopsis thaliana]
  misc_feature (1)..(351): Homolog of NCBI NO: 15233990 NR Description: AX110P -like protein

SEQ ID NO: 34520 - DNA, 1571 bp, Arabidopsis thaliana; identical to SEQ ID NO: 30930
  misc_feature (1)..(1571): Ceres Seq. ID no. 13486971
  misc_feature: MA Experiment ID: 108434 Result: Up-regulated in Transcription
  misc_feature: MA Experiment 108434 PARAMETER Experiment Name: At_Root_Tips_cDNA_P Parameter: Tissue Value: Root Tips
  misc_feature: MA Experiment ID: 108595 Result: Down-regulated in Transcription
  misc_feature: MA Experiment 108595 PARAMETER Experiment Name: At_Ler-pi_Ovule_cDNA_P Parameter: Plant Line Value: null
  misc_feature: MA Experiment ID: 20000224 Result: Up-regulated in Transcription
  misc_feature: MA Experiment ID: 20000234 Result: Up-regulated in Transcription
  misc_feature: MA Experiment 20000234 PARAMETER Experiment Name: At_Siliques_P Parameter: Age (day) Value: 21
  misc_feature: MA Experiment 20000234 PARAMETER Experiment Name: At_Siliques_P Parameter: Organism Value: A. thaliana
  misc_feature: MA Experiment 20000234 PARAMETER Experiment Name: At_Siliques_P Parameter: Plant Line Value: WS
  misc_feature: MA Experiment 20000234 PARAMETER Experiment Name: At_Siliques_P Parameter: Tissue Value: Less Than 5mm Siliques vs. Whole Plant
  misc_feature: MA Experiment ID: 20000794 Result: Up-regulated in Transcription
  misc_feature: MA Experiment 20000794 PARAMETER Experiment Name: At_Petals_P Parameter: Age (day) Value: 23-25 days
  misc_feature: MA Experiment 20000794 PARAMETER Experiment Name: At_Petals_P Parameter: Plant Line Value: WS
  misc_feature: MA Experiment 20000794 PARAMETER Experiment Name: At_Petals_P Parameter: Tissue Value: Petals vs. Whole plant
  misc_feature: MA Experiment ID: 20001905 Result: Down-regulated in Transcription
  misc_feature: MA Experiment 20001905 PARAMETER Experiment Name: At_Drought_Reproduction_P Parameter: Age (day) Value: 40
  misc_feature: MA Experiment 20001905 PARAMETER Experiment Name: At_Drought_Reproduction_P Parameter: Organism Value: A. thaliana
  misc_feature: MA Experiment 20001905 PARAMETER Experiment Name: At_Drought_Reproduction_P Parameter: Plant Line Value: WS
  misc_feature: MA Experiment 20001905 PARAMETER Experiment Name: At_Drought_Reproduction_P Parameter: Timepoint (day) Value: 10
  misc_feature: MA Experiment 20001905 PARAMETER Experiment Name: At_Drought_Reproduction_P Parameter: Tissue Value: Rosettes
  misc_feature: MA Experiment 20001905 PARAMETER Experiment Name: At_Drought_Reproduction_P Parameter: Treatment Value: Drought vs. No Drought

SEQ ID NO: 34521 - protein, 470 aa, Arabidopsis thaliana; identical to SEQ ID NO: 30931
  peptide (1)..(470): Ceres Seq. ID no. 13486972
  misc_feature (80)..(470): Pfam Name: Aminotransferase class-III Pfam Description: Aminotransferase class-III
  misc_feature (74)..(469): Homolog of NCBI NO: 20808850 NR Description: PLP-dependent aminotransferases
  misc_feature (82)..(469): Homolog of NCBI NO: 15644529 NR Description: acetylornithine aminotransferase [Thermotoga
  misc_feature (74)..(464): Homolog of NCBI NO: 23112365 NR Description: hypothetical protein [Desulfitobacterium
  misc_feature (71)..(469): Homolog of NCBI NO: 15679337 NR Description: N-acetylornithine aminotransferase
  misc_feature (75)..(469): Homolog of NCBI NO: 15668902 NR Description: acetylornithine aminotransferase (argD)
  misc_feature (73)..(468): Homolog of NCBI NO: 22972847 NR Description: hypothetical protein [Chloroflexus aurantiacus]
  misc_feature (203)..(443): Homolog of NCBI NO: 34394063 NR Description: putative acetylornithine aminotransferase
  misc_feature (37)..(470): Homolog of NCBI NO: 2811029 NR Description: Acetylornithine aminotransferase, mitochondrial
  misc_feature (14)..(470): Homolog of NCBI NO: 21554043 NR Description: putative acetylornithine transaminase
  misc_feature (14)..(470): Homolog of NCBI NO: 15220176 NR Description: acetylornithine aminotransferase, mitochondrial

SEQ ID NO: 34522 - protein, 457 aa, Arabidopsis thaliana; identical to SEQ ID NO: 30932
  peptide (1)..(457): Ceres Seq. ID no. 13486973
  misc_feature (67)..(457): Pfam Name: Aminotransferase class-III Pfam Description: Aminotransferase class-III
  misc_feature (61)..(456): Homolog of NCBI NO: 20808850 NR Description: PLP-dependent aminotransferases
  misc_feature (69)..(456): Homolog of NCBI NO: 15644529 NR Description: acetylornithine aminotransferase [Thermotoga
  misc_feature (61)..(451): Homolog of NCBI NO: 23112365 NR Description: hypothetical protein [Desulfitobacterium
  misc_feature (58)..(456): Homolog of NCBI NO: 15679337 NR Description: N-acetylornithine aminotransferase
  misc_feature (62)..(456): Homolog of NCBI NO: 15668902 NR Description: acetylornithine aminotransferase (argD)
  misc_feature (60)..(455): Homolog of NCBI NO: 22972847 NR Description: hypothetical protein [Chloroflexus aurantiacus]
  misc_feature (190)..(430): Homolog of NCBI NO: 34394063 NR Description: putative acetylornithine aminotransferase
  misc_feature (24)..(457): Homolog of NCBI NO: 2811029 NR Description: Acetylornithine aminotransferase, mitochondrial
  misc_feature (1)..(457): Homolog of NCBI NO: 21554043 NR Description: putative acetylornithine transaminase
  misc_feature (1)..(457): Homolog of NCBI NO: 15220176 NR Description: acetylornithine aminotransferase, mitochondrial

SEQ ID NO: 34523 - protein, 238 aa, Arabidopsis thaliana; identical to SEQ ID NO: 30933
  peptide (1)..(238): Ceres Seq. ID no. 13486974
  misc_feature (1)..(238): Pfam Name: Aminotransferase class-III Pfam Description: Aminotransferase class-III
  misc_feature (1)..(237): Homolog of NCBI NO: 20808850 NR Description: PLP-dependent aminotransferases
  misc_feature (1)..(237): Homolog of NCBI NO: 15644529 NR Description: acetylornithine aminotransferase [Thermotoga
  misc_feature (1)..(232): Homolog of NCBI NO: 23112365 NR Description: hypothetical protein [Desulfitobacterium
  misc_feature (1)..(237): Homolog of NCBI NO: 15679337 NR Description: N-acetylornithine aminotransferase
  misc_feature (1)..(237): Homolog of NCBI NO: 15668902 NR Description: acetylornithine aminotransferase (argD)
  misc_feature (1)..(236): Homolog of NCBI NO: 22972847 NR Description: hypothetical protein [Chloroflexus aurantiacus]
  misc_feature (1)..(211): Homolog of NCBI NO: 34394063 NR Description: putative acetylornithine aminotransferase
  misc_feature (1)..(238): Homolog of NCBI NO: 2811029 NR Description: Acetylornithine aminotransferase, mitochondrial
  misc_feature (1)..(238): Homolog of NCBI NO: 21554043 NR Description: putative acetylornithine transaminase
  misc_feature (1)..(238): Homolog of NCBI NO: 15220176 NR Description: acetylornithine aminotransferase, mitochondrial

SEQ ID NO: 34524 - DNA, 1180 bp, Arabidopsis thaliana; identical to SEQ ID NO: 30934
  misc_feature (1)..(1180): Ceres Seq. ID no. 13504734
  misc_feature: MA Experiment ID: 108434 Result: Up-regulated in Transcription
  misc_feature: MA Experiment 108434 PARAMETER Experiment Name: At_Root_Tips_cDNA_P Parameter: Tissue Value: Root Tips
  misc_feature: MA Experiment ID: 108462 Result: Down-regulated in Transcription
  misc_feature: MA Experiment 108462 PARAMETER Experiment Name: At_Germinating_Seeds_cDNA_P Parameter: Age (day) Value: 2 vs. 0
  misc_feature: MA Experiment 108462 PARAMETER Experiment Name: At_Germinating_Seeds_cDNA_P Parameter: Tissue Value: Germinating Seeds
  misc_feature: MA Experiment ID: 108463 Result: Down-regulated in Transcription
  misc_feature: MA Experiment 108463 PARAMETER Experiment Name: At_Germinating_Seeds_cDNA_P Parameter: Age (day) Value: 3 vs. 0
  misc_feature: MA Experiment 108463 PARAMETER Experiment Name: At_Germinating_Seeds_cDNA_P Parameter: Tissue Value: Germinating Seeds
  misc_feature: MA Experiment ID: 108464 Result: Down-regulated in Transcription
  misc_feature: MA Experiment 108464 PARAMETER Experiment Name: At_Germinating_Seeds_cDNA_P Parameter: Age (day) Value: 4 vs. 0
  misc_feature: MA Experiment 108464 PARAMETER Experiment Name: At_Germinating_Seeds_cDNA_P Parameter: Tissue Value: Germinating Seeds
  misc_feature: MA Experiment ID: 108488 Result: Up-regulated in Transcription
  misc_feature: MA Experiment ID: 20000224 Result: Down-regulated in Transcription
  misc_feature: MA Experiment ID: 20001807 Result: Up-regulated in Transcription
  misc_feature: MA Experiment 20001807 PARAMETER Experiment Name: At_50mM_NH4NO3_L-to-H_Sub_P Parameter: Timepoint (hr) Value: 6
  misc_feature: MA Experiment 20001807 PARAMETER Experiment Name: At_50mM_NH4NO3_L-to-H_Sub_P Parameter: Tissue Value: Leaf
  misc_feature: MA Experiment 20001807 PARAMETER Experiment Name: At_50mM_NH4NO3_L-to-H_Sub_P Parameter: Treatment Value: 50mM NH4NO3 vs 100mM Mannitol

SEQ ID NO: 34525 - protein, 320 aa, Arabidopsis thaliana; identical to SEQ ID NO: 30935
  peptide (1)..(320): Ceres Seq. ID no. 13504735
  misc_feature (5)..(109): Pfam Name: Ribosomal protein L10 Pfam Description: Ribosomal protein L10
  misc_feature (5)..(109): Pfam Name: Ribosomal protein L10 Pfam Description: Ribosomal protein L10
  misc_feature (2)..(315): Homolog of NCBI NO: 15225613 NR Description: 60S acidic ribosomal protein P0 (RPP0A)
  misc_feature (5)..(318): Homolog of NCBI NO: 6984134 NR Description: 60S acidic ribosomal protein PO [Euphorbia esula]
  misc_feature (1)..(320): Homolog of NCBI NO: 21593316 NR Description: 60S acidic ribosomal protein P0-C [Arabidopsis
  misc_feature (2)..(315): Homolog of NCBI NO: 15225613 NR Description: 60S acidic ribosomal protein P0 (RPP0A)
  misc_feature (1)..(320): Homolog of NCBI NO: 21593316 NR Description: 60S acidic ribosomal protein P0-C [Arabidopsis
  misc_feature (1)..(320): Homolog of NCBI NO: 21554645 NR Description: putative 60S acidic ribosomal protein P0
  misc_feature (1)..(320): Homolog of NCBI NO: 15232603 NR Description: 60S acidic ribosomal protein P0 (RPP0B)
  misc_feature (1)..(320): Homolog of NCBI NO: 15229706 NR Description: 60S acidic ribosomal protein P0 (RPP0C)
  misc_feature (5)..(318): Homolog of NCBI NO: 6984134 NR Description: 60S acidic ribosomal protein PO [Euphorbia esula]
  misc_feature (1)..(320): Homolog of NCBI NO: 15229706 NR Description: 60S acidic ribosomal protein P0 (RPP0C)
  misc_feature (1)..(320): Homolog of NCBI NO: 21554645 NR Description: putative 60S acidic ribosomal protein P0
  misc_feature (1)..(320): Homolog of NCBI NO: 15232603 NR Description: 60S acidic ribosomal protein P0 (RPP0B)

SEQ ID NO: 34526 - protein, 266 aa, Arabidopsis thaliana; identical to SEQ ID NO: 26377
  peptide (1)..(266): Ceres Seq. ID no. 13504736
  misc_feature (1)..(55): Pfam Name: Ribosomal protein L10 Pfam Description: Ribosomal protein L10
  misc_feature (1)..(55): Pfam Name: Ribosomal protein L10 Pfam Description: Ribosomal protein L10
  misc_feature (1)..(261): Homolog of NCBI NO: 15225613 NR Description: 60S acidic ribosomal protein P0 (RPP0A)
  misc_feature (1)..(264): Homolog of NCBI NO: 6984134 NR Description: 60S acidic ribosomal protein PO [Euphorbia esula]
  misc_feature (1)..(266): Homolog of NCBI NO: 21593316 NR Description: 60S acidic ribosomal protein P0-C [Arabidopsis
  misc_feature (1)..(261): Homolog of NCBI NO: 15225613 NR Description: 60S acidic ribosomal protein P0 (RPP0A)
  misc_feature (1)..(266): Homolog of NCBI NO: 21593316 NR Description: 60S acidic ribosomal protein P0-C [Arabidopsis
  misc_feature (1)..(266): Homolog of NCBI NO: 21554645 NR Description: putative 60S acidic ribosomal protein P0
  misc_feature (1)..(266): Homolog of NCBI NO: 15232603 NR Description: 60S acidic ribosomal protein P0 (RPP0B)
  misc_feature (1)..(266): Homolog of NCBI NO: 15229706 NR Description: 60S acidic ribosomal protein P0 (RPP0C)
  misc_feature (1)..(264): Homolog of NCBI NO: 6984134 NR Description: 60S acidic ribosomal protein PO [Euphorbia esula]
  misc_feature (1)..(266): Homolog of NCBI NO: 15229706 NR Description: 60S acidic ribosomal protein P0 (RPP0C)
  misc_feature (1)..(266): Homolog of NCBI NO: 21554645 NR Description: putative 60S acidic ribosomal protein P0
  misc_feature (1)..(266): Homolog of NCBI NO: 15232603 NR Description: 60S acidic ribosomal protein P0 (RPP0B)

SEQ ID NO: 34527 - protein, 261 aa, Arabidopsis thaliana; identical to SEQ ID NO: 26378
  peptide (1)..(261): Ceres Seq. ID no. 13504737
  misc_feature (176)..(258): Pfam Name: 60s Acidic ribosomal protein Pfam Description: 60s Acidic ribosomal protein
  misc_feature (176)..(258): Pfam Name: 60s Acidic ribosomal protein Pfam Description: 60s Acidic ribosomal protein
  misc_feature (1)..(256): Homolog of NCBI NO: 15225613 NR Description: 60S acidic ribosomal protein P0 (RPP0A)
  misc_feature (1)..(259): Homolog of NCBI NO: 6984134 NR Description: 60S acidic ribosomal protein PO [Euphorbia esula]
  misc_feature (1)..(261): Homolog of NCBI NO: 21593316 NR Description: 60S acidic ribosomal protein P0-C [Arabidopsis
  misc_feature (1)..(256): Homolog of NCBI NO: 15225613 NR Description: 60S acidic ribosomal protein P0 (RPP0A)
  misc_feature (1)..(261): Homolog of NCBI NO: 21593316 NR Description: 60S acidic ribosomal protein P0-C [Arabidopsis
  misc_feature (1)..(261): Homolog of NCBI NO: 21554645 NR Description: putative 60S acidic ribosomal protein P0
  misc_feature (1)..(261): Homolog of NCBI NO: 15232603 NR Description: 60S acidic ribosomal protein P0 (RPP0B)
  misc_feature (1)..(261): Homolog of NCBI NO: 15229706 NR Description: 60S acidic ribosomal protein P0 (RPP0C)
  misc_feature (1)..(259): Homolog of NCBI NO: 6984134 NR Description: 60S acidic ribosomal protein PO [Euphorbia esula]
  misc_feature (1)..(261): Homolog of NCBI NO: 15229706 NR Description: 60S acidic ribosomal protein P0 (RPP0C)
  misc_feature (1)..(261): Homolog of NCBI NO: 21554645 NR Description: putative 60S acidic ribosomal protein P0
  misc_feature (1)..(261): Homolog of NCBI NO: 15232603 NR Description: 60S acidic ribosomal protein P0 (RPP0B)

SEQ ID NO: 34528 - DNA, 1016 bp, Arabidopsis thaliana; identical to SEQ ID NO: 30938
  misc_feature (1)..(1016): Ceres Seq. ID no. 13489860
  misc_feature: MA Experiment ID: 108434 Result: Up-regulated in Transcription
  misc_feature: MA Experiment 108434 PARAMETER Experiment Name: At_Root_Tips_cDNA_P Parameter: Tissue Value: Root Tips
  misc_feature: MA Experiment ID: 108461 Result: Down-regulated in Transcription
  misc_feature: MA Experiment 108461 PARAMETER Experiment Name: At_Germinating_Seeds_cDNA_P Parameter: Age (day) Value: 1 vs. 0
  misc_feature: MA Experiment 108461 PARAMETER Experiment Name: At_Germinating_Seeds_cDNA_P Parameter: Tissue Value: Germinating Seeds
  misc_feature: MA Experiment ID: 108462 Result: Down-regulated in Transcription
  misc_feature: MA Experiment 108462 PARAMETER Experiment Name: At_Germinating_Seeds_cDNA_P Parameter: Age (day) Value: 2 vs. 0
  misc_feature: MA Experiment 108462 PARAMETER Experiment Name: At_Germinating_Seeds_cDNA_P Parameter: Tissue Value: Germinating Seeds
  misc_feature: MA Experiment ID: 108463 Result: Down-regulated in Transcription
  misc_feature: MA Experiment 108463 PARAMETER Experiment Name: At_Germinating_Seeds_cDNA_P Parameter: Age (day) Value: 3 vs. 0
  misc_feature: MA Experiment 108463 PARAMETER Experiment Name: At_Germinating_Seeds_cDNA_P Parameter: Tissue Value: Germinating Seeds
  misc_feature: MA Experiment ID: 108573 Result: Up-regulated in Transcription
  misc_feature: MA Experiment 108573 PARAMETER Experiment Name: At_Drought_cDNA_P Parameter: Timepoint (hr) Value: 6
  misc_feature: MA Experiment 108573 PARAMETER Experiment Name: At_Drought_cDNA_P Parameter: Tissue Value: Aerial
  misc_feature: MA Experiment 108573 PARAMETER Experiment Name: At_Drought_cDNA_P Parameter: Treatment Value: Drought vs. No Drought
  misc_feature: MA Experiment ID: 20000179 Result: Down-regulated in Transcription
  misc_feature: MA Experiment 20000179 PARAMETER Experiment Name: At_Germinating_Seeds_P Parameter: Age (hr) Value: 6 vs. 0
  misc_feature: MA Experiment 20000179 PARAMETER Experiment Name: At_Germinating_Seeds_P Parameter: Tissue Value: Germinating Seeds

SEQ ID NO: 34529 - protein, 250 aa, Arabidopsis thaliana; identical to SEQ ID NO: 30939
  peptide (1)..(250): Ceres Seq. ID no. 13489861
  misc_feature (28)..(215): Pfam Name: Proteasome A-type and B-type Pfam Description: Proteasome A-type and B-type
  misc_feature (1)..(244): Homolog of NCBI NO: 40744887 NR Description: conserved hypothetical protein [Aspergillus
  misc_feature (1)..(244): Homolog of NCBI NO: 464458 NR Description: Proteasome subunit alpha type 4 (Proteasome
  misc_feature (6)..(172): Homolog of NCBI NO: 14594915 NR Description: putative alpha3 proteasome subunit [Nicotiana
  misc_feature (1)..(248): Homolog of NCBI NO: 34898458 NR Description: ESTs AU058081(E3082),AU075427(E30384) correspond a region of the predicted gene.~Similar to Spinacia oleracea
  misc_feature (1)..(248): Homolog of NCBI NO: 34898416 NR Description: ESTs AU058081(E30812),AU058365(E50679), correspond to a region of the predicted gene.~Similar to Spinacia
  misc_feature (9)..(250): Homolog of NCBI NO: 6984140 NR Description: proteasome 27 kDa subunit [Euphorbia esula]
  misc_feature (1)..(250): Homolog of NCBI NO: 12229904 NR Description: Proteasome subunit alpha type 4 (20S proteasome
  misc_feature (1)..(250): Homolog of NCBI NO: 1709761 NR Description: Proteasome subunit alpha type 4 (20S proteasome subunit C) (20S proteasome subunit alpha-3) (Proteasome 27 kDa
  misc_feature (1)..(250): Homolog of NCBI NO: 2511584 NR Description: multicatalytic endopeptidase [Arabidopsis
  misc_feature (1)..(250): Homolog of NCBI NO: 15233268 NR Description: 20S proteasome alpha subunit C (PAC1)

SEQ ID NO: 34530 - protein, 226 aa, Arabidopsis thaliana; identical to SEQ ID NO: 30940
  peptide (1)..(226): Ceres Seq. ID no. 13489862
  misc_feature (4)..(191): Pfam Name: Proteasome A-type and B-type Pfam Description: Proteasome A-type and B-type
  misc_feature (1)..(220): Homolog of NCBI NO: 40744887 NR Description: conserved hypothetical protein [Aspergillus
  misc_feature (1)..(220): Homolog of NCBI NO: 464458 NR Description: Proteasome subunit alpha type 4 (Proteasome
  misc_feature (1)..(148): Homolog of NCBI NO: 14594915 NR Description: putative alpha3 proteasome subunit [Nicotiana
  misc_feature (1)..(224): Homolog of NCBI NO: 34898458 NR Description: ESTs AU058081(E3082),AU075427(E30384) correspond a region of the predicted gene.~Similar to Spinacia oleracea
  misc_feature (1)..(224): Homolog of NCBI NO: 34898416 NR Description: ESTs AU058081(E30812),AU058365(E50679), correspond to a region of the predicted gene.~Similar to Spinacia
  misc_feature (1)..(226): Homolog of NCBI NO: 6984140 NR Description: proteasome 27 kDa subunit [Euphorbia esula]
  misc_feature (1)..(226): Homolog of NCBI NO: 12229904 NR Description: Proteasome subunit alpha type 4 (20S proteasome
  misc_feature (1)..(226): Homolog of NCBI NO: 1709761 NR Description: Proteasome subunit alpha type 4 (20S proteasome subunit C) (20S proteasome subunit alpha-3) (Proteasome 27 kDa
  misc_feature (1)..(226): Homolog of NCBI NO: 2511584 NR Description: multicatalytic endopeptidase [Arabidopsis
  misc_feature (1)..(226): Homolog of NCBI NO: 15233268 NR Description: 20S proteasome alpha subunit C (PAC1)

SEQ ID NO: 34531 - protein, 186 aa, Arabidopsis thaliana; identical to SEQ ID NO: 30941
  peptide (1)..(186): Ceres Seq. ID no. 13489863
  misc_feature (1)..(151): Pfam Name: Proteasome A-type and B-type Pfam Description: Proteasome A-type and B-type
  misc_feature (1)..(180): Homolog of NCBI NO: 40744887 NR Description: conserved hypothetical protein [Aspergillus
  misc_feature (1)..(180): Homolog of NCBI NO: 464458 NR Description: Proteasome subunit alpha type 4 (Proteasome
  misc_feature (1)..(108): Homolog of NCBI NO: 14594915 NR Description: putative alpha3 proteasome subunit [Nicotiana
  misc_feature (1)..(184): Homolog of NCBI NO: 34898458 NR Description: ESTs AU058081(E3082),AU075427(E30384) correspond a region of the predicted gene.~Similar to Spinacia oleracea
  misc_feature (1)..(184): Homolog of NCBI NO: 34898416 NR Description: ESTs AU058081(E30812),AU058365(E50679), correspond to a region of the predicted gene.~Similar to Spinacia
  misc_feature (1)..(186): Homolog of NCBI NO: 6984140 NR Description: proteasome 27 kDa subunit [Euphorbia esula]
  misc_feature (1)..(186): Homolog of NCBI NO: 12229904 NR Description: Proteasome subunit alpha type 4 (20S proteasome
  misc_feature (1)..(186): Homolog of NCBI NO: 1709761 NR Description: Proteasome subunit alpha type 4 (20S proteasome subunit C) (20S proteasome subunit alpha-3) (Proteasome 27 kDa
  misc_feature (1)..(186): Homolog of NCBI NO: 2511584 NR Description: multicatalytic endopeptidase [Arabidopsis
  misc_feature (1)..(186): Homolog of NCBI NO: 15233268 NR Description: 20S proteasome alpha subunit C (PAC1)

SEQ ID NO: 34532 - DNA, 3198 bp, Arabidopsis thaliana; identical to SEQ ID NO: 30942
  misc_feature (1)..(3198): Ceres Seq. ID no. 13579859
  misc_feature: MA Experiment ID: 108434 Result: Up-regulated in Transcription
  misc_feature: MA Experiment 108434 PARAMETER Experiment Name: At_Root_Tips_cDNA_P Parameter: Tissue Value: Root Tips
  misc_feature: MA Experiment ID: 108462 Result: Up-regulated in Transcription
  misc_feature: MA Experiment 108462 PARAMETER Experiment Name: At_Germinating_Seeds_cDNA_P Parameter: Age (day) Value: 2 vs. 0
  misc_feature: MA Experiment 108462 PARAMETER Experiment Name: At_Germinating_Seeds_cDNA_P Parameter: Tissue Value: Germinating Seeds
  misc_feature: MA Experiment ID: 108463 Result: Up-regulated in Transcription
  misc_feature: MA Experiment 108463 PARAMETER Experiment Name: At_Germinating_Seeds_cDNA_P Parameter: Age (day) Value: 3 vs. 0
  misc_feature: MA Experiment 108463 PARAMETER Experiment Name: At_Germinating_Seeds_cDNA_P Parameter: Tissue Value: Germinating Seeds
  misc_feature: MA Experiment ID: 108464 Result: Up-regulated in Transcription
  misc_feature: MA Experiment 108464 PARAMETER Experiment Name: At_Germinating_Seeds_cDNA_P Parameter: Age (day) Value: 4 vs. 0
  misc_feature: MA Experiment 108464 PARAMETER Experiment Name: At_Germinating_Seeds_cDNA_P Parameter: Tissue Value: Germinating Seeds
  misc_feature: MA Experiment ID: 108488 Result: Down-regulated in Transcription
  misc_feature: MA Experiment ID: 108572 Result: Down-regulated in Transcription
  misc_feature: MA Experiment 108572 PARAMETER Experiment Name: At_Drought_cDNA_P Parameter: Timepoint (hr) Value: 1
  misc_feature: MA Experiment 108572 PARAMETER Experiment Name: At_Drought_cDNA_P Parameter: Tissue Value: Aerial
  misc_feature: MA Experiment 108572 PARAMETER Experiment Name: At_Drought_cDNA_P Parameter: Treatment Value: Drought vs. No Drought
  misc_feature: MA Experiment ID: 108576 Result: Down-regulated in Transcription
  misc_feature: MA Experiment 108576 PARAMETER Experiment Name: At_42deg_Heat_cDNA_P Parameter: Temperature (deg C) Value: 42 vs. 22
  misc_feature: MA Experiment 108576 PARAMETER Experiment Name: At_42deg_Heat_cDNA_P Parameter: Timepoint (hr) Value: 1
  misc_feature: MA Experiment 108576 PARAMETER Experiment Name: At_42deg_Heat_cDNA_P Parameter: Tissue Value: Aerial
  misc_feature: MA Experiment ID: 108577 Result: Down-regulated in Transcription
  misc_feature: MA Experiment 108577 PARAMETER Experiment Name: At_42deg_Heat_cDNA_P Parameter: Temperature (deg C) Value: 42 vs. 22
  misc_feature: MA Experiment 108577 PARAMETER Experiment Name: At_42deg_Heat_cDNA_P Parameter: Timepoint (hr) Value: 6
  misc_feature: MA Experiment 108577 PARAMETER Experiment Name: At_42deg_Heat_cDNA_P Parameter: Tissue Value: Aerial
  misc_feature: MA Experiment ID: 108579 Result: Down-regulated in Transcription
  misc_feature: MA Experiment 108579 PARAMETER Experiment Name: At_4deg_Cold_cDNA_P Parameter: Temperature (deg C) Value: 4 vs. 22
  misc_feature: MA Experiment 108579 PARAMETER Experiment Name: At_4deg_Cold_cDNA_P Parameter: Timepoint (hr) Value: 6
  misc_feature: MA Experiment 108579 PARAMETER Experiment Name: At_4deg_Cold_cDNA_P Parameter: Tissue Value: Aerial
  misc_feature: MA Experiment ID: 20000093 Result: Down-regulated in Transcription
  misc_feature: MA Experiment 20000093 PARAMETER Experiment Name: At_42deg_Heat_cDNA_P Parameter: Temperature (deg C) Value: 42 vs. 22
  misc_feature: MA Experiment 20000093 PARAMETER Experiment Name: At_42deg_Heat_cDNA_P Parameter: Timepoint (hr) Value: 0.5
  misc_feature: MA Experiment 20000093 PARAMETER Experiment Name: At_42deg_Heat_cDNA_P Parameter: Tissue Value: Aerial
  misc_feature: MA Experiment ID: 20000111 Result: Down-regulated in Transcription
  misc_feature: MA Experiment 20000111 PARAMETER Experiment Name: At_42deg_Heat_cDNA_P Parameter: Temperature (deg C) Value: 42 vs. 22
  misc_feature: MA Experiment 20000111 PARAMETER Experiment Name: At_42deg_Heat_cDNA_P Parameter: Timepoint (hr) Value: 6
  misc_feature: MA Experiment 20000111 PARAMETER Experiment Name: At_42deg_Heat_cDNA_P Parameter: Tissue Value: Aerial
  misc_feature: MA Experiment ID: 20000113 Result: Down-regulated in Transcription
  misc_feature: MA Experiment 20000113 PARAMETER Experiment Name: At_42deg_Heat_cDNA_P Parameter: Temperature (deg C) Value: 42 vs. 22
  misc_feature: MA Experiment 20000113 PARAMETER Experiment Name: At_42deg_Heat_cDNA_P Parameter: Timepoint (hr) Value: 8
  misc_feature: MA Experiment 20000113 PARAMETER Experiment Name: At_42deg_Heat_cDNA_P Parameter: Tissue Value: Aerial
  misc_feature: MA Experiment ID: 20000144 Result: Down-regulated in Transcription
  misc_feature: MA Experiment 20000144 PARAMETER Experiment Name: At_42deg_Heat_cDNA_P Parameter: Temperature (deg C) Value: 42 vs. 22
  misc_feature: MA Experiment 20000144 PARAMETER Experiment Name: At_42deg_Heat_cDNA_P Parameter: Timepoint (hr) Value: 1
  misc_feature: MA Experiment 20000144 PARAMETER Experiment Name: At_42deg_Heat_cDNA_P Parameter: Tissue Value: Aerial
  misc_feature: MA Experiment ID: 20000173 Result: Down-regulated in Transcription
  misc_feature: MA Experiment 20000173 PARAMETER Experiment Name: At_42deg_Heat_P Parameter: Age (day) Value: 14
  misc_feature: MA Experiment 20000173 PARAMETER Experiment Name: At_42deg_Heat_P Parameter: Organism Value: A. thaliana
  misc_feature: MA Experiment 20000173 PARAMETER Experiment Name: At_42deg_Heat_P Parameter: Plant Line Value: WS
  misc_feature: MA Experiment 20000173 PARAMETER Experiment Name: At_42deg_Heat_P Parameter: Temperature (deg C) Value: 42 vs. 22
  misc_feature: MA Experiment 20000173 PARAMETER Experiment Name: At_42deg_Heat_P Parameter: Timepoint (hr) Value: 6
  misc_feature: MA Experiment 20000173 PARAMETER Experiment Name: At_42deg_Heat_P Parameter: Tissue Value: Aerial
  misc_feature: MA Experiment ID: 20000182 Result: Down-regulated in Transcription
  misc_feature: MA Experiment 20000182 PARAMETER Experiment Name: At_2mM_SA_P Parameter: Age (day) Value: 14
  misc_feature: MA Experiment 20000182 PARAMETER Experiment Name: At_2mM_SA_P Parameter: Organism Value: A. thaliana
  misc_feature: MA Experiment 20000182 PARAMETER Experiment Name: At_2mM_SA_P Parameter: Plant Line Value: WS
  misc_feature: MA Experiment 20000182 PARAMETER Experiment Name: At_2mM_SA_P Parameter: Timepoint (hr) Value: 6
  misc_feature: MA Experiment 20000182 PARAMETER Experiment Name: At_2mM_SA_P Parameter: Tissue Value: Aerial
  misc_feature: MA Experiment 20000182 PARAMETER Experiment Name: At_2mM_SA_P Parameter: Treatment Value: 2mM SA vs. No Treatment
  misc_feature: MA Experiment ID: 20000184 Result: Down-regulated in Transcription
  misc_feature: MA Experiment 20000184 PARAMETER Experiment Name: At_Shoots__P Parameter: Age (day) Value: 7
  misc_feature: MA Experiment 20000184 PARAMETER Experiment Name: At_Shoots__P Parameter: Tissue Value: Shoots vs. Whole Plant
  misc_feature: MA Experiment ID: 20000227 Result: Down-regulated in Transcription
  misc_feature: MA Experiment 20000227 PARAMETER Experiment Name: At_Root-Tips-vs-Tops_P Parameter: Tissue Value: Root Tips vs. Root Tops
  misc_feature: MA Experiment ID: 20000234 Result: Down-regulated in Transcription
  misc_feature: MA Experiment 20000234 PARAMETER Experiment Name: At_Siliques_P Parameter: Age (day) Value: 21
  misc_feature: MA Experiment 20000234 PARAMETER Experiment Name: At_Siliques_P Parameter: Organism Value: A. thaliana
  misc_feature: MA Experiment 20000234 PARAMETER Experiment Name: At_Siliques_P Parameter: Plant Line Value: WS
  misc_feature: MA Experiment 20000234 PARAMETER Experiment Name: At_Siliques_P Parameter: Tissue Value: Less Than 5mm Siliques vs. Whole Plant
  misc_feature: MA Experiment ID: 20000235 Result: Down-regulated in Transcription
  misc_feature: MA Experiment 20000235 PARAMETER Experiment Name: At_Siliques_P Parameter: Age (day) Value: 21
  misc_feature: MA Experiment 20000235 PARAMETER Experiment Name: At_Siliques_P Parameter: Organism Value: A. thaliana
  misc_feature: MA Experiment 20000235 PARAMETER Experiment Name: At_Siliques_P Parameter: Plant Line Value: WS
  misc_feature: MA Experiment 20000235 PARAMETER Experiment Name: At_Siliques_P Parameter: Tissue Value: 5-10mm Siliques vs. Whole Plant
  misc_feature: MA Experiment ID: 20000264 Result: Down-regulated in Transcription
  misc_feature: MA Experiment 20000264 PARAMETER Experiment Name: At_Open_Flower_P Parameter: Age (day) Value: 21
  misc_feature: MA Experiment 20000264 PARAMETER Experiment Name: At_Open_Flower_P Parameter: Plant Line Value: WS
  misc_feature: MA Experiment 20000264 PARAMETER Experiment Name: At_Open_Flower_P Parameter: Tissue Value: Open Flower vs. Whole Plant
  misc_feature: MA Experiment ID: 20000265 Result: Down-regulated in Transcription
  misc_feature: MA Experiment 20000265 PARAMETER Experiment Name: At_Open_Flower_P Parameter: Age (day) Value: 21
  misc_feature: MA Experiment 20000265 PARAMETER Experiment Name: At_Open_Flower_P Parameter: Plant Line Value: WS
  misc_feature: MA Experiment 20000265 PARAMETER Experiment Name: At_Open_Flower_P Parameter: Tissue Value: Closed Flower vs. Whole Plant
  misc_feature: MA Experiment ID: 20000286 Result: Down-regulated in Transcription
  misc_feature: MA Experiment 20000286 PARAMETER Experiment Name: At_Open_Flower_P Parameter: Age (day) Value: 21
  misc_feature: MA Experiment 20000286 PARAMETER Experiment Name: At_Open_Flower_P Parameter: Plant Line Value: WS
  misc_feature: MA Experiment 20000286 PARAMETER Experiment Name: At_Open_Flower_P Parameter: Tissue Value: Half Open vs. Whole Plant
  misc_feature: MA Experiment ID: 20000438 Result: Down-regulated in Transcription
  misc_feature: MA Experiment 20000438 PARAMETER Experiment Name: At_Shoots__P Parameter: Age (day) Value: 14
  misc_feature: MA Experiment 20000438 PARAMETER Experiment Name: At_Shoots__P Parameter: Tissue Value: Shoots vs. Whole Plant
  misc_feature: MA Experiment ID: 20000441 Result: Down-regulated in Transcription
  misc_feature: MA Experiment 20000441 PARAMETER Experiment Name: At_1uM_BR-BRZ__P Parameter: Tissue Value: Shoot Apices
  misc_feature: MA Experiment 20000441 PARAMETER Experiment Name: At_1uM_BR-BRZ__P Parameter: Treatment Value: 1uM BR vs. No Treatment
  misc_feature: MA Experiment ID: 20000443 Result: Down-regulated in Transcription
  misc_feature: MA Experiment 20000443 PARAMETER Experiment Name: At_1uM_BR-BRZ__P Parameter: Tissue Value: Shoot Apices
  misc_feature: MA Experiment 20000443 PARAMETER Experiment Name: At_1uM_BR-BRZ__P Parameter: Treatment Value: 1uM BRZ vs. No Treatment
  misc_feature: MA Experiment ID: 20000445 Result: Down-regulated in Transcription
  misc_feature: MA Experiment 20000445 PARAMETER Experiment Name: At_100uM_NAA__P Parameter: Age (day) Value: 14
  misc_feature: MA Experiment 20000445 PARAMETER Experiment Name: At_100uM_NAA__P Parameter: Organism Value: A. thaliana
  misc_feature: MA Experiment 20000445 PARAMETER Experiment Name: At_100uM_NAA__P Parameter: Plant Line Value: WS
  misc_feature: MA Experiment 20000445 PARAMETER Experiment Name: At_100uM_NAA__P Parameter: Timepoint (hr) Value: 6
  misc_feature: MA Experiment 20000445 PARAMETER Experiment Name: At_100uM_NAA__P Parameter: Tissue Value: Aerial
  misc_feature: MA Experiment 20000445 PARAMETER Experiment Name: At_100uM_NAA__P Parameter: Treatment Value: 100uM NAA vs. No Treatment
  misc_feature: MA Experiment ID: 20000451 Result: Down-regulated in Transcription
  misc_feature: MA Experiment 20000451 PARAMETER Experiment Name: At_CS6879_Shoots-Roots_P Parameter: Age (day) Value: 14
  misc_feature: MA Experiment 20000451 PARAMETER Experiment Name: At_CS6879_Shoots-Roots_P Parameter: Organism Value: A. thaliana
  misc_feature: MA Experiment 20000451 PARAMETER Experiment Name: At_CS6879_Shoots-Roots_P Parameter: Plant Line Value: CS6879 vs. WS
  misc_feature: MA Experiment 20000451 PARAMETER Experiment Name: At_CS6879_Shoots-Roots_P Parameter: Tissue Value: Roots
  misc_feature: MA Experiment ID: 20000453 Result: Up-regulated in Transcription
  misc_feature: MA Experiment 20000453 PARAMETER Experiment Name: At_100uM_ABA_P Parameter: Age (day) Value: 15
  misc_feature: MA Experiment 20000453 PARAMETER Experiment Name: At_100uM_ABA_P Parameter: Organism Value: A. thaliana
  misc_feature: MA Experiment 20000453 PARAMETER Experiment Name: At_100uM_ABA_P Parameter: Plant Line Value: WS
  misc_feature: MA Experiment 20000453 PARAMETER Experiment Name: At_100uM_ABA_P Parameter: Timepoint (hr) Value: 24
  misc_feature: MA Experiment 20000453 PARAMETER Experiment Name: At_100uM_ABA_P Parameter: Tissue Value: Aerial
  misc_feature: MA Experiment 20000453 PARAMETER Experiment Name: At_100uM_ABA_P Parameter: Treatment Value: 100uM ABA vs. No Treatment
  misc_feature: MA Experiment ID: 20000495 Result: Up-regulated in Transcription
  misc_feature: MA Experiment 20000495 PARAMETER Experiment Name: At_Guard_Cells_P Parameter: Harvest Date Value: 8/2/2002
  misc_feature: MA Experiment 20000495 PARAMETER Experiment Name: At_Guard_Cells_P Parameter: Organism Value: A. thaliana
  misc_feature: MA Experiment 20000495 PARAMETER Experiment Name: At_Guard_Cells_P Parameter: Tissue Value: Guard Cells vs. Leaves
  misc_feature: MA Experiment ID: 20000794 Result: Down-regulated in Transcription
  misc_feature: MA Experiment 20000794 PARAMETER Experiment Name: At_Petals_P Parameter: Age (day) Value: 23-25 days
  misc_feature: MA Experiment 20000794 PARAMETER Experiment Name: At_Petals_P Parameter: Plant Line Value: WS
  misc_feature: MA Experiment 20000794 PARAMETER Experiment Name: At_Petals_P Parameter: Tissue Value: Petals vs. Whole plant
  misc_feature: MA Experiment ID: 20001248 Result: Down-regulated in Transcription
  misc_feature: MA Experiment 20001248 PARAMETER Experiment Name: At_Far-red-induction_P Parameter: Age (day) Value: 7
  misc_feature: MA Experiment 20001248 PARAMETER Experiment Name: At_Far-red-induction_P Parameter: Light Value: Far-red vs. White
  misc_feature: MA Experiment 20001248 PARAMETER Experiment Name: At_Far-red-induction_P Parameter: Organism Value: A. thaliana
  misc_feature: MA Experiment 20001248 PARAMETER Experiment Name: At_Far-red-induction_P Parameter: Plant Line Value: Columbia
  misc_feature: MA Experiment 20001248 PARAMETER Experiment Name: At_Far-red-induction_P Parameter: Timepoint (hr) Value: 4
  misc_feature: MA Experiment 20001248 PARAMETER Experiment Name: At_Far-red-induction_P Parameter: Tissue Value: Whole Plant
  misc_feature: MA Experiment ID: 20001450 Result: Down-regulated in Transcription
  misc_feature: MA Experiment 20001450 PARAMETER Experiment Name: At_Far-red-induction_P Parameter: Age (day) Value: 7
  misc_feature: MA Experiment 20001450 PARAMETER Experiment Name: At_Far-red-induction_P Parameter: Light Value: Far-red vs. White
  misc_feature: MA Experiment 20001450 PARAMETER Experiment Name: At_Far-red-induction_P Parameter: Organism Value: A. thaliana
  misc_feature: MA Experiment 20001450 PARAMETER Experiment Name: At_Far-red-induction_P Parameter: Plant Line Value: Columbia
  misc_feature: MA Experiment 20001450 PARAMETER Experiment Name: At_Far-red-induction_P Parameter: Timepoint (hr) Value: 8
  misc_feature: MA Experiment 20001450 PARAMETER Experiment Name: At_Far-red-induction_P Parameter: Tissue Value: Whole Plant
  misc_feature: MA Experiment ID: 20001451 Result: Up-regulated in Transcription
  misc_feature: MA Experiment 20001451 PARAMETER Experiment Name: At_Far-red-induction_P Parameter: Age (day) Value: 7
  misc_feature: MA Experiment 20001451 PARAMETER Experiment Name: At_Far-red-induction_P Parameter: Light Value: Far-red vs. White
  misc_feature: MA Experiment 20001451 PARAMETER Experiment Name: At_Far-red-induction_P Parameter: Organism Value: A. thaliana
  misc_feature: MA Experiment 20001451 PARAMETER Experiment Name: At_Far-red-induction_P Parameter: Plant Line Value: Columbia
  misc_feature: MA Experiment 20001451 PARAMETER Experiment Name: At_Far-red-induction_P Parameter: Timepoint (hr) Value: 24
  misc_feature: MA Experiment 20001451 PARAMETER Experiment Name: At_Far-red-induction_P Parameter: Tissue Value: Whole Plant
  misc_feature: MA Experiment ID: 20001458 Result: Up-regulated in Transcription
  misc_feature: MA Experiment 20001458 PARAMETER Experiment Name: At_50mM_NH4NO3_L-to-H_P Parameter: Age (day) Value: Undefined
  misc_feature: MA Experiment 20001458 PARAMETER Experiment Name: At_50mM_NH4NO3_L-to-H_P Parameter: Organism Value: Undefined
  misc_feature: MA Experiment 20001458 PARAMETER Experiment Name: At_50mM_NH4NO3_L-to-H_P Parameter: Plant Line Value: Undefined
  misc_feature: MA Experiment 20001458 PARAMETER Experiment Name: At_50mM_NH4NO3_L-to-H_P Parameter: Timepoint (hr) Value: 2
  misc_feature: MA Experiment 20001458 PARAMETER Experiment Name: At_50mM_NH4NO3_L-to-H_P Parameter: Tissue Value: Siliques
  misc_feature: MA Experiment 20001458 PARAMETER Experiment Name: At_50mM_NH4NO3_L-to-H_P Parameter: Treatment Value: 50mM NH4NO3 vs. 100mM Manitol
  misc_feature: MA Experiment ID: 20001557 Result: Up-regulated in Transcription
  misc_feature: MA Experiment 20001557 PARAMETER Experiment Name: At_Drought_Soil_Dry_P Parameter: Age (day) Value: 27
  misc_feature: MA Experiment 20001557 PARAMETER Experiment Name: At_Drought_Soil_Dry_P Parameter: Organism Value: A. thaliana
  misc_feature: MA Experiment 20001557 PARAMETER Experiment Name: At_Drought_Soil_Dry_P Parameter: Plant Line Value: WS
  misc_feature: MA Experiment 20001557 PARAMETER Experiment Name: At_Drought_Soil_Dry_P Parameter: Post Timepoint (hr) Value: 3
  misc_feature: MA Experiment 20001557 PARAMETER Experiment Name: At_Drought_Soil_Dry_P Parameter: Post-Treatment Value: Re-Water vs. No Drought
  misc_feature: MA Experiment 20001557 PARAMETER Experiment Name: At_Drought_Soil_Dry_P Parameter: Timepoint (day) Value: 13
  misc_feature: MA Experiment 20001557 PARAMETER Experiment Name: At_Drought_Soil_Dry_P Parameter: Treatment Value: Drought vs. No Drought
  misc_feature: MA Experiment ID: 20001560 Result: Up-regulated in Transcription
  misc_feature: MA Experiment 20001560 PARAMETER Experiment Name: At_Drought_Soil_Dry_P Parameter: Age (day) Value: 28
  misc_feature: MA Experiment 20001560 PARAMETER Experiment Name: At_Drought_Soil_Dry_P Parameter: Organism Value: A. thaliana
  misc_feature: MA Experiment 20001560 PARAMETER Experiment Name: At_Drought_Soil_Dry_P Parameter: Plant Line Value: WS
  misc_feature: MA Experiment 20001560 PARAMETER Experiment Name: At_Drought_Soil_Dry_P Parameter: Post Timepoint (hr) Value: None
  misc_feature: MA Experiment 20001560 PARAMETER Experiment Name: At_Drought_Soil_Dry_P Parameter: Post-Treatment Value: None
  misc_feature: MA Experiment 20001560 PARAMETER Experiment Name: At_Drought_Soil_Dry_P Parameter: Timepoint (day) Value: 14
  misc_feature: MA Experiment 20001560 PARAMETER Experiment Name: At_Drought_Soil_Dry_P Parameter: Treatment Value: Drought vs. No Drought
  misc_feature: MA Experiment ID: 20001757 Result: Up-regulated in Transcription
  misc_feature: MA Experiment 20001757 PARAMETER Experiment Name: At_50mM_NH4NO3_L-to-H_P Parameter: Timepoint (hr) Value: 6
  misc_feature: MA Experiment 20001757 PARAMETER Experiment Name: At_50mM_NH4NO3_L-to-H_P Parameter: Tissue Value: Leaf
  misc_feature: MA Experiment 20001757 PARAMETER Experiment Name: At_50mM_NH4NO3_L-to-H_P Parameter: Treatment Value: 50mM NH4NO3 vs 100mM Mannitol

SEQ ID NO: 34533 - protein, 274 aa, Arabidopsis thaliana; identical to SEQ ID NO: 30943
  peptide (1)..(274): Ceres Seq. ID no. 13579860
  misc_feature (61)..(130): Pfam Name: linker histone H1 and H5 family Pfam Description: linker histone H1 and H5 family
  misc_feature (61)..(130): Pfam Name: linker histone H1 and H5 family Pfam Description: linker histone H1 and H5 family
  misc_feature (1)..(274): Homolog of NCBI NO: 30420972 NR Description: histone H1 [Vicia hirsuta]
  misc_feature (12)..(274): Homolog of NCBI NO: 13540393 NR Description: histone H1 [Pisum sativum]
  misc_feature (10)..(274): Homolog of NCBI NO: 28301619 NR Description: histone H1 [Pisum sativum]
  misc_feature (25)..(271): Homolog of NCBI NO: 6681423 NR Description: histone H1 [Nicotiana tabacum]
  misc_feature (10)..(274): Homolog of NCBI NO: 29469895 NR Description: histone H1 subtype 5 [Pisum sativum]
  misc_feature (1)..(274): Homolog of NCBI NO: 30420972 NR Description: histone H1 [Vicia hirsuta]
  misc_feature (10)..(274): Homolog of NCBI NO: 28301619 NR Description: histone H1 [Pisum sativum]
  misc_feature (10)..(274): Homolog of NCBI NO: 29469895 NR Description: histone H1 subtype 5 [Pisum sativum]
  misc_feature (1)..(274): Homolog of NCBI NO: 15222199 NR Description: histone H1, putative [Arabidopsis thaliana]
  misc_feature (33)..(274): Homolog of NCBI NO: 16314 NR Description: histone H1-1 [Arabidopsis thaliana]
  misc_feature (4)..(274): Homolog of NCBI NO: 15224536 NR Description: histone H1 [Arabidopsis thaliana]
  misc_feature (25)..(271): Homolog of NCBI NO: 1084419 NR Description: histone H1 - common tobacco
  misc_feature (22)..(269): Homolog of NCBI NO: 121953 NR Description: HISTONE H1
  misc_feature (25)..(271): Homolog of NCBI NO: 6681423 NR Description: histone H1 [Nicotiana tabacum]
  misc_feature (12)..(274): Homolog of NCBI NO: 13540393 NR Description: histone H1 [Pisum sativum]
  misc_feature (22)..(269): Homolog of NCBI NO: 121953 NR Description: HISTONE H1
  misc_feature (25)..(271): Homolog of NCBI NO: 1084419 NR Description: histone H1 - common tobacco
  misc_feature (4)..(274): Homolog of NCBI NO: 15224536 NR Description: histone H1 [Arabidopsis thaliana]
  misc_feature (33)..(274): Homolog of NCBI NO: 16314 NR Description: histone H1-1 [Arabidopsis thaliana]
  misc_feature (1)..(274): Homolog of NCBI NO: 15222199 NR Description: histone H1, putative [Arabidopsis thaliana]

SEQ ID NO: 34534 - protein, 207 aa, Arabidopsis thaliana; identical to SEQ ID NO: 30944
  peptide (1)..(207): Ceres Seq. ID no. 13579861
  misc_feature (1)..(63): Pfam Name: linker histone H1 and H5 family Pfam Description: linker histone H1 and H5 family
  misc_feature (1)..(63): Pfam Name: linker histone H1 and H5 family Pfam Description: linker histone H1 and H5 family
  misc_feature (1)..(207): Homolog of NCBI NO: 30420972 NR Description: histone H1 [Vicia hirsuta]
  misc_feature (1)..(207): Homolog of NCBI NO: 13540393 NR Description: histone H1 [Pisum sativum]
  misc_feature (1)..(207): Homolog of NCBI NO: 28301619 NR Description: histone H1 [Pisum sativum]
  misc_feature (1)..(204): Homolog of NCBI NO: 6681423 NR Description: histone H1 [Nicotiana tabacum]
  misc_feature (1)..(207): Homolog of NCBI NO: 29469895 NR Description: histone H1 subtype 5 [Pisum sativum]
  misc_feature (1)..(207): Homolog of NCBI NO: 30420972 NR Description: histone H1 [Vicia hirsuta]
  misc_feature (1)..(207): Homolog of NCBI NO: 28301619 NR Description: histone H1 [Pisum sativum]
  misc_feature (1)..(207): Homolog of NCBI NO: 29469895 NR Description: histone H1 subtype 5 [Pisum sativum]
  misc_feature (1)..(207): Homolog of NCBI NO: 15222199 NR Description: histone H1, putative [Arabidopsis thaliana]
  misc_feature (1)..(207): Homolog of NCBI NO: 16314 NR Description: histone H1-1 [Arabidopsis thaliana]
  misc_feature (1)..(207): Homolog of NCBI NO: 15224536 NR Description: histone H1 [Arabidopsis thaliana]
  misc_feature (1)..(204): Homolog of NCBI NO: 1084419 NR Description: histone H1 - common tobacco
  misc_feature (1)..(202): Homolog of NCBI NO: 121953 NR Description: HISTONE H1
  misc_feature (1)..(204): Homolog of NCBI NO: 6681423 NR Description: histone H1 [Nicotiana tabacum]
  misc_feature (1)..(207): Homolog of NCBI NO: 13540393 NR Description: histone H1 [Pisum sativum]
  misc_feature (1)..(202): Homolog of NCBI NO: 121953 NR Description: HISTONE H1
  misc_feature (1)..(204): Homolog of NCBI NO: 1084419 NR Description: histone H1 - common tobacco
  misc_feature (1)..(207): Homolog of NCBI NO: 15224536 NR Description: histone H1 [Arabidopsis thaliana]
  misc_feature (1)..(207): Homolog of NCBI NO: 16314 NR Description: histone H1-1 [Arabidopsis thaliana]
  misc_feature (1)..(207): Homolog of NCBI NO: 15222199 NR Description: histone H1, putative [Arabidopsis thaliana]

SEQ ID NO: 34535 - protein, 156 aa, Arabidopsis thaliana; identical to SEQ ID NO: 30945
  peptide (1)..(156): Ceres Seq. ID no. 13579862
  misc_feature (29)..(153): Homolog of NCBI NO: 30696912 NR Description: expressed protein [Arabidopsis thaliana]
  misc_feature (1)..(156): Homolog of NCBI NO: 18400628 NR Description: expressed protein [Arabidopsis thaliana]
  misc_feature (29)..(153): Homolog of NCBI NO: 30696912 NR Description: expressed protein [Arabidopsis thaliana]
  misc_feature (1)..(156): Homolog of NCBI NO: 18400628 NR Description: expressed protein [Arabidopsis thaliana]

SEQ ID NO: 34536 - DNA, 641 bp, Arabidopsis thaliana; identical to SEQ ID NO: 30946
  misc_feature (1)..(641): Ceres Seq. ID no. 12420660
  misc_feature: MA Experiment ID: 108434 Result: Up-regulated in Transcription
  misc_feature: MA Experiment 108434 PARAMETER Experiment Name: At_Root_Tips_cDNA_P Parameter: Tissue Value: Root Tips
  misc_feature: MA Experiment ID: 20001911 Result: Down-regulated in Transcription
  misc_feature: MA Experiment 20001911 PARAMETER Experiment Name: At_Drought_Reproduction_P Parameter: Age (day) Value: 40
  misc_feature: MA Experiment 20001911 PARAMETER Experiment Name: At_Drought_Reproduction_P Parameter: Organism Value: A. thaliana
  misc_feature: MA Experiment 20001911 PARAMETER Experiment Name: At_Drought_Reproduction_P Parameter: Plant Line Value: WS
  misc_feature: MA Experiment 20001911 PARAMETER Experiment Name: At_Drought_Reproduction_P Parameter: Timepoint (day) Value: 10
  misc_feature: MA Experiment 20001911 PARAMETER Experiment Name: At_Drought_Reproduction_P Parameter: Tissue Value: Flowers
  misc_feature: MA Experiment 20001911 PARAMETER Experiment Name: At_Drought_Reproduction_P Parameter: Treatment Value: Drought vs. No Drought

SEQ ID NO: 34537 - protein, 132 aa, Arabidopsis thaliana; identical to SEQ ID NO: 30947
  peptide (1)..(132): Ceres Seq. ID no. 12420661
  misc_feature (40)..(131): Homolog of NCBI NO: 28461275 NR Description: NADH dehydrogenase (ubiquinone) 1 alpha
  misc_feature (40)..(131): Homolog of NCBI NO: 33086512 NR Description: Aa2-258 [Rattus norvegicus]
  misc_feature (40)..(127): Homolog of NCBI NO: 17946601 NR Description: RH23043p [Drosophila melanogaster]
  misc_feature (40)..(131): Homolog of NCBI NO: 27706932 NR Description: similar to RIKEN cDNA 0610033L03
  misc_feature (40)..(127): Homolog of NCBI NO: 24762701 NR Description: CG3683-PA [Drosophila melanogaster]
  misc_feature (40)..(127): Homolog of NCBI NO: 38048623 NR Description: similar to Drosophila melanogaster CG3683
  misc_feature (40)..(131): Homolog of NCBI NO: 7657369 NR Description: NADH dehydrogenase (ubiquinone) 1 alpha
  misc_feature (40)..(131): Homolog of NCBI NO: 37589679 NR Description: Unknown (protein for MGC:73139) [Danio rerio]
  misc_feature (28)..(132): Homolog of NCBI NO: 18397530 NR Description: expressed protein
  misc_feature (27)..(132): Homolog of NCBI NO: 15239564 NR Description: NADH:ubiquinone oxidoreductase - like protein

SEQ ID NO: 34538 - protein, 106 aa, Arabidopsis thaliana; identical to SEQ ID NO: 30948
  peptide (1)..(106): Ceres Seq. ID no. 12420662
  misc_feature (14)..(105): Homolog of NCBI NO: 28461275 NR Description: NADH dehydrogenase (ubiquinone) 1 alpha
  misc_feature (14)..(105): Homolog of NCBI NO: 33086512 NR Description: Aa2-258 [Rattus norvegicus]
  misc_feature (14)..(101): Homolog of NCBI NO: 17946601 NR Description: RH23043p [Drosophila melanogaster]
  misc_feature (14)..(105): Homolog of NCBI NO: 27706932 NR Description: similar to RIKEN cDNA 0610033L03
  misc_feature (14)..(101): Homolog of NCBI NO: 24762701 NR Description: CG3683-PA [Drosophila melanogaster]
  misc_feature (14)..(101): Homolog of NCBI NO: 38048623 NR Description: similar to Drosophila melanogaster CG3683
  misc_feature (14)..(105): Homolog of NCBI NO: 7657369 NR Description: NADH dehydrogenase (ubiquinone) 1 alpha
  misc_feature (14)..(105): Homolog of NCBI NO: 37589679 NR Description: Unknown (protein for MGC:73139) [Danio rerio]
  misc_feature (2)..(106): Homolog of NCBI NO: 18397530 NR Description: expressed protein
  misc_feature (1)..(106): Homolog of NCBI NO: 15239564 NR Description: NADH:ubiquinone oxidoreductase - like protein

SEQ ID NO: 34539 - protein, 80 aa, Arabidopsis thaliana; identical to SEQ ID NO: 30949
  peptide (1)..(80): Ceres Seq. ID no. 12420663
  misc_feature (1)..(79): Homolog of NCBI NO: 28461275 NR Description: NADH dehydrogenase (ubiquinone) 1 alpha
  misc_feature (1)..(79): Homolog of NCBI NO: 33086512 NR Description: Aa2-258 [Rattus norvegicus]
  misc_feature (1)..(75): Homolog of NCBI NO: 17946601 NR Description: RH23043p [Drosophila melanogaster]
  misc_feature (1)..(79): Homolog of NCBI NO: 27706932 NR Description: similar to RIKEN cDNA 0610033L03
  misc_feature (1)..(75): Homolog of NCBI NO: 24762701 NR Description: CG3683-PA [Drosophila melanogaster]
  misc_feature (1)..(75): Homolog of NCBI NO: 38048623 NR Description: similar to Drosophila melanogaster CG3683
  misc_feature (1)..(79): Homolog of NCBI NO: 7657369 NR Description: NADH dehydrogenase (ubiquinone) 1 alpha
  misc_feature (1)..(79): Homolog of NCBI NO: 37589679 NR Description: Unknown (protein for MGC:73139) [Danio rerio]
  misc_feature (1)..(80): Homolog of NCBI NO: 18397530 NR Description: expressed protein
  misc_feature (1)..(80): Homolog of NCBI NO: 15239564 NR Description: NADH:ubiquinone oxidoreductase - like protein

SEQ ID NO: 34540 - DNA, 908 bp, Arabidopsis thaliana; identical to SEQ ID NO: 30950
  misc_feature (1)..(908): Ceres Seq. ID no. 12396500
  misc_feature: MA Experiment ID: 108461 Result: Up-regulated in Transcription
  misc_feature: MA Experiment 108461 PARAMETER Experiment Name: At_Germinating_Seeds_cDNA_P Parameter: Age (day) Value: 1 vs. 0
  misc_feature: MA Experiment 108461 PARAMETER Experiment Name: At_Germinating_Seeds_cDNA_P Parameter: Tissue Value: Germinating Seeds
  misc_feature: MA Experiment ID: 108462 Result: Up-regulated in Transcription
  misc_feature: MA Experiment 108462 PARAMETER Experiment Name: At_Germinating_Seeds_cDNA_P Parameter: Age (day) Value: 2 vs. 0
  misc_feature: MA Experiment 108462 PARAMETER Experiment Name: At_Germinating_Seeds_cDNA_P Parameter: Tissue Value: Germinating Seeds
  misc_feature: MA Experiment ID: 108463 Result: Up-regulated in Transcription
  misc_feature: MA Experiment 108463 PARAMETER Experiment Name: At_Germinating_Seeds_cDNA_P Parameter: Age (day) Value: 3 vs. 0
  misc_feature: MA Experiment 108463 PARAMETER Experiment Name: At_Germinating_Seeds_cDNA_P Parameter: Tissue Value: Germinating Seeds
  misc_feature: MA Experiment ID: 108464 Result: Up-regulated in Transcription
  misc_feature: MA Experiment 108464 PARAMETER Experiment Name: At_Germinating_Seeds_cDNA_P Parameter: Age (day) Value: 4 vs. 0
  misc_feature: MA Experiment 108464 PARAMETER Experiment Name: At_Germinating_Seeds_cDNA_P Parameter: Tissue Value: Germinating Seeds
  misc_feature: MA Experiment ID: 108488 Result: Down-regulated in Transcription
  misc_feature: MA Experiment ID: 108595 Result: Up-regulated in Transcription
  misc_feature: MA Experiment 108595 PARAMETER Experiment Name: At_Ler-pi_Ovule_cDNA_P Parameter: Plant Line Value: null
  misc_feature: MA Experiment ID: 108667 Result: Up-regulated in Transcription
  misc_feature: MA Experiment 108667 PARAMETER Experiment Name: At_2mM_SA_cDNA_P Parameter: Plant Line Value: WS
  misc_feature: MA Experiment 108667 PARAMETER Experiment Name: At_2mM_SA_cDNA_P Parameter: Timepoint (hr) Value: 1
  misc_feature: MA Experiment 108667 PARAMETER Experiment Name: At_2mM_SA_cDNA_P Parameter: Treatment Value: 2mM SA vs. No Treatment
  misc_feature: MA Experiment ID: 20000089 Result: Up-regulated in Transcription
  misc_feature: MA Experiment ID: 20000173 Result: Down-regulated in Transcription
  misc_feature: MA Experiment 20000173 PARAMETER Experiment Name: At_42deg_Heat_P Parameter: Age (day) Value: 14
  misc_feature: MA Experiment 20000173 PARAMETER Experiment Name: At_42deg_Heat_P Parameter: Organism Value: A. thaliana
  misc_feature: MA Experiment 20000173 PARAMETER Experiment Name: At_42deg_Heat_P Parameter: Plant Line Value: WS
  misc_feature: MA Experiment 20000173 PARAMETER Experiment Name: At_42deg_Heat_P Parameter: Temperature (deg C) Value: 42 vs. 22
  misc_feature: MA Experiment 20000173 PARAMETER Experiment Name: At_42deg_Heat_P Parameter: Timepoint (hr) Value: 6
  misc_feature: MA Experiment 20000173 PARAMETER Experiment Name: At_42deg_Heat_P Parameter: Tissue Value: Aerial
  misc_feature: MA Experiment ID: 20000180 Result: Up-regulated in Transcription
  misc_feature: MA Experiment 20000180 PARAMETER Experiment Name: At_Germinating_Seeds_P Parameter: Age (hr) Value: 24 vs. 0
  misc_feature: MA Experiment 20000180 PARAMETER Experiment Name: At_Germinating_Seeds_P Parameter: Tissue Value: Germinating Seeds
  misc_feature: MA Experiment ID: 20000182 Result: Up-regulated in Transcription
  misc_feature: MA Experiment 20000182 PARAMETER Experiment Name: At_2mM_SA_P Parameter: Age (day) Value: 14
  misc_feature: MA Experiment 20000182 PARAMETER Experiment Name: At_2mM_SA_P Parameter: Organism Value: A. thaliana
  misc_feature: MA Experiment 20000182 PARAMETER Experiment Name: At_2mM_SA_P Parameter: Plant Line Value: WS
  misc_feature: MA Experiment 20000182 PARAMETER Experiment Name: At_2mM_SA_P Parameter: Timepoint (hr) Value: 6
  misc_feature: MA Experiment 20000182 PARAMETER Experiment Name: At_2mM_SA_P Parameter: Tissue Value: Aerial
  misc_feature: MA Experiment 20000182 PARAMETER Experiment Name: At_2mM_SA_P Parameter: Treatment Value: 2mM SA vs. No Treatment
  misc_feature: MA Experiment ID: 20000185 Result: Up-regulated in Transcription
  misc_feature: MA Experiment 20000185 PARAMETER Experiment Name: At_Roots__P Parameter: Age (day) Value: 7 vs. 21
  misc_feature: MA Experiment 20000185 PARAMETER Experiment Name: At_Roots__P Parameter: Organism Value: A. thaliana
  misc_feature: MA Experiment 20000185 PARAMETER Experiment Name: At_Roots__P Parameter: Tissue Value: Roots vs. Whole Plant
  misc_feature: MA Experiment ID: 20000224 Result: Up-regulated in Transcription
  misc_feature: MA Experiment ID: 20000227 Result: Up-regulated in Transcription
  misc_feature: MA Experiment 20000227 PARAMETER Experiment Name: At_Root-Tips-vs-Tops_P Parameter: Tissue Value: Root Tips vs. Root Tops
  misc_feature: MA Experiment ID: 20000234 Result: Up-regulated in Transcription
  misc_feature: MA Experiment 20000234 PARAMETER Experiment Name: At_Siliques_P Parameter: Age (day) Value: 21
  misc_feature: MA Experiment 20000234 PARAMETER Experiment Name: At_Siliques_P Parameter: Organism Value: A. thaliana
  misc_feature: MA Experiment 20000234 PARAMETER Experiment Name: At_Siliques_P Parameter: Plant Line Value: WS
  misc_feature: MA Experiment 20000234 PARAMETER Experiment Name: At_Siliques_P Parameter: Tissue Value: Less Than 5mm Siliques vs. Whole Plant
  misc_feature: MA Experiment ID: 20000264 Result: Up-regulated in Transcription
  misc_feature: MA Experiment 20000264 PARAMETER Experiment Name: At_Open_Flower_P Parameter: Age (day) Value: 21
  misc_feature: MA Experiment 20000264 PARAMETER Experiment Name: At_Open_Flower_P Parameter: Plant Line Value: WS
  misc_feature: MA Experiment 20000264 PARAMETER Experiment Name: At_Open_Flower_P Parameter: Tissue Value: Open Flower vs. Whole Plant
  misc_feature: MA Experiment ID: 20000437 Result: Down-regulated in Transcription
  misc_feature: MA Experiment 20000437 PARAMETER Experiment Name: At_Drought_P Parameter: Age (day) Value: 8
  misc_feature: MA Experiment 20000437 PARAMETER Experiment Name: At_Drought_P Parameter: Organism Value: A. thaliana
  misc_feature: MA Experiment 20000437 PARAMETER Experiment Name: At_Drought_P Parameter: Plant Line Value: WS
  misc_feature: MA Experiment 20000437 PARAMETER Experiment Name: At_Drought_P Parameter: Timepoint (hr) Value: 24
  misc_feature: MA Experiment 20000437 PARAMETER Experiment Name: At_Drought_P Parameter: Tissue Value: Whole Plant
  misc_feature: MA Experiment 20000437 PARAMETER Experiment Name: At_Drought_P Parameter: Treatment Value: Drought vs. No Drought
  misc_feature: MA Experiment ID: 20000439 Result: Up-regulated in Transcription
  misc_feature: MA Experiment 20000439 PARAMETER Experiment Name: At_Roots__P Parameter: Age (day) Value: 14 vs. 21
  misc_feature: MA Experiment 20000439 PARAMETER Experiment Name: At_Roots__P Parameter: Organism Value: A. thaliana
  misc_feature: MA Experiment 20000439 PARAMETER Experiment Name: At_Roots__P Parameter: Tissue Value: Roots vs. Whole Plant
  misc_feature: MA Experiment ID: 20000495 Result: Up-regulated in Transcription
  misc_feature: MA Experiment 20000495 PARAMETER Experiment Name: At_Guard_Cells_P Parameter: Harvest Date Value: 8/2/2002
  misc_feature: MA Experiment 20000495 PARAMETER Experiment Name: At_Guard_Cells_P Parameter: Organism Value: A. thaliana
  misc_feature: MA Experiment 20000495 PARAMETER Experiment Name: At_Guard_Cells_P Parameter: Tissue Value: Guard Cells vs. Leaves
  misc_feature: MA Experiment ID: 20000527 Result: Down-regulated in Transcription
  misc_feature: MA Experiment 20000527 PARAMETER Experiment Name: At_10percent_PEG_P Parameter: Age (day) Value: 20
  misc_feature: MA Experiment 20000527 PARAMETER Experiment Name: At_10percent_PEG_P Parameter: Organism Value: A. thaliana
  misc_feature: MA Experiment 20000527 PARAMETER Experiment Name: At_10percent_PEG_P Parameter: Plant Line Value: WS
  misc_feature: MA Experiment 20000527 PARAMETER Experiment Name: At_10percent_PEG_P Parameter: Timepoint (day) Value: 20
  misc_feature: MA Experiment 20000527 PARAMETER Experiment Name: At_10percent_PEG_P Parameter: Tissue Value: Whole Plant
  misc_feature: MA Experiment 20000527 PARAMETER Experiment Name: At_10percent_PEG_P Parameter: Treatment Value: 10percent PEG vs. No Treatment
  misc_feature: MA Experiment ID: 20000709 Result: Up-regulated in Transcription
  misc_feature: MA Experiment 20000709 PARAMETER Experiment Name: At_15mM_NH4NO3_L-to-H_P Parameter: Age (hr) Value: 14
  misc_feature: MA Experiment 20000709 PARAMETER Experiment Name: At_15mM_NH4NO3_L-to-H_P Parameter: Organism Value: A. thaliana
  misc_feature: MA Experiment 20000709 PARAMETER Experiment Name: At_15mM_NH4NO3_L-to-H_P Parameter: Plant Line Value: WS
  misc_feature: MA Experiment 20000709 PARAMETER Experiment Name: At_15mM_NH4NO3_L-to-H_P Parameter: Timepoint (hr) Value: 4
  misc_feature: MA Experiment 20000709 PARAMETER Experiment Name: At_15mM_NH4NO3_L-to-H_P Parameter: Tissue Value: Aerial
  misc_feature: MA Experiment 20000709 PARAMETER Experiment Name: At_15mM_NH4NO3_L-to-H_P Parameter: Treatment Value: 15mM NH4NO3 vs. 30mM Mannitol
  misc_feature: MA Experiment ID: 20000794 Result: Up-regulated in Transcription
  misc_feature: MA Experiment 20000794 PARAMETER Experiment Name: At_Petals_P Parameter: Age (day) Value: 23-25 days
  misc_feature: MA Experiment 20000794 PARAMETER Experiment Name: At_Petals_P Parameter: Plant Line Value: WS
  misc_feature: MA Experiment 20000794 PARAMETER Experiment Name: At_Petals_P Parameter: Tissue Value: Petals vs. Whole plant
  misc_feature: MA Experiment ID: 20001557 Result: Up-regulated in Transcription
  misc_feature: MA Experiment 20001557 PARAMETER Experiment Name: At_Drought_Soil_Dry_P Parameter: Age (day) Value: 27
  misc_feature: MA Experiment 20001557 PARAMETER Experiment Name: At_Drought_Soil_Dry_P Parameter: Organism Value: A. thaliana
  misc_feature: MA Experiment 20001557 PARAMETER Experiment Name: At_Drought_Soil_Dry_P Parameter: Plant Line Value: WS
  misc_feature: MA Experiment 20001557 PARAMETER Experiment Name: At_Drought_Soil_Dry_P Parameter: Post Timepoint (hr) Value: 3
  misc_feature: MA Experiment 20001557 PARAMETER Experiment Name: At_Drought_Soil_Dry_P Parameter: Post-Treatment Value: Re-Water vs. No Drought
  misc_feature: MA Experiment 20001557 PARAMETER Experiment Name: At_Drought_Soil_Dry_P Parameter: Timepoint (day) Value: 13
  misc_feature: MA Experiment 20001557 PARAMETER Experiment Name: At_Drought_Soil_Dry_P Parameter: Treatment Value: Drought vs. No Drought
  misc_feature: MA Experiment ID: 20001560 Result: Up-regulated in Transcription
  misc_feature: MA Experiment 20001560 PARAMETER Experiment Name: At_Drought_Soil_Dry_P Parameter: Age (day) Value: 28
  misc_feature: MA Experiment 20001560 PARAMETER Experiment Name: At_Drought_Soil_Dry_P Parameter: Organism Value: A. thaliana
  misc_feature: MA Experiment 20001560 PARAMETER Experiment Name: At_Drought_Soil_Dry_P Parameter: Plant Line Value: WS
  misc_feature: MA Experiment 20001560 PARAMETER Experiment Name: At_Drought_Soil_Dry_P Parameter: Post Timepoint (hr) Value: None
  misc_feature: MA Experiment 20001560 PARAMETER Experiment Name: At_Drought_Soil_Dry_P Parameter: Post-Treatment Value: None
  misc_feature: MA Experiment 20001560 PARAMETER Experiment Name: At_Drought_Soil_Dry_P Parameter: Timepoint (day) Value: 14
  misc_feature: MA Experiment 20001560 PARAMETER Experiment Name: At_Drought_Soil_Dry_P Parameter: Treatment Value: Drought vs. No Drought
  misc_feature: MA Experiment ID: 20001757 Result: Down-regulated in Transcription
  misc_feature: MA Experiment 20001757 PARAMETER Experiment Name: At_50mM_NH4NO3_L-to-H_P Parameter: Timepoint (hr) Value: 6
  misc_feature: MA Experiment 20001757 PARAMETER Experiment Name: At_50mM_NH4NO3_L-to-H_P Parameter: Tissue Value: Leaf
  misc_feature: MA Experiment 20001757 PARAMETER Experiment Name: At_50mM_NH4NO3_L-to-H_P Parameter: Treatment Value: 50mM NH4NO3 vs 100mM Mannitol

SEQ ID NO: 34541 - protein, 276 aa, Arabidopsis thaliana; identical to SEQ ID NO: 30951
  peptide (1)..(276): Ceres Seq. ID no. 12396501
  misc_feature (16)..(274): Homolog of NCBI NO: 15227331 NR Description: putative embryo-abundant protein
  misc_feature (16)..(261): Homolog of NCBI NO: 34912212 NR Description: P0415C01.8 [Oryza sativa (japonica
  misc_feature (16)..(276): Homolog of NCBI NO: 34910604 NR Description: putative embryonic abundant protein-like
  misc_feature (15)..(274): Homolog of NCBI NO: 15233061 NR Description: putative protein; protein id: At3g61210.1
  misc_feature (16)..(274): Homolog of NCBI NO: 18405387 NR Description: expressed protein
  misc_feature (16)..(274): Homolog of NCBI NO: 15232436 NR Description: embryonic abundant protein -like
  misc_feature (16)..(274): Homolog of NCBI NO: 21594033 NR Description: embryonic abundant protein-like [Arabidopsis
  misc_feature (40)..(274): Homolog of NCBI NO: 20258825 NR Description: unknown protein [Arabidopsis thaliana]
  misc_feature (16)..(274): Homolog of NCBI NO: 15235684 NR Description: putative protein; protein id: At4g22530.1
  misc_feature (16)..(276): Homolog of NCBI NO: 15238280 NR Description: embryonic abundant protein -like; protein id:

SEQ ID NO: 34542 - protein, 261 aa, Arabidopsis thaliana; identical to SEQ ID NO: 30952
  peptide (1)..(261): Ceres Seq. ID no. 12396502
  misc_feature (1)..(259): Homolog of NCBI NO: 15227331 NR Description: putative embryo-abundant protein
  misc_feature (1)..(246): Homolog of NCBI NO: 34912212 NR Description: P0415C01.8 [Oryza sativa (japonica
  misc_feature (1)..(261): Homolog of NCBI NO: 34910604 NR Description: putative embryonic abundant protein-like
  misc_feature (1)..(259): Homolog of NCBI NO: 15233061 NR Description: putative protein; protein id: At3g61210.1
  misc_feature (1)..(259): Homolog of NCBI NO: 18405387 NR Description: expressed protein
  misc_feature (1)..(259): Homolog of NCBI NO: 15232436 NR Description: embryonic abundant protein -like
  misc_feature (1)..(259): Homolog of NCBI NO: 21594033 NR Description: embryonic abundant protein-like [Arabidopsis
  misc_feature (25)..(259): Homolog of NCBI NO: 20258825 NR Description: unknown protein [Arabidopsis thaliana]
  misc_feature (1)..(259): Homolog of NCBI NO: 15235684 NR Description: putative protein; protein id: At4g22530.1
  misc_feature (1)..(261): Homolog of NCBI NO: 15238280 NR Description: embryonic abundant protein -like; protein id:

SEQ ID NO: 34543 - protein, 176 aa, Arabidopsis thaliana; identical to SEQ ID NO: 30953
  peptide (1)..(176): Ceres Seq. ID no. 12396503
  misc_feature (1)..(174): Homolog of NCBI NO: 15227331 NR Description: putative embryo-abundant protein
  misc_feature (1)..(161): Homolog of NCBI NO: 34912212 NR Description: P0415C01.8 [Oryza sativa (japonica
  misc_feature (1)..(176): Homolog of NCBI NO: 34910604 NR Description: putative embryonic abundant protein-like
  misc_feature (1)..(174): Homolog of NCBI NO: 15233061 NR Description: putative protein; protein id: At3g61210.1
  misc_feature (1)..(174): Homolog of NCBI NO: 18405387 NR Description: expressed protein
  misc_feature (1)..(174): Homolog of NCBI NO: 15232436 NR Description: embryonic abundant protein -like
  misc_feature (1)..(174): Homolog of NCBI NO: 21594033 NR Description: embryonic abundant protein-like [Arabidopsis
  misc_feature (1)..(174): Homolog of NCBI NO: 20258825 NR Description: unknown protein [Arabidopsis thaliana]
  misc_feature (1)..(174): Homolog of NCBI NO: 15235684 NR Description: putative protein; protein id: At4g22530.1
  misc_feature (1)..(176): Homolog of NCBI NO: 15238280 NR Description: embryonic abundant protein -like; protein id:

SEQ ID NO: 34544 - DNA, 1300 bp, Arabidopsis thaliana; identical to SEQ ID NO: 30954
  misc_feature (1)..(1300): Ceres Seq. ID no. 12326352
  misc_feature: MA Experiment ID: 108501 Result: Down-regulated in Transcription
  misc_feature: MA Experiment 108501 PARAMETER Experiment Name: At_ap2_floral_buds_cDNA_P Parameter: Plant Line Value: ap2 (Ler.)
  misc_feature: MA Experiment 108501 PARAMETER Experiment Name: At_ap2_floral_buds_cDNA_P Parameter: Tissue Value: Closed Flower
  misc_feature: MA Experiment ID: 20000286 Result: Up-regulated in Transcription
  misc_feature: MA Experiment 20000286 PARAMETER Experiment Name: At_Open_Flower_P Parameter: Age (day) Value: 21
  misc_feature: MA Experiment 20000286 PARAMETER Experiment Name: At_Open_Flower_P Parameter: Plant Line Value: WS
  misc_feature: MA Experiment 20000286 PARAMETER Experiment Name: At_Open_Flower_P Parameter: Tissue Value: Half Open vs. Whole Plant
  misc_feature: MA Experiment ID: 20000709 Result: Down-regulated in Transcription
  misc_feature: MA Experiment 20000709 PARAMETER Experiment Name: At_15mM_NH4NO3_L-to-H_P Parameter: Age (hr) Value: 14
  misc_feature: MA Experiment 20000709 PARAMETER Experiment Name: At_15mM_NH4NO3_L-to-H_P Parameter: Organism Value: A. thaliana
  misc_feature: MA Experiment 20000709 PARAMETER Experiment Name: At_15mM_NH4NO3_L-to-H_P Parameter: Plant Line Value: WS
  misc_feature: MA Experiment 20000709 PARAMETER Experiment Name: At_15mM_NH4NO3_L-to-H_P Parameter: Timepoint (hr) Value: 4
  misc_feature: MA Experiment 20000709 PARAMETER Experiment Name: At_15mM_NH4NO3_L-to-H_P Parameter: Tissue Value: Aerial
  misc_feature: MA Experiment 20000709 PARAMETER Experiment Name: At_15mM_NH4NO3_L-to-H_P Parameter: Treatment Value: 15mM NH4NO3 vs. 30mM Mannitol
  misc_feature: MA Experiment ID: 20001910 Result: Down-regulated in Transcription
  misc_feature: MA Experiment 20001910 PARAMETER Experiment Name: At_Drought_Reproduction_P Parameter: Age (day) Value: 37
  misc_feature: MA Experiment 20001910 PARAMETER Experiment Name: At_Drought_Reproduction_P Parameter: Organism Value: A. thaliana
  misc_feature: MA Experiment 20001910 PARAMETER Experiment Name: At_Drought_Reproduction_P Parameter: Plant Line Value: WS
  misc_feature: MA Experiment 20001910 PARAMETER Experiment Name: At_Drought_Reproduction_P Parameter: Timepoint (day) Value: 7
  misc_feature: MA Experiment 20001910 PARAMETER Experiment Name: At_Drought_Reproduction_P Parameter: Tissue Value: Flowers
  misc_feature: MA Experiment 20001910 PARAMETER Experiment Name: At_Drought_Reproduction_P Parameter: Treatment Value: Drought vs. No Drought

SEQ ID NO: 34545 - protein, 296 aa, Arabidopsis thaliana; identical to SEQ ID NO: 30955
  peptide (1)..(296): Ceres Seq. ID no. 12326353
  misc_feature (4)..(230): Pfam Name: Chalcone and stilbene synthases, N-terminal domain Pfam Description: Chalcone and stilbene synthases, N-terminal
  misc_feature (4)..(296): Homolog of NCBI NO: 15236691 NR Description: putative chalcone synthase
  misc_feature (4)..(296): Homolog of NCBI NO: 21554288 NR Description: putative chalcone synthase [Arabidopsis thaliana]
  misc_feature (10)..(259): Homolog of NCBI NO: 7433785 NR Description: chalcone synthase homolog - rice
  misc_feature (10)..(259): Homolog of NCBI NO: 37535500 NR Description: anther-specific protein YY2
  misc_feature (25)..(256): Homolog of NCBI NO: 7433783 NR Description: anther-specific protein - wood tobacco
  misc_feature (11)..(256): Homolog of NCBI NO: 15217605 NR Description: unknown protein; protein id: At1g02050.1
  misc_feature (2)..(256): Homolog of NCBI NO: 7433790 NR Description: chalcone synthase homolog ChS1 - Monterey pine
  misc_feature (2)..(256): Homolog of NCBI NO: 34902722 NR Description: putative chalcone synthase
  misc_feature (1)..(256): Homolog of NCBI NO: 7433787 NR Description: anther-specific protein homolog T11I11.90 -
  misc_feature (1)..(256): Homolog of NCBI NO: 18418528 NR Description: chalcone synthase - like protein
  misc_feature (262)..(262): Xaa is any aa, unknown or other

SEQ ID NO: 34546 - protein, 262 aa, Arabidopsis thaliana; identical to SEQ ID NO: 30956
  peptide (1)..(262): Ceres Seq. ID no. 12326354
  misc_feature (1)..(196): Pfam Name: Chalcone and stilbene synthases, N-terminal domain Pfam Description: Chalcone and stilbene synthases, N-terminal
  misc_feature (1)..(262): Homolog of NCBI NO: 15236691 NR Description: putative chalcone synthase
  misc_feature (1)..(262): Homolog of NCBI NO: 21554288 NR Description: putative chalcone synthase [Arabidopsis thaliana]
  misc_feature (1)..(225): Homolog of NCBI NO: 7433785 NR Description: chalcone synthase homolog - rice
  misc_feature (1)..(225): Homolog of NCBI NO: 37535500 NR Description: anther-specific protein YY2
  misc_feature (1)..(222): Homolog of NCBI NO: 7433783 NR Description: anther-specific protein - wood tobacco
  misc_feature (1)..(222): Homolog of NCBI NO: 15217605 NR Description: unknown protein; protein id: At1g02050.1
  misc_feature (1)..(222): Homolog of NCBI NO: 7433790 NR Description: chalcone synthase homolog ChS1 - Monterey pine
  misc_feature (1)..(222): Homolog of NCBI NO: 34902722 NR Description: putative chalcone synthase
  misc_feature (1)..(222): Homolog of NCBI NO: 7433787 NR Description: anther-specific protein homolog T11I11.90 -
  misc_feature (1)..(222): Homolog of NCBI NO: 18418528 NR Description: chalcone synthase - like protein
  misc_feature (228)..(228): Xaa is any aa, unknown or other

SEQ ID NO: 34547 - protein, 223 aa, Arabidopsis thaliana; identical to SEQ ID NO: 30957
  peptide (1)..(223): Ceres Seq. ID no. 12326355
  misc_feature (1)..(157): Pfam Name: Chalcone and stilbene synthases, N-terminal domain Pfam Description: Chalcone and stilbene synthases, N-terminal
  misc_feature (1)..(223): Homolog of NCBI NO: 15236691 NR Description: putative chalcone synthase
  misc_feature (1)..(223): Homolog of NCBI NO: 21554288 NR Description: putative chalcone synthase [Arabidopsis thaliana]
  misc_feature (1)..(186): Homolog of NCBI NO: 7433785 NR Description: chalcone synthase homolog - rice
  misc_feature (1)..(186): Homolog of NCBI NO: 37535500 NR Description: anther-specific protein YY2
  misc_feature (1)..(183): Homolog of NCBI NO: 7433783 NR Description: anther-specific protein - wood tobacco
  misc_feature (1)..(183): Homolog of NCBI NO: 15217605 NR Description: unknown protein; protein id: At1g02050.1
  misc_feature (1)..(183): Homolog of NCBI NO: 7433790 NR Description: chalcone synthase homolog ChS1 - Monterey pine
  misc_feature (1)..(183): Homolog of NCBI NO: 34902722 NR Description: putative chalcone synthase
  misc_feature (1)..(183): Homolog of NCBI NO: 7433787 NR Description: anther-specific protein homolog T11I11.90 -
  misc_feature (1)..(183): Homolog of NCBI NO: 18418528 NR Description: chalcone synthase - like protein
  misc_feature (189)..(189): Xaa is any aa, unknown or other

SEQ ID NO: 34548 - DNA, 1512 bp, Arabidopsis thaliana; identical to SEQ ID NO: 30958
  misc_feature (1)..(1512): Ceres Seq. ID no. 13591994
  misc_feature: MA Experiment ID: 108461 Result: Up-regulated in Transcription
  misc_feature: MA Experiment 108461 PARAMETER Experiment Name: At_Germinating_Seeds_cDNA_P Parameter: Age (day) Value: 1 vs. 0
  misc_feature: MA Experiment 108461 PARAMETER Experiment Name: At_Germinating_Seeds_cDNA_P Parameter: Tissue Value: Germinating Seeds
  misc_feature: MA Experiment ID: 20000173 Result: Down-regulated in Transcription
  misc_feature: MA Experiment 20000173 PARAMETER Experiment Name: At_42deg_Heat_P Parameter: Age (day) Value: 14
  misc_feature: MA Experiment 20000173 PARAMETER Experiment Name: At_42deg_Heat_P Parameter: Organism Value: A. thaliana
  misc_feature: MA Experiment 20000173 PARAMETER Experiment Name: At_42deg_Heat_P Parameter: Plant Line Value: WS
  misc_feature: MA Experiment 20000173 PARAMETER Experiment Name: At_42deg_Heat_P Parameter: Temperature (deg C) Value: 42 vs. 22
  misc_feature: MA Experiment 20000173 PARAMETER Experiment Name: At_42deg_Heat_P Parameter: Timepoint (hr) Value: 6
  misc_feature: MA Experiment 20000173 PARAMETER Experiment Name: At_42deg_Heat_P Parameter: Tissue Value: Aerial
  misc_feature: MA Experiment ID: 20000180 Result: Up-regulated in Transcription
  misc_feature: MA Experiment 20000180 PARAMETER Experiment Name: At_Germinating_Seeds_P Parameter: Age (hr) Value: 24 vs. 0
  misc_feature: MA Experiment 20000180 PARAMETER Experiment Name: At_Germinating_Seeds_P Parameter: Tissue Value: Germinating Seeds
  misc_feature: MA Experiment ID: 20000185 Result: Down-regulated in Transcription
  misc_feature: MA Experiment 20000185 PARAMETER Experiment Name: At_Roots__P Parameter: Age (day) Value: 7 vs. 21
  misc_feature: MA Experiment 20000185 PARAMETER Experiment Name: At_Roots__P Parameter: Organism Value: A. thaliana
  misc_feature: MA Experiment 20000185 PARAMETER Experiment Name: At_Roots__P Parameter: Tissue Value: Roots vs. Whole Plant
  misc_feature: MA Experiment ID: 20000224 Result: Down-regulated in Transcription
  misc_feature: MA Experiment ID: 20000439 Result: Down-regulated in Transcription
  misc_feature: MA Experiment 20000439 PARAMETER Experiment Name: At_Roots__P Parameter: Age (day) Value: 14 vs. 21
  misc_feature: MA Experiment 20000439 PARAMETER Experiment Name: At_Roots__P Parameter: Organism Value: A. thaliana
  misc_feature: MA Experiment 20000439 PARAMETER Experiment Name: At_Roots__P Parameter: Tissue Value: Roots vs. Whole Plant
  misc_feature: MA Experiment ID: 20000573 Result: Down-regulated in Transcription
  misc_feature: MA Experiment 20000573 PARAMETER Experiment Name: At_100uM_ABA_Mutants__P Parameter: Organism Value: A. thaliana
  misc_feature: MA Experiment 20000573 PARAMETER Experiment Name: At_100uM_ABA_Mutants__P Parameter: Plant Line Value: CS22 vs. Ler wt
  misc_feature: MA Experiment 20000573 PARAMETER Experiment Name: At_100uM_ABA_Mutants__P Parameter: Timepoint (hr) Value: N/A
  misc_feature: MA Experiment 20000573 PARAMETER Experiment Name: At_100uM_ABA_Mutants__P Parameter: Tissue Value: Whole Plant
  misc_feature: MA Experiment 20000573 PARAMETER Experiment Name: At_100uM_ABA_Mutants__P Parameter: Treatment Value: None
  misc_feature: MA Experiment ID: 20000794 Result: Down-regulated in Transcription
  misc_feature: MA Experiment 20000794 PARAMETER Experiment Name: At_Petals_P Parameter: Age (day) Value: 23-25 days
  misc_feature: MA Experiment 20000794 PARAMETER Experiment Name: At_Petals_P Parameter: Plant Line Value: WS
  misc_feature: MA Experiment 20000794 PARAMETER Experiment Name: At_Petals_P Parameter: Tissue Value: Petals vs. Whole plant
  misc_feature: MA Experiment ID: 20001906 Result: Down-regulated in Transcription
  misc_feature: MA Experiment 20001906 PARAMETER Experiment Name: At_Drought_Reproduction_P Parameter: Age (day) Value: 35
  misc_feature: MA Experiment 20001906 PARAMETER Experiment Name: At_Drought_Reproduction_P Parameter: Organism Value: A. thaliana
  misc_feature: MA Experiment 20001906 PARAMETER Experiment Name: At_Drought_Reproduction_P Parameter: Plant Line Value: WS
  misc_feature: MA Experiment 20001906 PARAMETER Experiment Name: At_Drought_Reproduction_P Parameter: Timepoint (day) Value: 5
  misc_feature: MA Experiment 20001906 PARAMETER Experiment Name: At_Drought_Reproduction_P Parameter: Tissue Value: Siliques
  misc_feature: MA Experiment 20001906 PARAMETER Experiment Name: At_Drought_Reproduction_P Parameter: Treatment Value: Drought vs. No Drought
  misc_feature: MA Experiment ID: 20001911 Result: Down-regulated in Transcription
  misc_feature: MA Experiment 20001911 PARAMETER Experiment Name: At_Drought_Reproduction_P Parameter: Age (day) Value: 40
  misc_feature: MA Experiment 20001911 PARAMETER Experiment Name: At_Drought_Reproduction_P Parameter: Organism Value: A. thaliana
  misc_feature: MA Experiment 20001911 PARAMETER Experiment Name: At_Drought_Reproduction_P Parameter: Plant Line Value: WS
  misc_feature: MA Experiment 20001911 PARAMETER Experiment Name: At_Drought_Reproduction_P Parameter: Timepoint (day) Value: 10
  misc_feature: MA Experiment 20001911 PARAMETER Experiment Name: At_Drought_Reproduction_P Parameter: Tissue Value: Flowers
  misc_feature: MA Experiment 20001911 PARAMETER Experiment Name: At_Drought_Reproduction_P Parameter: Treatment Value: Drought vs. No Drought

SEQ ID NO: 34549 - protein, 325 aa, Arabidopsis thaliana; identical to SEQ ID NO: 30959
  peptide (1)..(325): Ceres Seq. ID no. 13591995
  misc_feature (41)..(228): Pfam Name: TCP family transcription factor Pfam Description: TCP family transcription factor
  misc_feature (41)..(228): Pfam Name: TCP family transcription factor Pfam Description: TCP family transcription factor
  misc_feature (26)..(138): Homolog of NCBI NO: 26452377 NR Description: unknown protein [Arabidopsis thaliana]
  misc_feature (26)..(138): Homolog of NCBI NO: 15237274 NR Description: TCP family transcription factor, putative
  misc_feature (52)..(176): Homolog of NCBI NO: 20975251 NR Description: transcription factor PCF3 [Oryza sativa (japonica
  misc_feature (16)..(160): Homolog of NCBI NO: 15217857 NR Description: TCP family transcription factor, putative
  misc_feature (20)..(183): Homolog of NCBI NO: 15218305 NR Description: TCP family transcription factor, putative
  misc_feature (26)..(138): Homolog of NCBI NO: 26452377 NR Description: unknown protein [Arabidopsis thaliana]
  misc_feature (52)..(176): Homolog of NCBI NO: 20975251 NR Description: transcription factor PCF3 [Oryza sativa (japonica
  misc_feature (20)..(183): Homolog of NCBI NO: 15218305 NR Description: TCP family transcription factor, putative
  misc_feature (1)..(325): Homolog of NCBI NO: 18409345 NR Description: TCP family transcription factor, putative
  misc_feature (13)..(175): Homolog of NCBI NO: 5731257 NR Description: auxin-induced basic helix-loop-helix
  misc_feature (7)..(160): Homolog of NCBI NO: 11357581 NR Description: hypothetical protein F1P2.170 - Arabidopsis
  misc_feature (7)..(160): Homolog of NCBI NO: 22331641 NR Description: TCP family transcription factor, putative
  misc_feature (21)..(244): Homolog of NCBI NO: 15219640 NR Description: TCP family transcription factor, putative
  misc_feature (16)..(160): Homolog of NCBI NO: 15217857 NR Description: TCP family transcription factor, putative
  misc_feature (26)..(138): Homolog of NCBI NO: 15237274 NR Description: TCP family transcription factor, putative
  misc_feature (21)..(244): Homolog of NCBI NO: 15219640 NR Description: TCP family transcription factor, putative
  misc_feature (7)..(160): Homolog of NCBI NO: 22331641 NR Description: TCP family transcription factor, putative
  misc_feature (7)..(160): Homolog of NCBI NO: 11357581 NR Description: hypothetical protein F1P2.170 - Arabidopsis
  misc_feature (13)..(175): Homolog of NCBI NO: 5731257 NR Description: auxin-induced basic helix-loop-helix
  misc_feature (1)..(325): Homolog of NCBI NO: 18409345 NR Description: TCP family transcription factor, putative

SEQ ID NO: 34550 - protein, 258 aa, Arabidopsis thaliana; identical to SEQ ID NO: 30960
  peptide (1)..(258): Ceres Seq. ID no. 13591996
  misc_feature (1)..(161): Pfam Name: TCP family transcription factor Pfam Description: TCP family transcription factor
  misc_feature (1)..(161): Pfam Name: TCP family transcription factor Pfam Description: TCP family transcription factor
  misc_feature (1)..(71): Homolog of NCBI NO: 26452377 NR Description: unknown protein [Arabidopsis thaliana]
  misc_feature (1)..(71): Homolog of NCBI NO: 15237274 NR Description: TCP family transcription factor, putative
  misc_feature (1)..(109): Homolog of NCBI NO: 20975251 NR Description: transcription factor PCF3 [Oryza sativa (japonica
  misc_feature (1)..(93): Homolog of NCBI NO: 15217857 NR Description: TCP family transcription factor, putative
  misc_feature (1)..(116): Homolog of NCBI NO: 15218305 NR Description: TCP family transcription factor, putative
  misc_feature (1)..(71): Homolog of NCBI NO: 26452377 NR Description: unknown protein [Arabidopsis thaliana]
  misc_feature (1)..(109): Homolog of NCBI NO: 20975251 NR Description: transcription factor PCF3 [Oryza sativa (japonica
  misc_feature (1)..(116): Homolog of NCBI NO: 15218305 NR Description: TCP family transcription factor, putative
  misc_feature (1)..(258): Homolog of NCBI NO: 18409345 NR Description: TCP family transcription factor, putative
  misc_feature (1)..(108): Homolog of NCBI NO: 5731257 NR Description: auxin-induced basic helix-loop-helix
  misc_feature (1)..(93): Homolog of NCBI NO: 11357581 NR Description: hypothetical protein F1P2.170 - Arabidopsis
  misc_feature (1)..(93): Homolog of NCBI NO: 22331641 NR Description: TCP family transcription factor, putative
  misc_feature (1)..(177): Homolog of NCBI NO: 15219640 NR Description: TCP family transcription factor, putative
  misc_feature (1)..(93): Homolog of NCBI NO: 15217857 NR Description: TCP family transcription factor, putative
  misc_feature (1)..(71): Homolog of NCBI NO: 15237274 NR Description: TCP family transcription factor, putative
  misc_feature (1)..(177): Homolog of NCBI NO: 15219640 NR Description: TCP family transcription factor, putative
  misc_feature (1)..(93): Homolog of NCBI NO: 22331641 NR Description: TCP family transcription factor, putative
  misc_feature (1)..(93): Homolog of NCBI NO: 11357581 NR Description: hypothetical protein F1P2.170 - Arabidopsis
  misc_feature (1)..(108): Homolog of NCBI NO: 5731257 NR Description: auxin-induced basic helix-loop-helix
  misc_feature (1)..(258): Homolog of NCBI NO: 18409345 NR Description: TCP family transcription factor, putative

SEQ ID NO: 34551 - protein, 255 aa, Arabidopsis thaliana; identical to SEQ ID NO: 30961
  peptide (1)..(255): Ceres Seq. ID no. 13591997
  misc_feature (1)..(158): Pfam Name: TCP family transcription factor Pfam Description: TCP family transcription factor
  misc_feature (1)..(158): Pfam Name: TCP family transcription factor Pfam Description: TCP family transcription factor
  misc_feature (1)..(68): Homolog of NCBI NO: 26452377 NR Description: unknown protein [Arabidopsis thaliana]
  misc_feature (1)..(68): Homolog of NCBI NO: 15237274 NR Description: TCP family transcription factor, putative
  misc_feature (1)..(106): Homolog of NCBI NO: 20975251 NR Description: transcription factor PCF3 [Oryza sativa (japonica
  misc_feature (1)..(90): Homolog of NCBI NO: 15217857 NR Description: TCP family transcription factor, putative
  misc_feature (1)..(113): Homolog of NCBI NO: 15218305 NR Description: TCP family transcription factor, putative
  misc_feature (1)..(68): Homolog of NCBI NO: 26452377 NR Description: unknown protein [Arabidopsis thaliana]
  misc_feature (1)..(106): Homolog of NCBI NO: 20975251 NR Description: transcription factor PCF3 [Oryza sativa (japonica
  misc_feature (1)..(113): Homolog of NCBI NO: 15218305 NR Description: TCP family transcription factor, putative
  misc_feature (1)..(255): Homolog of NCBI NO: 18409345 NR Description: TCP family transcription factor, putative
  misc_feature (1)..(105): Homolog of NCBI NO: 5731257 NR Description: auxin-induced basic helix-loop-helix
  misc_feature (1)..(90): Homolog of NCBI NO: 11357581 NR Description: hypothetical protein F1P2.170 - Arabidopsis
  misc_feature (1)..(90): Homolog of NCBI NO: 22331641 NR Description: TCP family transcription factor, putative
  misc_feature (1)..(174): Homolog of NCBI NO: 15219640 NR Description: TCP family transcription factor, putative
  misc_feature (1)..(90): Homolog of NCBI NO: 15217857 NR Description: TCP family transcription factor, putative
  misc_feature (1)..(68): Homolog of NCBI NO: 15237274 NR Description: TCP family transcription factor, putative
  misc_feature (1)..(174): Homolog of NCBI NO: 15219640 NR Description: TCP family transcription factor, putative
  misc_feature (1)..(90): Homolog of NCBI NO: 22331641 NR Description: TCP family transcription factor, putative
  misc_feature (1)..(90): Homolog of NCBI NO: 11357581 NR Description: hypothetical protein F1P2.170 - Arabidopsis
  misc_feature (1)..(105): Homolog of NCBI NO: 5731257 NR Description: auxin-induced basic helix-loop-helix
  misc_feature (1)..(255): Homolog of NCBI NO: 18409345 NR Description: TCP family transcription factor, putative

SEQ ID NO: 34552 - DNA, 1232 bp, Arabidopsis thaliana; identical to SEQ ID NO: 30962
  misc_feature (1)..(1232): Ceres Seq. ID no. 12324969
  misc_feature: MA Experiment ID: 108434 Result: Up-regulated in Transcription
  misc_feature: MA Experiment 108434 PARAMETER Experiment Name: At_Root_Tips_cDNA_P Parameter: Tissue Value: Root Tips
  misc_feature: MA Experiment ID: 108435 Result: Up-regulated in Transcription
  misc_feature: MA Experiment 108435 PARAMETER Experiment Name: At_stm_Mutants_cDNA_P Parameter: Plant Line Value: wt Landsburg vs stm
  misc_feature: MA Experiment 108435 PARAMETER Experiment Name: At_stm_Mutants_cDNA_P Parameter: Tissue Value: Shoot Apical Meristem Region
  misc_feature: MA Experiment ID: 108461 Result: Down-regulated in Transcription
  misc_feature: MA Experiment 108461 PARAMETER Experiment Name: At_Germinating_Seeds_cDNA_P Parameter: Age (day) Value: 1 vs. 0
  misc_feature: MA Experiment 108461 PARAMETER Experiment Name: At_Germinating_Seeds_cDNA_P Parameter: Tissue Value: Germinating Seeds
  misc_feature: MA Experiment ID: 108462 Result: Down-regulated in Transcription
  misc_feature: MA Experiment 108462 PARAMETER Experiment Name: At_Germinating_Seeds_cDNA_P Parameter: Age (day) Value: 2 vs. 0
  misc_feature: MA Experiment 108462 PARAMETER Experiment Name: At_Germinating_Seeds_cDNA_P Parameter: Tissue Value: Germinating Seeds
  misc_feature: MA Experiment ID: 108463 Result: Down-regulated in Transcription
  misc_feature: MA Experiment 108463 PARAMETER Experiment Name: At_Germinating_Seeds_cDNA_P Parameter: Age (day) Value: 3 vs. 0
  misc_feature: MA Experiment 108463 PARAMETER Experiment Name: At_Germinating_Seeds_cDNA_P Parameter: Tissue Value: Germinating Seeds
  misc_feature: MA Experiment ID: 108464 Result: Down-regulated in Transcription
  misc_feature: MA Experiment 108464 PARAMETER Experiment Name: At_Germinating_Seeds_cDNA_P Parameter: Age (day) Value: 4 vs. 0
  misc_feature: MA Experiment 108464 PARAMETER Experiment Name: At_Germinating_Seeds_cDNA_P Parameter: Tissue Value: Germinating Seeds
  misc_feature: MA Experiment ID: 20000180 Result: Down-regulated in Transcription
  misc_feature: MA Experiment 20000180 PARAMETER Experiment Name: At_Germinating_Seeds_P Parameter: Age (hr) Value: 24 vs. 0
  misc_feature: MA Experiment 20000180 PARAMETER Experiment Name: At_Germinating_Seeds_P Parameter: Tissue Value: Germinating Seeds
  misc_feature: MA Experiment ID: 20000214 Result: Down-regulated in Transcription
  misc_feature: MA Experiment 20000214 PARAMETER Experiment Name: At_4deg_Cold_P Parameter: Timepoint (hr) Value: 6
  misc_feature: MA Experiment ID: 20000224 Result: Down-regulated in Transcription
  misc_feature: MA Experiment ID: 20000307 Result: Down-regulated in Transcription
  misc_feature: MA Experiment 20000307 PARAMETER Experiment Name: At_Germinating_Seeds_Sub_P Parameter: Age (hr) Value: 24 vs. 0
  misc_feature: MA Experiment 20000307 PARAMETER Experiment Name: At_Germinating_Seeds_Sub_P Parameter: Organism Value: A. thaliana
  misc_feature: MA Experiment 20000307 PARAMETER Experiment Name: At_Germinating_Seeds_Sub_P Parameter: Plant Line Value: WS
  misc_feature: MA Experiment 20000307 PARAMETER Experiment Name: At_Germinating_Seeds_Sub_P Parameter: Tissue Value: Germinating Seeds
  misc_feature: MA Experiment ID: 20000328 Result: Up-regulated in Transcription
  misc_feature: MA Experiment 20000328 PARAMETER Experiment Name: At_42deg_Heat_Sub_P Parameter: Age (day) Value: 14
  misc_feature: MA Experiment 20000328 PARAMETER Experiment Name: At_42deg_Heat_Sub_P Parameter: Organism Value: A. thaliana
  misc_feature: MA Experiment 20000328 PARAMETER Experiment Name: At_42deg_Heat_Sub_P Parameter: Plant Line Value: WS
  misc_feature: MA Experiment 20000328 PARAMETER Experiment Name: At_42deg_Heat_Sub_P Parameter: Temperature (deg C) Value: 42 vs. 22
  misc_feature: MA Experiment 20000328 PARAMETER Experiment Name: At_42deg_Heat_Sub_P Parameter: Timepoint (hr) Value: 6
  misc_feature: MA Experiment 20000328 PARAMETER Experiment Name: At_42deg_Heat_Sub_P Parameter: Tissue Value: Aerial
  misc_feature: MA Experiment ID: 20001450 Result: Up-regulated in Transcription
  misc_feature: MA Experiment 20001450 PARAMETER Experiment Name: At_Far-red-induction_P Parameter: Age (day) Value: 7
  misc_feature: MA Experiment 20001450 PARAMETER Experiment Name: At_Far-red-induction_P Parameter: Light Value: Far-red vs. White
  misc_feature: MA Experiment 20001450 PARAMETER Experiment Name: At_Far-red-induction_P Parameter: Organism Value: A. thaliana
  misc_feature: MA Experiment 20001450 PARAMETER Experiment Name: At_Far-red-induction_P Parameter: Plant Line Value: Columbia
  misc_feature: MA Experiment 20001450 PARAMETER Experiment Name: At_Far-red-induction_P Parameter: Timepoint (hr) Value: 8
  misc_feature: MA Experiment 20001450 PARAMETER Experiment Name: At_Far-red-induction_P Parameter: Tissue Value: Whole Plant
  misc_feature: MA Experiment ID: 20001451 Result: Up-regulated in Transcription
  misc_feature: MA Experiment 20001451 PARAMETER Experiment Name: At_Far-red-induction_P Parameter: Age (day) Value: 7
  misc_feature: MA Experiment 20001451 PARAMETER Experiment Name: At_Far-red-induction_P Parameter: Light Value: Far-red vs. White
  misc_feature: MA Experiment 20001451 PARAMETER Experiment Name: At_Far-red-induction_P Parameter: Organism Value: A. thaliana
  misc_feature: MA Experiment 20001451 PARAMETER Experiment Name: At_Far-red-induction_P Parameter: Plant Line Value: Columbia
  misc_feature: MA Experiment 20001451 PARAMETER Experiment Name: At_Far-red-induction_P Parameter: Timepoint (hr) Value: 24
  misc_feature: MA Experiment 20001451 PARAMETER Experiment Name: At_Far-red-induction_P Parameter: Tissue Value: Whole Plant

SEQ ID NO: 34553 - protein, 303 aa, Arabidopsis thaliana; identical to SEQ ID NO: 30963
  peptide (1)..(303): Ceres Seq. ID no. 12324970
  misc_feature (9)..(77): Pfam Name: RNA recognition motif. (a.k.a. RRM, RBD, or RNP domain) Pfam Description: RNA recognition motif. (a.k.a. RRM, RBD, or RNP
  misc_feature (1)..(272): Homolog of NCBI NO: 22331714 NR Description: arginine/serine-rich splicing factor (atSRp34),
  misc_feature (1)..(303): Homolog of NCBI NO: 33146854 NR Description: putative pre-mRNA splicing factor SF2
  misc_feature (1)..(207): Homolog of NCBI NO: 5815238 NR Description: splicing factor SR1D [Arabidopsis thaliana]
  misc_feature (1)..(266): Homolog of NCBI NO: 5815239 NR Description: splicing factor SR1E [Arabidopsis thaliana]
  misc_feature (1)..(266): Homolog of NCBI NO: 5815237 NR Description: splicing factor SR1C [Arabidopsis thaliana]
  misc_feature (1)..(266): Homolog of NCBI NO: 5815236 NR Description: splicing factor SR1B [Arabidopsis thaliana]
  misc_feature (1)..(266): Homolog of NCBI NO: 2443473 NR Description: ASF/SF2 homolog [Arabidopsis thaliana]
  misc_feature (1)..(303): Homolog of NCBI NO: 2129717 NR Description: splicing factor SF-2 homolog - Arabidopsis
  misc_feature (1)..(303): Homolog of NCBI NO: 5815235 NR Description: splicing factor SR1 [Arabidopsis thaliana]
  misc_feature (1)..(303): Homolog of NCBI NO: 30678391 NR Description: pre-mRNA splicing factor SF2 (SR1 protein)

SEQ ID NO: 34554 - protein, 165 aa, Arabidopsis thaliana; identical to SEQ ID NO: 29319
  peptide (1)..(165): Ceres Seq. ID no. 12324971
  misc_feature (1)..(134): Homolog of NCBI NO: 22331714 NR Description: arginine/serine-rich splicing factor (atSRp34),
  misc_feature (1)..(165): Homolog of NCBI NO: 33146854 NR Description: putative pre-mRNA splicing factor SF2
  misc_feature (1)..(69): Homolog of NCBI NO: 5815238 NR Description: splicing factor SR1D [Arabidopsis thaliana]
  misc_feature (1)..(128): Homolog of NCBI NO: 5815239 NR Description: splicing factor SR1E [Arabidopsis thaliana]
  misc_feature (1)..(128): Homolog of NCBI NO: 5815237 NR Description: splicing factor SR1C [Arabidopsis thaliana]
  misc_feature (1)..(128): Homolog of NCBI NO: 5815236 NR Description: splicing factor SR1B [Arabidopsis thaliana]
  misc_feature (1)..(128): Homolog of NCBI NO: 2443473 NR Description: ASF/SF2 homolog [Arabidopsis thaliana]
  misc_feature (1)..(165): Homolog of NCBI NO: 2129717 NR Description: splicing factor SF-2 homolog - Arabidopsis
  misc_feature (1)..(165): Homolog of NCBI NO: 5815235 NR Description: splicing factor SR1 [Arabidopsis thaliana]
  misc_feature (1)..(165): Homolog of NCBI NO: 30678391 NR Description: pre-mRNA splicing factor SF2 (SR1 protein)

SEQ ID NO: 34555 - DNA, 977 bp, Arabidopsis thaliana; identical to SEQ ID NO: 30965
  misc_feature (1)..(977): Ceres Seq. ID no. 12322916
  misc_feature: MA Experiment ID: 108461 Result: Up-regulated in Transcription
  misc_feature: MA Experiment 108461 PARAMETER Experiment Name: At_Germinating_Seeds_cDNA_P Parameter: Age (day) Value: 1 vs. 0
  misc_feature: MA Experiment 108461 PARAMETER Experiment Name: At_Germinating_Seeds_cDNA_P Parameter: Tissue Value: Germinating Seeds
  misc_feature: MA Experiment ID: 108462 Result: Up-regulated in Transcription
  misc_feature: MA Experiment 108462 PARAMETER Experiment Name: At_Germinating_Seeds_cDNA_P Parameter: Age (day) Value: 2 vs. 0
  misc_feature: MA Experiment 108462 PARAMETER Experiment Name: At_Germinating_Seeds_cDNA_P Parameter: Tissue Value: Germinating Seeds
  misc_feature: MA Experiment ID: 108463 Result: Up-regulated in Transcription
  misc_feature: MA Experiment 108463 PARAMETER Experiment Name: At_Germinating_Seeds_cDNA_P Parameter: Age (day) Value: 3 vs. 0
  misc_feature: MA Experiment 108463 PARAMETER Experiment Name: At_Germinating_Seeds_cDNA_P Parameter: Tissue Value: Germinating Seeds
  misc_feature: MA Experiment ID: 108464 Result: Up-regulated in Transcription
  misc_feature: MA Experiment 108464 PARAMETER Experiment Name: At_Germinating_Seeds_cDNA_P Parameter: Age (day) Value: 4 vs. 0
  misc_feature: MA Experiment 108464 PARAMETER Experiment Name: At_Germinating_Seeds_cDNA_P Parameter: Tissue Value: Germinating Seeds
  misc_feature: MA Experiment ID: 108488 Result: Up-regulated in Transcription
  misc_feature: MA Experiment ID: 20000069 Result: Down-regulated in Transcription
  misc_feature: MA Experiment 20000069 PARAMETER Experiment Name: At_100uM_ABA_Mutants_cDNA_P Parameter: Plant Line Value: CS23
  misc_feature: MA Experiment 20000069 PARAMETER Experiment Name: At_100uM_ABA_Mutants_cDNA_P Parameter: Timepoint (hr) Value: 6
  misc_feature: MA Experiment 20000069 PARAMETER Experiment Name: At_100uM_ABA_Mutants_cDNA_P Parameter: Tissue Value: Aerial
  misc_feature: MA Experiment 20000069 PARAMETER Experiment Name: At_100uM_ABA_Mutants_cDNA_P Parameter: Treatment Value: 100uM ABA vs. No Treatment
  misc_feature: MA Experiment ID: 20000070 Result: Down-regulated in Transcription
  misc_feature: MA Experiment 20000070 PARAMETER Experiment Name: At_100uM_ABA_Mutants_cDNA_P Parameter: Plant Line Value: CS24
  misc_feature: MA Experiment 20000070 PARAMETER Experiment Name: At_100uM_ABA_Mutants_cDNA_P Parameter: Timepoint (hr) Value: 6
  misc_feature: MA Experiment 20000070 PARAMETER Experiment Name: At_100uM_ABA_Mutants_cDNA_P Parameter: Tissue Value: Aerial
  misc_feature: MA Experiment 20000070 PARAMETER Experiment Name: At_100uM_ABA_Mutants_cDNA_P Parameter: Treatment Value: 100uM ABA vs. No Treatment
  misc_feature: MA Experiment ID: 20000086 Result: Down-regulated in Transcription
  misc_feature: MA Experiment 20000086 PARAMETER Experiment Name: At_100uM_ABA_Mutants_cDNA_P Parameter: Plant Line Value: CS22
  misc_feature: MA Experiment 20000086 PARAMETER Experiment Name: At_100uM_ABA_Mutants_cDNA_P Parameter: Timepoint (hr) Value: 6
  misc_feature: MA Experiment 20000086 PARAMETER Experiment Name: At_100uM_ABA_Mutants_cDNA_P Parameter: Tissue Value: Aerial
  misc_feature: MA Experiment 20000086 PARAMETER Experiment Name: At_100uM_ABA_Mutants_cDNA_P Parameter: Treatment Value: 100uM ABA vs. No Treatment
  misc_feature: MA Experiment ID: 20000088 Result: Down-regulated in Transcription
  misc_feature: MA Experiment 20000088 PARAMETER Experiment Name: At_100uM_ABA_Mutants_cDNA_P Parameter: Plant Line Value: Landsberg
  misc_feature: MA Experiment 20000088 PARAMETER Experiment Name: At_100uM_ABA_Mutants_cDNA_P Parameter: Timepoint (hr) Value: 6
  misc_feature: MA Experiment 20000088 PARAMETER Experiment Name: At_100uM_ABA_Mutants_cDNA_P Parameter: Tissue Value: Aerial
  misc_feature: MA Experiment 20000088 PARAMETER Experiment Name: At_100uM_ABA_Mutants_cDNA_P Parameter: Treatment Value: 100uM ABA vs. No Treatment
  misc_feature: MA Experiment ID: 20000090 Result: Down-regulated in Transcription
  misc_feature: MA Experiment ID: 20000117 Result: Down-regulated in Transcription
  misc_feature: MA Experiment 20000117 PARAMETER Experiment Name: At_100uM_ABA_Mutants_cDNA_P Parameter: Plant Line Value: Columbia
  misc_feature: MA Experiment 20000117 PARAMETER Experiment Name: At_100uM_ABA_Mutants_cDNA_P Parameter: Timepoint (hr) Value: 6
  misc_feature: MA Experiment 20000117 PARAMETER Experiment Name: At_100uM_ABA_Mutants_cDNA_P Parameter: Tissue Value: Aerial
  misc_feature: MA Experiment 20000117 PARAMETER Experiment Name: At_100uM_ABA_Mutants_cDNA_P Parameter: Treatment Value: 100uM ABA vs. No Treatment
  misc_feature: MA Experiment ID: 20000180 Result: Up-regulated in Transcription
  misc_feature: MA Experiment 20000180 PARAMETER Experiment Name: At_Germinating_Seeds_P Parameter: Age (hr) Value: 24 vs. 0
  misc_feature: MA Experiment 20000180 PARAMETER Experiment Name: At_Germinating_Seeds_P Parameter: Tissue Value: Germinating Seeds
  misc_feature: MA Experiment ID: 20000224 Result: Down-regulated in Transcription
  misc_feature: MA Experiment ID: 20000264 Result: Down-regulated in Transcription
  misc_feature: MA Experiment 20000264 PARAMETER Experiment Name: At_Open_Flower_P Parameter: Age (day) Value: 21
  misc_feature: MA Experiment 20000264 PARAMETER Experiment Name: At_Open_Flower_P Parameter: Plant Line Value: WS
  misc_feature: MA Experiment 20000264 PARAMETER Experiment Name: At_Open_Flower_P Parameter: Tissue Value: Open Flower vs. Whole Plant
  misc_feature: MA Experiment ID: 20000267 Result: Down-regulated in Transcription
  misc_feature: MA Experiment 20000267 PARAMETER Experiment Name: At_Drought_P Parameter: Age (day) Value: 7
  misc_feature: MA Experiment 20000267 PARAMETER Experiment Name: At_Drought_P Parameter: Organism Value: A. thaliana
  misc_feature: MA Experiment 20000267 PARAMETER Experiment Name: At_Drought_P Parameter: Plant Line Value: WS
  misc_feature: MA Experiment 20000267 PARAMETER Experiment Name: At_Drought_P Parameter: Timepoint (hr) Value: 6
  misc_feature: MA Experiment 20000267 PARAMETER Experiment Name: At_Drought_P Parameter: Tissue Value: Whole Plant
  misc_feature: MA Experiment 20000267 PARAMETER Experiment Name: At_Drought_P Parameter: Treatment Value: Drought vs. No Drought
  misc_feature: MA Experiment ID: 20000268 Result: Down-regulated in Transcription
  misc_feature: MA Experiment 20000268 PARAMETER Experiment Name: At_100mM_NaCl__P Parameter: Age (day) Value: 14
  misc_feature: MA Experiment 20000268 PARAMETER Experiment Name: At_100mM_NaCl__P Parameter: Organism Value: A. thaliana
  misc_feature: MA Experiment 20000268 PARAMETER Experiment Name: At_100mM_NaCl__P Parameter: Plant Line Value: WS
  misc_feature: MA Experiment 20000268 PARAMETER Experiment Name: At_100mM_NaCl__P Parameter: Timepoint (hr) Value: 6
  misc_feature: MA Experiment 20000268 PARAMETER Experiment Name: At_100mM_NaCl__P Parameter: Tissue Value: Whole Plant
  misc_feature: MA Experiment 20000268 PARAMETER Experiment Name: At_100mM_NaCl__P Parameter: Treatment Value: 100mM NaCl vs. No Treatment
  misc_feature: MA Experiment ID: 20000436 Result: Down-regulated in Transcription
  misc_feature: MA Experiment 20000436 PARAMETER Experiment Name: At_Drought_P Parameter: Age (day) Value: 7
  misc_feature: MA Experiment 20000436 PARAMETER Experiment Name: At_Drought_P Parameter: Organism Value: A. thaliana
  misc_feature: MA Experiment 20000436 PARAMETER Experiment Name: At_Drought_P Parameter: Plant Line Value: WS
  misc_feature: MA Experiment 20000436 PARAMETER Experiment Name: At_Drought_P Parameter: Timepoint (hr) Value: 12
  misc_feature: MA Experiment 20000436 PARAMETER Experiment Name: At_Drought_P Parameter: Tissue Value: Whole Plant
  misc_feature: MA Experiment 20000436 PARAMETER Experiment Name: At_Drought_P Parameter: Treatment Value: Drought vs. No Drought
  misc_feature: MA Experiment ID: 20000437 Result: Down-regulated in Transcription
  misc_feature: MA Experiment 20000437 PARAMETER Experiment Name: At_Drought_P Parameter: Age (day) Value: 8
  misc_feature: MA Experiment 20000437 PARAMETER Experiment Name: At_Drought_P Parameter: Organism Value: A. thaliana
  misc_feature: MA Experiment 20000437 PARAMETER Experiment Name: At_Drought_P Parameter: Plant Line Value: WS
  misc_feature: MA Experiment 20000437 PARAMETER Experiment Name: At_Drought_P Parameter: Timepoint (hr) Value: 24
  misc_feature: MA Experiment 20000437 PARAMETER Experiment Name: At_Drought_P Parameter: Tissue Value: Whole Plant
  misc_feature: MA Experiment 20000437 PARAMETER Experiment Name: At_Drought_P Parameter: Treatment Value: Drought vs. No Drought
  misc_feature: MA Experiment ID: 20000439 Result: Down-regulated in Transcription
  misc_feature: MA Experiment 20000439 PARAMETER Experiment Name: At_Roots__P Parameter: Age (day) Value: 14 vs. 21
  misc_feature: MA Experiment 20000439 PARAMETER Experiment Name: At_Roots__P Parameter: Organism Value: A. thaliana
  misc_feature: MA Experiment 20000439 PARAMETER Experiment Name: At_Roots__P Parameter: Tissue Value: Roots vs. Whole Plant
  misc_feature: MA Experiment ID: 20000794 Result: Down-regulated in Transcription
  misc_feature: MA Experiment 20000794 PARAMETER Experiment Name: At_Petals_P Parameter: Age (day) Value: 23-25 days
  misc_feature: MA Experiment 20000794 PARAMETER Experiment Name: At_Petals_P Parameter: Plant Line Value: WS
  misc_feature: MA Experiment 20000794 PARAMETER Experiment Name: At_Petals_P Parameter: Tissue Value: Petals vs. Whole plant
  misc_feature: MA Experiment ID: 20001247 Result: Up-regulated in Transcription
  misc_feature: MA Experiment 20001247 PARAMETER Experiment Name: At_Far-red-induction_P Parameter: Age (day) Value: 7
  misc_feature: MA Experiment 20001247 PARAMETER Experiment Name: At_Far-red-induction_P Parameter: Light Value: Far-red vs. White
  misc_feature: MA Experiment 20001247 PARAMETER Experiment Name: At_Far-red-induction_P Parameter: Organism Value: A. thaliana
  misc_feature: MA Experiment 20001247 PARAMETER Experiment Name: At_Far-red-induction_P Parameter: Plant Line Value: Columbia
  misc_feature: MA Experiment 20001247 PARAMETER Experiment Name: At_Far-red-induction_P Parameter: Timepoint (hr) Value: 1
  misc_feature: MA Experiment 20001247 PARAMETER Experiment Name: At_Far-red-induction_P Parameter: Tissue Value: Whole Plant
  misc_feature: MA Experiment ID: 20001450 Result: Up-regulated in Transcription
  misc_feature: MA Experiment 20001450 PARAMETER Experiment Name: At_Far-red-induction_P Parameter: Age (day) Value: 7
  misc_feature: MA Experiment 20001450 PARAMETER Experiment Name: At_Far-red-induction_P Parameter: Light Value: Far-red vs. White
  misc_feature: MA Experiment 20001450 PARAMETER Experiment Name: At_Far-red-induction_P Parameter: Organism Value: A. thaliana
  misc_feature: MA Experiment 20001450 PARAMETER Experiment Name: At_Far-red-induction_P Parameter: Plant Line Value: Columbia
  misc_feature: MA Experiment 20001450 PARAMETER Experiment Name: At_Far-red-induction_P Parameter: Timepoint (hr) Value: 8
  misc_feature: MA Experiment 20001450 PARAMETER Experiment Name: At_Far-red-induction_P Parameter: Tissue Value: Whole Plant
  misc_feature: MA Experiment ID: 20001451 Result: Up-regulated in Transcription
  misc_feature: MA Experiment 20001451 PARAMETER Experiment Name: At_Far-red-induction_P Parameter: Age (day) Value: 7
  misc_feature: MA Experiment 20001451 PARAMETER Experiment Name: At_Far-red-induction_P Parameter: Light Value: Far-red vs. White
  misc_feature: MA Experiment 20001451 PARAMETER Experiment Name: At_Far-red-induction_P Parameter: Organism Value: A. thaliana
  misc_feature: MA Experiment 20001451 PARAMETER Experiment Name: At_Far-red-induction_P Parameter: Plant Line Value: Columbia
  misc_feature: MA Experiment 20001451 PARAMETER Experiment Name: At_Far-red-induction_P Parameter: Timepoint (hr) Value: 24
  misc_feature: MA Experiment 20001451 PARAMETER Experiment Name: At_Far-red-induction_P Parameter: Tissue Value: Whole Plant
  misc_feature: MA Experiment ID: 20001554 Result: Down-regulated in Transcription
  misc_feature: MA Experiment 20001554 PARAMETER Experiment Name: At_Drought_Soil_Dry_P Parameter: Age (day) Value: 21
  misc_feature: MA Experiment 20001554 PARAMETER Experiment Name: At_Drought_Soil_Dry_P Parameter: Organism Value: A. thaliana
  misc_feature: MA Experiment 20001554 PARAMETER Experiment Name: At_Drought_Soil_Dry_P Parameter: Plant Line Value: WS
  misc_feature: MA Experiment 20001554 PARAMETER Experiment Name: At_Drought_Soil_Dry_P Parameter: Post Timepoint (hr) Value: None
  misc_feature: MA Experiment 20001554 PARAMETER Experiment Name: At_Drought_Soil_Dry_P Parameter: Post-Treatment Value: None
  misc_feature: MA Experiment 20001554 PARAMETER Experiment Name: At_Drought_Soil_Dry_P Parameter: Timepoint (day) Value: 7
  misc_feature: MA Experiment 20001554 PARAMETER Experiment Name: At_Drought_Soil_Dry_P Parameter: Treatment Value: Drought vs. No Drought
  misc_feature: MA Experiment ID: 20001555 Result: Down-regulated in Transcription
  misc_feature: MA Experiment 20001555 PARAMETER Experiment Name: At_Drought_Soil_Dry_P Parameter: Age (day) Value: 24
  misc_feature: MA Experiment 20001555 PARAMETER Experiment Name: At_Drought_Soil_Dry_P Parameter: Organism Value: A. thaliana
  misc_feature: MA Experiment 20001555 PARAMETER Experiment Name: At_Drought_Soil_Dry_P Parameter: Plant Line Value: WS
  misc_feature: MA Experiment 20001555 PARAMETER Experiment Name: At_Drought_Soil_Dry_P Parameter: Post Timepoint (hr) Value: None
  misc_feature: MA Experiment 20001555 PARAMETER Experiment Name: At_Drought_Soil_Dry_P Parameter: Post-Treatment Value: None
  misc_feature: MA Experiment 20001555 PARAMETER Experiment Name: At_Drought_Soil_Dry_P Parameter: Timepoint (day) Value: 10
  misc_feature: MA Experiment 20001555 PARAMETER Experiment Name: At_Drought_Soil_Dry_P Parameter: Treatment Value: Drought vs. No Drought
  misc_feature: MA Experiment ID: 20001556 Result: Down-regulated in Transcription
  misc_feature: MA Experiment 20001556 PARAMETER Experiment Name: At_Drought_Soil_Dry_P Parameter: Age (day) Value: 26
  misc_feature: MA Experiment 20001556 PARAMETER Experiment Name: At_Drought_Soil_Dry_P Parameter: Organism Value: A. thaliana
  misc_feature: MA Experiment 20001556 PARAMETER Experiment Name: At_Drought_Soil_Dry_P Parameter: Plant Line Value: WS
  misc_feature: MA Experiment 20001556 PARAMETER Experiment Name: At_Drought_Soil_Dry_P Parameter: Post Timepoint (hr) Value: None
  misc_feature: MA Experiment 20001556 PARAMETER Experiment Name: At_Drought_Soil_Dry_P Parameter: Post-Treatment Value: None
  misc_feature: MA Experiment 20001556 PARAMETER Experiment Name: At_Drought_Soil_Dry_P Parameter: Timepoint (day) Value: 12
  misc_feature: MA Experiment 20001556 PARAMETER Experiment Name: At_Drought_Soil_Dry_P Parameter: Treatment Value: Drought vs. No Drought
  misc_feature: MA Experiment ID: 20001558 Result: Up-regulated in Transcription
  misc_feature: MA Experiment 20001558 PARAMETER Experiment Name: At_Drought_Soil_Dry_P Parameter: Age (day) Value: 27
  misc_feature: MA Experiment 20001558 PARAMETER Experiment Name: At_Drought_Soil_Dry_P Parameter: Organism Value: A. thaliana
  misc_feature: MA Experiment 20001558 PARAMETER Experiment Name: At_Drought_Soil_Dry_P Parameter: Plant Line Value: WS
  misc_feature: MA Experiment 20001558 PARAMETER Experiment Name: At_Drought_Soil_Dry_P Parameter: Post Timepoint (hr) Value: 6
  misc_feature: MA Experiment 20001558 PARAMETER Experiment Name: At_Drought_Soil_Dry_P Parameter: Post-Treatment Value: Re-Water vs. No Drought
  misc_feature: MA Experiment 20001558 PARAMETER Experiment Name: At_Drought_Soil_Dry_P Parameter: Timepoint (day) Value: 13
  misc_feature: MA Experiment 20001558 PARAMETER Experiment Name: At_Drought_Soil_Dry_P Parameter: Treatment Value: Drought vs. No Drought
  misc_feature: MA Experiment ID: 20001559 Result: Down-regulated in Transcription
  misc_feature: MA Experiment 20001559 PARAMETER Experiment Name: At_Drought_Soil_Dry_P Parameter: Age (day) Value: 28
  misc_feature: MA Experiment 20001559 PARAMETER Experiment Name: At_Drought_Soil_Dry_P Parameter: Organism Value: A. thaliana
  misc_feature: MA Experiment 20001559 PARAMETER Experiment Name: At_Drought_Soil_Dry_P Parameter: Plant Line Value: WS
  misc_feature: MA Experiment 20001559 PARAMETER Experiment Name: At_Drought_Soil_Dry_P Parameter: Post Timepoint (hr) Value: 29
  misc_feature: MA Experiment 20001559 PARAMETER Experiment Name: At_Drought_Soil_Dry_P Parameter: Post-Treatment Value: Re-Water vs. No Drought
  misc_feature: MA Experiment 20001559 PARAMETER Experiment Name: At_Drought_Soil_Dry_P Parameter: Timepoint (day) Value: 14
  misc_feature: MA Experiment 20001559 PARAMETER Experiment Name: At_Drought_Soil_Dry_P Parameter: Treatment Value: Drought vs. No Drought
  misc_feature: MA Experiment ID: 20001560 Result: Up-regulated in Transcription
  misc_feature: MA Experiment 20001560 PARAMETER Experiment Name: At_Drought_Soil_Dry_P Parameter: Age (day) Value: 28
  misc_feature: MA Experiment 20001560 PARAMETER Experiment Name: At_Drought_Soil_Dry_P Parameter: Organism Value: A. thaliana
  misc_feature: MA Experiment 20001560 PARAMETER Experiment Name: At_Drought_Soil_Dry_P Parameter: Plant Line Value: WS
  misc_feature: MA Experiment 20001560 PARAMETER Experiment Name: At_Drought_Soil_Dry_P Parameter: Post Timepoint (hr) Value: None
  misc_feature: MA Experiment 20001560 PARAMETER Experiment Name: At_Drought_Soil_Dry_P Parameter: Post-Treatment Value: None
  misc_feature: MA Experiment 20001560 PARAMETER Experiment Name: At_Drought_Soil_Dry_P Parameter: Timepoint (day) Value: 14
  misc_feature: MA Experiment 20001560 PARAMETER Experiment Name: At_Drought_Soil_Dry_P Parameter: Treatment Value: Drought vs. No Drought
  misc_feature: MA Experiment ID: 20001757 Result: Up-regulated in Transcription
  misc_feature: MA Experiment 20001757 PARAMETER Experiment Name: At_50mM_NH4NO3_L-to-H_P Parameter: Timepoint (hr) Value: 6
  misc_feature: MA Experiment 20001757 PARAMETER Experiment Name: At_50mM_NH4NO3_L-to-H_P Parameter: Tissue Value: Leaf
  misc_feature: MA Experiment 20001757 PARAMETER Experiment Name: At_50mM_NH4NO3_L-to-H_P Parameter: Treatment Value: 50mM NH4NO3 vs 100mM Mannitol
  misc_feature: MA Experiment ID: 20001904 Result: Down-regulated in Transcription
  misc_feature: MA Experiment 20001904 PARAMETER Experiment Name: At_Drought_Reproduction_P Parameter: Age (day) Value: 37
  misc_feature: MA Experiment 20001904 PARAMETER Experiment Name: At_Drought_Reproduction_P Parameter: Organism Value: A. thaliana
  misc_feature: MA Experiment 20001904 PARAMETER Experiment Name: At_Drought_Reproduction_P Parameter: Plant Line Value: WS
  misc_feature: MA Experiment 20001904 PARAMETER Experiment Name: At_Drought_Reproduction_P Parameter: Timepoint (day) Value: 7
  misc_feature: MA Experiment 20001904 PARAMETER Experiment Name: At_Drought_Reproduction_P Parameter: Tissue Value: Rosettes
  misc_feature: MA Experiment 20001904 PARAMETER Experiment Name: At_Drought_Reproduction_P Parameter: Treatment Value: Drought vs. No Drought
  misc_feature: MA Experiment ID: 20001905 Result: Down-regulated in Transcription
  misc_feature: MA Experiment 20001905 PARAMETER Experiment Name: At_Drought_Reproduction_P Parameter: Age (day) Value: 40
  misc_feature: MA Experiment 20001905 PARAMETER Experiment Name: At_Drought_Reproduction_P Parameter: Organism Value: A. thaliana
  misc_feature: MA Experiment 20001905 PARAMETER Experiment Name: At_Drought_Reproduction_P Parameter: Plant Line Value: WS
  misc_feature: MA Experiment 20001905 PARAMETER Experiment Name: At_Drought_Reproduction_P Parameter: Timepoint (day) Value: 10
  misc_feature: MA Experiment 20001905 PARAMETER Experiment Name: At_Drought_Reproduction_P Parameter: Tissue Value: Rosettes
  misc_feature: MA Experiment 20001905 PARAMETER Experiment Name: At_Drought_Reproduction_P Parameter: Treatment Value: Drought vs. No Drought
  misc_feature: MA Experiment ID: 20001906 Result: Down-regulated in Transcription
  misc_feature: MA Experiment 20001906 PARAMETER Experiment Name: At_Drought_Reproduction_P Parameter: Age (day) Value: 35
  misc_feature: MA Experiment 20001906 PARAMETER Experiment Name: At_Drought_Reproduction_P Parameter: Organism Value: A. thaliana
  misc_feature: MA Experiment 20001906 PARAMETER Experiment Name: At_Drought_Reproduction_P Parameter: Plant Line Value: WS
  misc_feature: MA Experiment 20001906 PARAMETER Experiment Name: At_Drought_Reproduction_P Parameter: Timepoint (day) Value: 5
  misc_feature: MA Experiment 20001906 PARAMETER Experiment Name: At_Drought_Reproduction_P Parameter: Tissue Value: Siliques
  misc_feature: MA Experiment 20001906 PARAMETER Experiment Name: At_Drought_Reproduction_P Parameter: Treatment Value: Drought vs. No Drought
  misc_feature: MA Experiment ID: 20001908 Result: Down-regulated in Transcription
  misc_feature: MA Experiment 20001908 PARAMETER Experiment Name: At_Drought_Reproduction_P Parameter: Age (day) Value: 40
  misc_feature: MA Experiment 20001908 PARAMETER Experiment Name: At_Drought_Reproduction_P Parameter: Organism Value: A. thaliana
  misc_feature: MA Experiment 20001908 PARAMETER Experiment Name: At_Drought_Reproduction_P Parameter: Plant Line Value: WS
  misc_feature: MA Experiment 20001908 PARAMETER Experiment Name: At_Drought_Reproduction_P Parameter: Timepoint (day) Value: 10
  misc_feature: MA Experiment 20001908 PARAMETER Experiment Name: At_Drought_Reproduction_P Parameter: Tissue Value: Siliques
  misc_feature: MA Experiment 20001908 PARAMETER Experiment Name: At_Drought_Reproduction_P Parameter: Treatment Value: Drought vs. No Drought
  misc_feature: MA Experiment ID: 20001911 Result: Down-regulated in Transcription
  misc_feature: MA Experiment 20001911 PARAMETER Experiment Name: At_Drought_Reproduction_P Parameter: Age (day) Value: 40
  misc_feature: MA Experiment 20001911 PARAMETER Experiment Name: At_Drought_Reproduction_P Parameter: Organism Value: A. thaliana
  misc_feature: MA Experiment 20001911 PARAMETER Experiment Name: At_Drought_Reproduction_P Parameter: Plant Line Value: WS
  misc_feature: MA Experiment 20001911 PARAMETER Experiment Name: At_Drought_Reproduction_P Parameter: Timepoint (day) Value: 10
  misc_feature: MA Experiment 20001911 PARAMETER Experiment Name: At_Drought_Reproduction_P Parameter: Tissue Value: Flowers
  misc_feature: MA Experiment 20001911 PARAMETER Experiment Name: At_Drought_Reproduction_P Parameter: Treatment Value: Drought vs. No Drought

SEQ ID NO: 34556 - protein, 250 aa, Arabidopsis thaliana; identical to SEQ ID NO: 30966
  peptide (1)..(250): Ceres Seq. ID no. 12322917
  misc_feature (1)..(247): Homolog of NCBI NO: 11276919 NR Description: water channel protein MipK [imported] - common
  misc_feature (1)..(250): Homolog of NCBI NO: 12006841 NR Description: putative delta TIP [Nicotiana glauca]
  misc_feature (1)..(250): Homolog of NCBI NO: 11276920 NR Description: aquaporin [imported] - Vernicia fordii
  misc_feature (1)..(247): Homolog of NCBI NO: 7441271 NR Description: aquaporin TIP18 - common sunflower
  misc_feature (1)..(247): Homolog of NCBI NO: 7441273 NR Description: aquaporin TIP7 - common sunflower
  misc_feature (1)..(247): Homolog of NCBI NO: 7441281 NR Description: water channel protein - common sunflower
  misc_feature (1)..(250): Homolog of NCBI NO: 7441289 NR Description: tonoplast intrinsic protein, delta type - upland
  misc_feature (1)..(247): Homolog of NCBI NO: 7441258 NR Description: probable water channel protein delta-VM23 -
  misc_feature (1)..(250): Homolog of NCBI NO: 17473872 NR Description: delta tonoplast intrinsic protein [Arabidopsis
  misc_feature (1)..(250): Homolog of NCBI NO: 15233320 NR Description: delta tonoplast integral protein (delta-TIP)

SEQ ID NO: 34557 - DNA, 1310 bp, Arabidopsis thaliana; identical to SEQ ID NO: 30967
  misc_feature (1)..(1310): Ceres Seq. ID no. 12697154
  misc_feature: MA Experiment ID: 108569 Result: Down-regulated in Transcription
  misc_feature: MA Experiment 108569 PARAMETER Experiment Name: At_0.001%_MeJA__cDNA_P Parameter: Timepoint (hr) Value: 6
  misc_feature: MA Experiment 108569 PARAMETER Experiment Name: At_0.001%_MeJA__cDNA_P Parameter: Tissue Value: Aerial
  misc_feature: MA Experiment 108569 PARAMETER Experiment Name: At_0.001%_MeJA__cDNA_P Parameter: Treatment Value: 0.001% MeJA vs. No Treatment
  misc_feature: MA Experiment ID: 108577 Result: Down-regulated in Transcription
  misc_feature: MA Experiment 108577 PARAMETER Experiment Name: At_42deg_Heat_cDNA_P Parameter: Temperature (deg C) Value: 42 vs. 22
  misc_feature: MA Experiment 108577 PARAMETER Experiment Name: At_42deg_Heat_cDNA_P Parameter: Timepoint (hr) Value: 6
  misc_feature: MA Experiment 108577 PARAMETER Experiment Name: At_42deg_Heat_cDNA_P Parameter: Tissue Value: Aerial
  misc_feature: MA Experiment ID: 108595 Result: Up-regulated in Transcription
  misc_feature: MA Experiment 108595 PARAMETER Experiment Name: At_Ler-pi_Ovule_cDNA_P Parameter: Plant Line Value: null
  misc_feature: MA Experiment ID: 20000166 Result: Up-regulated in Transcription
  misc_feature: MA Experiment 20000166 PARAMETER Experiment Name: At_100uM_ABA_P Parameter: Age (day) Value: 14
  misc_feature: MA Experiment 20000166 PARAMETER Experiment Name: At_100uM_ABA_P Parameter: Organism Value: A. thaliana
  misc_feature: MA Experiment 20000166 PARAMETER Experiment Name: At_100uM_ABA_P Parameter: Plant Line Value: WS
  misc_feature: MA Experiment 20000166 PARAMETER Experiment Name: At_100uM_ABA_P Parameter: Timepoint (hr) Value: 1
  misc_feature: MA Experiment 20000166 PARAMETER Experiment Name: At_100uM_ABA_P Parameter: Tissue Value: Aerial
  misc_feature: MA Experiment 20000166 PARAMETER Experiment Name: At_100uM_ABA_P Parameter: Treatment Value: 100uM ABA vs. No Treatment
  misc_feature: MA Experiment ID: 20000169 Result: Up-regulated in Transcription
  misc_feature: MA Experiment 20000169 PARAMETER Experiment Name: At_100uM_ABA_P Parameter: Age (day) Value: 14
  misc_feature: MA Experiment 20000169 PARAMETER Experiment Name: At_100uM_ABA_P Parameter: Organism Value: A. thaliana
  misc_feature: MA Experiment 20000169 PARAMETER Experiment Name: At_100uM_ABA_P Parameter: Plant Line Value: WS
  misc_feature: MA Experiment 20000169 PARAMETER Experiment Name: At_100uM_ABA_P Parameter: Timepoint (hr) Value: 6
  misc_feature: MA Experiment 20000169 PARAMETER Experiment Name: At_100uM_ABA_P Parameter: Tissue Value: Aerial
  misc_feature: MA Experiment 20000169 PARAMETER Experiment Name: At_100uM_ABA_P Parameter: Treatment Value: 100uM ABA vs. No Treatment
  misc_feature: MA Experiment ID: 20000173 Result: Down-regulated in Transcription
  misc_feature: MA Experiment 20000173 PARAMETER Experiment Name: At_42deg_Heat_P Parameter: Age (day) Value: 14
  misc_feature: MA Experiment 20000173 PARAMETER Experiment Name: At_42deg_Heat_P Parameter: Organism Value: A. thaliana
  misc_feature: MA Experiment 20000173 PARAMETER Experiment Name: At_42deg_Heat_P Parameter: Plant Line Value: WS
  misc_feature: MA Experiment 20000173 PARAMETER Experiment Name: At_42deg_Heat_P Parameter: Temperature (deg C) Value: 42 vs. 22
  misc_feature: MA Experiment 20000173 PARAMETER Experiment Name: At_42deg_Heat_P Parameter: Timepoint (hr) Value: 6
  misc_feature: MA Experiment 20000173 PARAMETER Experiment Name: At_42deg_Heat_P Parameter: Tissue Value: Aerial
  misc_feature: MA Experiment ID: 20000179 Result: Down-regulated in Transcription
  misc_feature: MA Experiment 20000179 PARAMETER Experiment Name: At_Germinating_Seeds_P Parameter: Age (hr) Value: 6 vs. 0
  misc_feature: MA Experiment 20000179 PARAMETER Experiment Name: At_Germinating_Seeds_P Parameter: Tissue Value: Germinating Seeds
  misc_feature: MA Experiment ID: 20000234 Result: Down-regulated in Transcription
  misc_feature: MA Experiment 20000234 PARAMETER Experiment Name: At_Siliques_P Parameter: Age (day) Value: 21
  misc_feature: MA Experiment 20000234 PARAMETER Experiment Name: At_Siliques_P Parameter: Organism Value: A. thaliana
  misc_feature: MA Experiment 20000234 PARAMETER Experiment Name: At_Siliques_P Parameter: Plant Line Value: WS
  misc_feature: MA Experiment 20000234 PARAMETER Experiment Name: At_Siliques_P Parameter: Tissue Value: Less Than 5mm Siliques vs. Whole Plant
  misc_feature: MA Experiment ID: 20000235 Result: Down-regulated in Transcription
  misc_feature: MA Experiment 20000235 PARAMETER Experiment Name: At_Siliques_P Parameter: Age (day) Value: 21
  misc_feature: MA Experiment 20000235 PARAMETER Experiment Name: At_Siliques_P Parameter: Organism Value: A. thaliana
  misc_feature: MA Experiment 20000235 PARAMETER Experiment Name: At_Siliques_P Parameter: Plant Line Value: WS
  misc_feature: MA Experiment 20000235 PARAMETER Experiment Name: At_Siliques_P Parameter: Tissue Value: 5-10mm Siliques vs. Whole Plant
  misc_feature: MA Experiment ID: 20000264 Result: Down-regulated in Transcription
  misc_feature: MA Experiment 20000264 PARAMETER Experiment Name: At_Open_Flower_P Parameter: Age (day) Value: 21
  misc_feature: MA Experiment 20000264 PARAMETER Experiment Name: At_Open_Flower_P Parameter: Plant Line Value: WS
  misc_feature: MA Experiment 20000264 PARAMETER Experiment Name: At_Open_Flower_P Parameter: Tissue Value: Open Flower vs. Whole Plant
  misc_feature: MA Experiment ID: 20000265 Result: Down-regulated in Transcription
  misc_feature: MA Experiment 20000265 PARAMETER Experiment Name: At_Open_Flower_P Parameter: Age (day) Value: 21
  misc_feature: MA Experiment 20000265 PARAMETER Experiment Name: At_Open_Flower_P Parameter: Plant Line Value: WS
  misc_feature: MA Experiment 20000265 PARAMETER Experiment Name: At_Open_Flower_P Parameter: Tissue Value: Closed Flower vs. Whole Plant
  misc_feature: MA Experiment ID: 20000268 Result: Down-regulated in Transcription
  misc_feature: MA Experiment 20000268 PARAMETER Experiment Name: At_100mM_NaCl__P Parameter: Age (day) Value: 14
  misc_feature: MA Experiment 20000268 PARAMETER Experiment Name: At_100mM_NaCl__P Parameter: Organism Value: A. thaliana
  misc_feature: MA Experiment 20000268 PARAMETER Experiment Name: At_100mM_NaCl__P Parameter: Plant Line Value: WS
  misc_feature: MA Experiment 20000268 PARAMETER Experiment Name: At_100mM_NaCl__P Parameter: Timepoint (hr) Value: 6
  misc_feature: MA Experiment 20000268 PARAMETER Experiment Name: At_100mM_NaCl__P Parameter: Tissue Value: Whole Plant
  misc_feature: MA Experiment 20000268 PARAMETER Experiment Name: At_100mM_NaCl__P Parameter: Treatment Value: 100mM NaCl vs. No Treatment
  misc_feature: MA Experiment ID: 20000286 Result: Down-regulated in Transcription
  misc_feature: MA Experiment 20000286 PARAMETER Experiment Name: At_Open_Flower_P Parameter: Age (day) Value: 21
  misc_feature: MA Experiment 20000286 PARAMETER Experiment Name: At_Open_Flower_P Parameter: Plant Line Value: WS
  misc_feature: MA Experiment 20000286 PARAMETER Experiment Name: At_Open_Flower_P Parameter: Tissue Value: Half Open vs. Whole Plant
  misc_feature: MA Experiment ID: 20000308 Result: Down-regulated in Transcription
  misc_feature: MA Experiment 20000308 PARAMETER Experiment Name: At_100mM_NaCl__P Parameter: Age (day) Value: 17
  misc_feature: MA Experiment 20000308 PARAMETER Experiment Name: At_100mM_NaCl__P Parameter: Organism Value: A. thaliana
  misc_feature: MA Experiment 20000308 PARAMETER Experiment Name: At_100mM_NaCl__P Parameter: Plant Line Value: WS
  misc_feature: MA Experiment 20000308 PARAMETER Experiment Name: At_100mM_NaCl__P Parameter: Timepoint (hr) Value: 72
  misc_feature: MA Experiment 20000308 PARAMETER Experiment Name: At_100mM_NaCl__P Parameter: Tissue Value: Whole Plant
  misc_feature: MA Experiment 20000308 PARAMETER Experiment Name: At_100mM_NaCl__P Parameter: Treatment Value: 100mM NaCl vs. No Treatment
  misc_feature: MA Experiment ID: 20000438 Result: Down-regulated in Transcription
  misc_feature: MA Experiment 20000438 PARAMETER Experiment Name: At_Shoots__P Parameter: Age (day) Value: 14
  misc_feature: MA Experiment 20000438 PARAMETER Experiment Name: At_Shoots__P Parameter: Tissue Value: Shoots vs. Whole Plant
  misc_feature: MA Experiment ID: 20000439 Result: Down-regulated in Transcription
  misc_feature: MA Experiment 20000439 PARAMETER Experiment Name: At_Roots__P Parameter: Age (day) Value: 14 vs. 21
  misc_feature: MA Experiment 20000439 PARAMETER Experiment Name: At_Roots__P Parameter: Organism Value: A. thaliana
  misc_feature: MA Experiment 20000439 PARAMETER Experiment Name: At_Roots__P Parameter: Tissue Value: Roots vs. Whole Plant
  misc_feature: MA Experiment ID: 20000441 Result: Up-regulated in Transcription
  misc_feature: MA Experiment 20000441 PARAMETER Experiment Name: At_1uM_BR-BRZ__P Parameter: Tissue Value: Shoot Apices
  misc_feature: MA Experiment 20000441 PARAMETER Experiment Name: At_1uM_BR-BRZ__P Parameter: Treatment Value: 1uM BR vs. No Treatment
  misc_feature: MA Experiment ID: 20000456 Result: Down-regulated in Transcription
  misc_feature: MA Experiment 20000456 PARAMETER Experiment Name: At_100uM_BA_P Parameter: Age (day) Value: 14
  misc_feature: MA Experiment 20000456 PARAMETER Experiment Name: At_100uM_BA_P Parameter: Organism Value: A. thaliana
  misc_feature: MA Experiment 20000456 PARAMETER Experiment Name: At_100uM_BA_P Parameter: Plant Line Value: WS
  misc_feature: MA Experiment 20000456 PARAMETER Experiment Name: At_100uM_BA_P Parameter: Timepoint (hr) Value: 6
  misc_feature: MA Experiment 20000456 PARAMETER Experiment Name: At_100uM_BA_P Parameter: Tissue Value: Aerial
  misc_feature: MA Experiment 20000456 PARAMETER Experiment Name: At_100uM_BA_P Parameter: Treatment Value: 100uM BA vs. No Treatment
  misc_feature: MA Experiment ID: 20000460 Result: Up-regulated in Transcription
  misc_feature: MA Experiment 20000460 PARAMETER Experiment Name: At_10percent_PEG_P Parameter: Age (day) Value: 12
  misc_feature: MA Experiment 20000460 PARAMETER Experiment Name: At_10percent_PEG_P Parameter: Organism Value: A. thaliana
  misc_feature: MA Experiment 20000460 PARAMETER Experiment Name: At_10percent_PEG_P Parameter: Plant Line Value: WS
  misc_feature: MA Experiment 20000460 PARAMETER Experiment Name: At_10percent_PEG_P Parameter: Timepoint (day) Value: 12
  misc_feature: MA Experiment 20000460 PARAMETER Experiment Name: At_10percent_PEG_P Parameter: Tissue Value: Whole Plant
  misc_feature: MA Experiment 20000460 PARAMETER Experiment Name: At_10percent_PEG_P Parameter: Treatment Value: 10percent PEG vs. No Treatment
  misc_feature: MA Experiment ID: 20000495 Result: Down-regulated in Transcription
  misc_feature: MA Experiment 20000495 PARAMETER Experiment Name: At_Guard_Cells_P Parameter: Harvest Date Value: 8/2/2002
  misc_feature: MA Experiment 20000495 PARAMETER Experiment Name: At_Guard_Cells_P Parameter: Organism Value: A. thaliana
  misc_feature: MA Experiment 20000495 PARAMETER Experiment Name: At_Guard_Cells_P Parameter: Tissue Value: Guard Cells vs. Leaves
  misc_feature: MA Experiment ID: 20000527 Result: Up-regulated in Transcription
  misc_feature: MA Experiment 20000527 PARAMETER Experiment Name: At_10percent_PEG_P Parameter: Age (day) Value: 20
  misc_feature: MA Experiment 20000527 PARAMETER Experiment Name: At_10percent_PEG_P Parameter: Organism Value: A. thaliana
  misc_feature: MA Experiment 20000527 PARAMETER Experiment Name: At_10percent_PEG_P Parameter: Plant Line Value: WS
  misc_feature: MA Experiment 20000527 PARAMETER Experiment Name: At_10percent_PEG_P Parameter: Timepoint (day) Value: 20
  misc_feature: MA Experiment 20000527 PARAMETER Experiment Name: At_10percent_PEG_P Parameter: Tissue Value: Whole Plant
  misc_feature: MA Experiment 20000527 PARAMETER Experiment Name: At_10percent_PEG_P Parameter: Treatment Value: 10percent PEG vs. No Treatment
  misc_feature: MA Experiment ID: 20000573 Result: Down-regulated in Transcription
  misc_feature: MA Experiment 20000573 PARAMETER Experiment Name: At_100uM_ABA_Mutants__P Parameter: Organism Value: A. thaliana
  misc_feature: MA Experiment 20000573 PARAMETER Experiment Name: At_100uM_ABA_Mutants__P Parameter: Plant Line Value: CS22 vs. Ler wt
  misc_feature: MA Experiment 20000573 PARAMETER Experiment Name: At_100uM_ABA_Mutants__P Parameter: Timepoint (hr) Value: N/A
  misc_feature: MA Experiment 20000573 PARAMETER Experiment Name: At_100uM_ABA_Mutants__P Parameter: Tissue Value: Whole Plant
  misc_feature: MA Experiment 20000573 PARAMETER Experiment Name: At_100uM_ABA_Mutants__P Parameter: Treatment Value: None
  misc_feature: MA Experiment ID: 20000574 Result: Down-regulated in Transcription
  misc_feature: MA Experiment 20000574 PARAMETER Experiment Name: At_100uM_ABA_Mutants__P Parameter: Organism Value: A. thaliana
  misc_feature: MA Experiment 20000574 PARAMETER Experiment Name: At_100uM_ABA_Mutants__P Parameter: Plant Line Value: CS23 vs. Ler wt
  misc_feature: MA Experiment 20000574 PARAMETER Experiment Name: At_100uM_ABA_Mutants__P Parameter: Timepoint (hr) Value: N/A
  misc_feature: MA Experiment 20000574 PARAMETER Experiment Name: At_100uM_ABA_Mutants__P Parameter: Tissue Value: Whole Plant
  misc_feature: MA Experiment 20000574 PARAMETER Experiment Name: At_100uM_ABA_Mutants__P Parameter: Treatment Value: None
  misc_feature: MA Experiment ID: 20001247 Result: Up-regulated in Transcription
  misc_feature: MA Experiment 20001247 PARAMETER Experiment Name: At_Far-red-induction_P Parameter: Age (day) Value: 7
  misc_feature: MA Experiment 20001247 PARAMETER Experiment Name: At_Far-red-induction_P Parameter: Light Value: Far-red vs. White
  misc_feature: MA Experiment 20001247 PARAMETER Experiment Name: At_Far-red-induction_P Parameter: Organism Value: A. thaliana
  misc_feature: MA Experiment 20001247 PARAMETER Experiment Name: At_Far-red-induction_P Parameter: Plant Line Value: Columbia
  misc_feature: MA Experiment 20001247 PARAMETER Experiment Name: At_Far-red-induction_P Parameter: Timepoint (hr) Value: 1
  misc_feature: MA Experiment 20001247 PARAMETER Experiment Name: At_Far-red-induction_P Parameter: Tissue Value: Whole Plant
  misc_feature: MA Experiment ID: 20001248 Result: Up-regulated in Transcription
  misc_feature: MA Experiment 20001248 PARAMETER Experiment Name: At_Far-red-induction_P Parameter: Age (day) Value: 7
  misc_feature: MA Experiment 20001248 PARAMETER Experiment Name: At_Far-red-induction_P Parameter: Light Value: Far-red vs. White
  misc_feature: MA Experiment 20001248 PARAMETER Experiment Name: At_Far-red-induction_P Parameter: Organism Value: A. thaliana
  misc_feature: MA Experiment 20001248 PARAMETER Experiment Name: At_Far-red-induction_P Parameter: Plant Line Value: Columbia
  misc_feature: MA Experiment 20001248 PARAMETER Experiment Name: At_Far-red-induction_P Parameter: Timepoint (hr) Value: 4
  misc_feature: MA Experiment 20001248 PARAMETER Experiment Name: At_Far-red-induction_P Parameter: Tissue Value: Whole Plant
  misc_feature: MA Experiment ID: 20001450 Result: Up-regulated in Transcription
  misc_feature: MA Experiment 20001450 PARAMETER Experiment Name: At_Far-red-induction_P Parameter: Age (day) Value: 7
  misc_feature: MA Experiment 20001450 PARAMETER Experiment Name: At_Far-red-induction_P Parameter: Light Value: Far-red vs. White
  misc_feature: MA Experiment 20001450 PARAMETER Experiment Name: At_Far-red-induction_P Parameter: Organism Value: A. thaliana
  misc_feature: MA Experiment 20001450 PARAMETER Experiment Name: At_Far-red-induction_P Parameter: Plant Line Value: Columbia
  misc_feature: MA Experiment 20001450 PARAMETER Experiment Name: At_Far-red-induction_P Parameter: Timepoint (hr) Value: 8
  misc_feature: MA Experiment 20001450 PARAMETER Experiment Name: At_Far-red-induction_P Parameter: Tissue Value: Whole Plant
  misc_feature: MA Experiment ID: 20001451 Result: Up-regulated in Transcription
  misc_feature: MA Experiment 20001451 PARAMETER Experiment Name: At_Far-red-induction_P Parameter: Age (day) Value: 7
  misc_feature: MA Experiment 20001451 PARAMETER Experiment Name: At_Far-red-induction_P Parameter: Light Value: Far-red vs. White
  misc_feature: MA Experiment 20001451 PARAMETER Experiment Name: At_Far-red-induction_P Parameter: Organism Value: A. thaliana
  misc_feature: MA Experiment 20001451 PARAMETER Experiment Name: At_Far-red-induction_P Parameter: Plant Line Value: Columbia
  misc_feature: MA Experiment 20001451 PARAMETER Experiment Name: At_Far-red-induction_P Parameter: Timepoint (hr) Value: 24
  misc_feature: MA Experiment 20001451 PARAMETER Experiment Name: At_Far-red-induction_P Parameter: Tissue Value: Whole Plant
  misc_feature: MA Experiment ID: 20001555 Result: Down-regulated in Transcription
  misc_feature: MA Experiment 20001555 PARAMETER Experiment Name: At_Drought_Soil_Dry_P Parameter: Age (day) Value: 24
  misc_feature: MA Experiment 20001555 PARAMETER Experiment Name: At_Drought_Soil_Dry_P Parameter: Organism Value: A. thaliana
  misc_feature: MA Experiment 20001555 PARAMETER Experiment Name: At_Drought_Soil_Dry_P Parameter: Plant Line Value: WS
  misc_feature: MA Experiment 20001555 PARAMETER Experiment Name: At_Drought_Soil_Dry_P Parameter: Post Timepoint (hr) Value: None
  misc_feature: MA Experiment 20001555 PARAMETER Experiment Name: At_Drought_Soil_Dry_P Parameter: Post-Treatment Value: None
  misc_feature: MA Experiment 20001555 PARAMETER Experiment Name: At_Drought_Soil_Dry_P Parameter: Timepoint (day) Value: 10
  misc_feature: MA Experiment 20001555 PARAMETER Experiment Name: At_Drought_Soil_Dry_P Parameter: Treatment Value: Drought vs. No Drought
  misc_feature: MA Experiment ID: 20001556 Result: Down-regulated in Transcription
  misc_feature: MA Experiment 20001556 PARAMETER Experiment Name: At_Drought_Soil_Dry_P Parameter: Age (day) Value: 26
  misc_feature: MA Experiment 20001556 PARAMETER Experiment Name: At_Drought_Soil_Dry_P Parameter: Organism Value: A. thaliana
  misc_feature: MA Experiment 20001556 PARAMETER Experiment Name: At_Drought_Soil_Dry_P Parameter: Plant Line Value: WS
  misc_feature: MA Experiment 20001556 PARAMETER Experiment Name: At_Drought_Soil_Dry_P Parameter: Post Timepoint (hr) Value: None
  misc_feature: MA Experiment 20001556 PARAMETER Experiment Name: At_Drought_Soil_Dry_P Parameter: Post-Treatment Value: None
  misc_feature: MA Experiment 20001556 PARAMETER Experiment Name: At_Drought_Soil_Dry_P Parameter: Timepoint (day) Value: 12
  misc_feature: MA Experiment 20001556 PARAMETER Experiment Name: At_Drought_Soil_Dry_P Parameter: Treatment Value: Drought vs. No Drought
  misc_feature: MA Experiment ID: 20001757 Result: Down-regulated in Transcription
  misc_feature: MA Experiment 20001757 PARAMETER Experiment Name: At_50mM_NH4NO3_L-to-H_P Parameter: Timepoint (hr) Value: 6
  misc_feature: MA Experiment 20001757 PARAMETER Experiment Name: At_50mM_NH4NO3_L-to-H_P Parameter: Tissue Value: Leaf
  misc_feature: MA Experiment 20001757 PARAMETER Experiment Name: At_50mM_NH4NO3_L-to-H_P Parameter: Treatment Value: 50mM NH4NO3 vs 100mM Mannitol
  misc_feature: MA Experiment ID: 20001774 Result: Down-regulated in Transcription
  misc_feature: MA Experiment 20001774 PARAMETER Experiment Name: At_Far-red-enriched-adult_P Parameter: Age (day) Value: 31
  misc_feature: MA Experiment 20001774 PARAMETER Experiment Name: At_Far-red-enriched-adult_P Parameter: Light Value: Far-red enriched vs. White
  misc_feature: MA Experiment 20001774 PARAMETER Experiment Name: At_Far-red-enriched-adult_P Parameter: Organism Value: A. thaliana
  misc_feature: MA Experiment 20001774 PARAMETER Experiment Name: At_Far-red-enriched-adult_P Parameter: Plant Line Value: Columbia
  misc_feature: MA Experiment 20001774 PARAMETER Experiment Name: At_Far-red-enriched-adult_P Parameter: Timepoint (hr) Value: 72
  misc_feature: MA Experiment 20001774 PARAMETER Experiment Name: At_Far-red-enriched-adult_P Parameter: Tissue Value: Aerial
  misc_feature: MA Experiment ID: 20001904 Result: Down-regulated in Transcription
  misc_feature: MA Experiment 20001904 PARAMETER Experiment Name: At_Drought_Reproduction_P Parameter: Age (day) Value: 37
  misc_feature: MA Experiment 20001904 PARAMETER Experiment Name: At_Drought_Reproduction_P Parameter: Organism Value: A. thaliana
  misc_feature: MA Experiment 20001904 PARAMETER Experiment Name: At_Drought_Reproduction_P Parameter: Plant Line Value: WS
  misc_feature: MA Experiment 20001904 PARAMETER Experiment Name: At_Drought_Reproduction_P Parameter: Timepoint (day) Value: 7
  misc_feature: MA Experiment 20001904 PARAMETER Experiment Name: At_Drought_Reproduction_P Parameter: Tissue Value: Rosettes
  misc_feature: MA Experiment 20001904 PARAMETER Experiment Name: At_Drought_Reproduction_P Parameter: Treatment Value: Drought vs. No Drought
  misc_feature: MA Experiment ID: 20001906 Result: Down-regulated in Transcription
  misc_feature: MA Experiment 20001906 PARAMETER Experiment Name: At_Drought_Reproduction_P Parameter: Age (day) Value: 35
  misc_feature: MA Experiment 20001906 PARAMETER Experiment Name: At_Drought_Reproduction_P Parameter: Organism Value: A. thaliana
  misc_feature: MA Experiment 20001906 PARAMETER Experiment Name: At_Drought_Reproduction_P Parameter: Plant Line Value: WS
  misc_feature: MA Experiment 20001906 PARAMETER Experiment Name: At_Drought_Reproduction_P Parameter: Timepoint (day) Value: 5
  misc_feature: MA Experiment 20001906 PARAMETER Experiment Name: At_Drought_Reproduction_P Parameter: Tissue Value: Siliques
  misc_feature: MA Experiment 20001906 PARAMETER Experiment Name: At_Drought_Reproduction_P Parameter: Treatment Value: Drought vs. No Drought

SEQ ID NO: 34558 - protein, 320 aa, Arabidopsis thaliana; identical to SEQ ID NO: 24922
  peptide (1)..(320): Ceres Seq. ID no. 12697155
  misc_feature (13)..(59): Pfam Name: Myb-like DNA-binding domain Pfam Description: Myb-like DNA-binding domain
  misc_feature (10)..(292): Homolog of NCBI NO: 2129647 NR Description: myb-related protein, 33.2K - Arabidopsis thaliana
  misc_feature (10)..(292): Homolog of NCBI NO: 2832406 NR Description: R2R3-MYB transcription factor [Arabidopsis
  misc_feature (10)..(298): Homolog of NCBI NO: 2129648 NR Description: myb-related protein, 33.3K - Arabidopsis thaliana
  misc_feature (10)..(298): Homolog of NCBI NO: 21592897 NR Description: myb-related protein, 33.3K [Arabidopsis thaliana]
  misc_feature (10)..(298): Homolog of NCBI NO: 15450393 NR Description: AT5g67300/K8K14_2 [Arabidopsis thaliana]
  misc_feature (10)..(298): Homolog of NCBI NO: 15240708 NR Description: myb family transcription factor
  misc_feature (1)..(320): Homolog of NCBI NO: 15227806 NR Description: MYB family transcription factor
  misc_feature (1)..(320): Homolog of NCBI NO: 21593586 NR Description: putative MYB family transcription factor
  misc_feature (53)..(320): Homolog of NCBI NO: 11358558 NR Description: myb-related transcription factor MYB73
  misc_feature (1)..(320): Homolog of NCBI NO: 15235484 NR Description: myb DNA-binding protein (AtMYB73)

SEQ ID NO: 34559 - protein, 312 aa, Arabidopsis thaliana; identical to SEQ ID NO: 24923
  peptide (1)..(312): Ceres Seq. ID no. 12697156
  misc_feature (5)..(51): Pfam Name: Myb-like DNA-binding domain Pfam Description: Myb-like DNA-binding domain
  misc_feature (2)..(284): Homolog of NCBI NO: 2129647 NR Description: myb-related protein, 33.2K - Arabidopsis thaliana
  misc_feature (2)..(284): Homolog of NCBI NO: 2832406 NR Description: R2R3-MYB transcription factor [Arabidopsis
  misc_feature (2)..(290): Homolog of NCBI NO: 2129648 NR Description: myb-related protein, 33.3K - Arabidopsis thaliana
  misc_feature (2)..(290): Homolog of NCBI NO: 21592897 NR Description: myb-related protein, 33.3K [Arabidopsis thaliana]
  misc_feature (2)..(290): Homolog of NCBI NO: 15450393 NR Description: AT5g67300/K8K14_2 [Arabidopsis thaliana]
  misc_feature (2)..(290): Homolog of NCBI NO: 15240708 NR Description: myb family transcription factor
  misc_feature (1)..(312): Homolog of NCBI NO: 15227806 NR Description: MYB family transcription factor
  misc_feature (1)..(312): Homolog of NCBI NO: 21593586 NR Description: putative MYB family transcription factor
  misc_feature (45)..(312): Homolog of NCBI NO: 11358558 NR Description: myb-related transcription factor MYB73
  misc_feature (1)..(312): Homolog of NCBI NO: 15235484 NR Description: myb DNA-binding protein (AtMYB73)

SEQ ID NO: 34560 - protein, 166 aa, Arabidopsis thaliana; identical to SEQ ID NO: 24924
  peptide (1)..(166): Ceres Seq. ID no. 12697157
  misc_feature (1)..(138): Homolog of NCBI NO: 2129647 NR Description: myb-related protein, 33.2K - Arabidopsis thaliana
  misc_feature (1)..(138): Homolog of NCBI NO: 2832406 NR Description: R2R3-MYB transcription factor [Arabidopsis
  misc_feature (1)..(144): Homolog of NCBI NO: 2129648 NR Description: myb-related protein, 33.3K - Arabidopsis thaliana
  misc_feature (1)..(144): Homolog of NCBI NO: 21592897 NR Description: myb-related protein, 33.3K [Arabidopsis thaliana]
  misc_feature (1)..(144): Homolog of NCBI NO: 15450393 NR Description: AT5g67300/K8K14_2 [Arabidopsis thaliana]
  misc_feature (1)..(144): Homolog of NCBI NO: 15240708 NR Description: myb family transcription factor
  misc_feature (1)..(166): Homolog of NCBI NO: 15227806 NR Description: MYB family transcription factor
  misc_feature (1)..(166): Homolog of NCBI NO: 21593586 NR Description: putative MYB family transcription factor
  misc_feature (1)..(166): Homolog of NCBI NO: 11358558 NR Description: myb-related transcription factor MYB73
  misc_feature (1)..(166): Homolog of NCBI NO: 15235484 NR Description: myb DNA-binding protein (AtMYB73)

SEQ ID NO: 34561 - DNA, 1117 bp, Arabidopsis thaliana; identical to SEQ ID NO: 30971
  misc_feature (1)..(1117): Ceres Seq. ID no. 12321756
  misc_feature: MA Experiment ID: 108573 Result: Up-regulated in Transcription
  misc_feature: MA Experiment 108573 PARAMETER Experiment Name: At_Drought_cDNA_P Parameter: Timepoint (hr) Value: 6
  misc_feature: MA Experiment 108573 PARAMETER Experiment Name: At_Drought_cDNA_P Parameter: Tissue Value: Aerial
  misc_feature: MA Experiment 108573 PARAMETER Experiment Name: At_Drought_cDNA_P Parameter: Treatment Value: Drought vs. No Drought
  misc_feature: MA Experiment ID: 108579 Result: Down-regulated in Transcription
  misc_feature: MA Experiment 108579 PARAMETER Experiment Name: At_4deg_Cold_cDNA_P Parameter: Temperature (deg C) Value: 4 vs. 22
  misc_feature: MA Experiment 108579 PARAMETER Experiment Name: At_4deg_Cold_cDNA_P Parameter: Timepoint (hr) Value: 6
  misc_feature: MA Experiment 108579 PARAMETER Experiment Name: At_4deg_Cold_cDNA_P Parameter: Tissue Value: Aerial
  misc_feature: MA Experiment ID: 20000227 Result: Down-regulated in Transcription
  misc_feature: MA Experiment 20000227 PARAMETER Experiment Name: At_Root-Tips-vs-Tops_P Parameter: Tissue Value: Root Tips vs. Root Tops
  misc_feature: MA Experiment ID: 20001248 Result: Up-regulated in Transcription
  misc_feature: MA Experiment 20001248 PARAMETER Experiment Name: At_Far-red-induction_P Parameter: Age (day) Value: 7
  misc_feature: MA Experiment 20001248 PARAMETER Experiment Name: At_Far-red-induction_P Parameter: Light Value: Far-red vs. White
  misc_feature: MA Experiment 20001248 PARAMETER Experiment Name: At_Far-red-induction_P Parameter: Organism Value: A. thaliana
  misc_feature: MA Experiment 20001248 PARAMETER Experiment Name: At_Far-red-induction_P Parameter: Plant Line Value: Columbia
  misc_feature: MA Experiment 20001248 PARAMETER Experiment Name: At_Far-red-induction_P Parameter: Timepoint (hr) Value: 4
  misc_feature: MA Experiment 20001248 PARAMETER Experiment Name: At_Far-red-induction_P Parameter: Tissue Value: Whole Plant
  misc_feature: MA Experiment ID: 20001450 Result: Up-regulated in Transcription
  misc_feature: MA Experiment 20001450 PARAMETER Experiment Name: At_Far-red-induction_P Parameter: Age (day) Value: 7
  misc_feature: MA Experiment 20001450 PARAMETER Experiment Name: At_Far-red-induction_P Parameter: Light Value: Far-red vs. White
  misc_feature: MA Experiment 20001450 PARAMETER Experiment Name: At_Far-red-induction_P Parameter: Organism Value: A. thaliana
  misc_feature: MA Experiment 20001450 PARAMETER Experiment Name: At_Far-red-induction_P Parameter: Plant Line Value: Columbia
  misc_feature: MA Experiment 20001450 PARAMETER Experiment Name: At_Far-red-induction_P Parameter: Timepoint (hr) Value: 8
  misc_feature: MA Experiment 20001450 PARAMETER Experiment Name: At_Far-red-induction_P Parameter: Tissue Value: Whole Plant

SEQ ID NO: 34562 - protein, 256 aa, Arabidopsis thaliana; identical to SEQ ID NO: 30972
  peptide (1)..(256): Ceres Seq. ID no. 12321757
  misc_feature (18)..(175): Homolog of NCBI NO: 37535894 NR Description: putative vesicle-associated membrane protein
  misc_feature (13)..(173): Homolog of NCBI NO: 25405451 NR Description: hypothetical protein F11M15.13 [imported] -
  misc_feature (13)..(173): Homolog of NCBI NO: 15223792 NR Description: unknown protein; protein id: At1g51270.1
  misc_feature (17)..(255): Homolog of NCBI NO: 21592874 NR Description: putative proline-rich protein [Arabidopsis
  misc_feature (17)..(255): Homolog of NCBI NO: 18411240 NR Description: putative proline-rich protein
  misc_feature (17)..(256): Homolog of NCBI NO: 11288307 NR Description: 27k vesicle-associated membrane
  misc_feature (17)..(256): Homolog of NCBI NO: 15225415 NR Description: putative VAMP-associated protein
  misc_feature (17)..(256): Homolog of NCBI NO: 21554053 NR Description: putative VAMP-associated protein [Arabidopsis
  misc_feature (1)..(256): Homolog of NCBI NO: 11288305 NR Description: hypothetical protein T4C21.10 - Arabidopsis
  misc_feature (1)..(256): Homolog of NCBI NO: 18411661 NR Description: putative protein

SEQ ID NO: 34563 - protein, 248 aa, Arabidopsis thaliana; identical to SEQ ID NO: 30973
  peptide (1)..(248): Ceres Seq. ID no. 12321758
  misc_feature (10)..(167): Homolog of NCBI NO: 37535894 NR Description: putative vesicle-associated membrane protein
  misc_feature (5)..(165): Homolog of NCBI NO: 25405451 NR Description: hypothetical protein F11M15.13 [imported] -
  misc_feature (5)..(165): Homolog of NCBI NO: 15223792 NR Description: unknown protein; protein id: At1g51270.1
  misc_feature (9)..(247): Homolog of NCBI NO: 21592874 NR Description: putative proline-rich protein [Arabidopsis
  misc_feature (9)..(247): Homolog of NCBI NO: 18411240 NR Description: putative proline-rich protein
  misc_feature (9)..(248): Homolog of NCBI NO: 11288307 NR Description: 27k vesicle-associated membrane
  misc_feature (9)..(248): Homolog of NCBI NO: 15225415 NR Description: putative VAMP-associated protein
  misc_feature (9)..(248): Homolog of NCBI NO: 21554053 NR Description: putative VAMP-associated protein [Arabidopsis
  misc_feature (1)..(248): Homolog of NCBI NO: 11288305 NR Description: hypothetical protein T4C21.10 - Arabidopsis
  misc_feature (1)..(248): Homolog of NCBI NO: 18411661 NR Description: putative protein

SEQ ID NO: 34564 - protein, 240 aa, Arabidopsis thaliana; identical to SEQ ID NO: 30974
  peptide (1)..(240): Ceres Seq. ID no. 12321759
  misc_feature (2)..(159): Homolog of NCBI NO: 37535894 NR Description: putative vesicle-associated membrane protein
  misc_feature (1)..(157): Homolog of NCBI NO: 25405451 NR Description: hypothetical protein F11M15.13 [imported] -
  misc_feature (1)..(157): Homolog of NCBI NO: 15223792 NR Description: unknown protein; protein id: At1g51270.1
  misc_feature (1)..(239): Homolog of NCBI NO: 21592874 NR Description: putative proline-rich protein [Arabidopsis
  misc_feature (1)..(239): Homolog of NCBI NO: 18411240 NR Description: putative proline-rich protein
  misc_feature (1)..(240): Homolog of NCBI NO: 11288307 NR Description: 27k vesicle-associated membrane
  misc_feature (1)..(240): Homolog of NCBI NO: 15225415 NR Description: putative VAMP-associated protein
  misc_feature (1)..(240): Homolog of NCBI NO: 21554053 NR Description: putative VAMP-associated protein [Arabidopsis
  misc_feature (1)..(240): Homolog of NCBI NO: 11288305 NR Description: hypothetical protein T4C21.10 - Arabidopsis
  misc_feature (1)..(240): Homolog of NCBI NO: 18411661 NR Description: putative protein

SEQ ID NO: 34565 - DNA, 1433 bp, Arabidopsis thaliana; identical to SEQ ID NO: 30975
  misc_feature (1)..(1433): Ceres Seq. ID no. 12324574
  misc_feature: MA Experiment ID: 108463 Result: Up-regulated in Transcription
  misc_feature: MA Experiment 108463 PARAMETER Experiment Name: At_Germinating_Seeds_cDNA_P Parameter: Age (day) Value: 3 vs. 0
  misc_feature: MA Experiment 108463 PARAMETER Experiment Name: At_Germinating_Seeds_cDNA_P Parameter: Tissue Value: Germinating Seeds
  misc_feature: MA Experiment ID: 108579 Result: Down-regulated in Transcription
  misc_feature: MA Experiment 108579 PARAMETER Experiment Name: At_4deg_Cold_cDNA_P Parameter: Temperature (deg C) Value: 4 vs. 22
  misc_feature: MA Experiment 108579 PARAMETER Experiment Name: At_4deg_Cold_cDNA_P Parameter: Timepoint (hr) Value: 6
  misc_feature: MA Experiment 108579 PARAMETER Experiment Name: At_4deg_Cold_cDNA_P Parameter: Tissue Value: Aerial
  misc_feature: MA Experiment ID: 20001248 Result: Up-regulated in Transcription
  misc_feature: MA Experiment 20001248 PARAMETER Experiment Name: At_Far-red-induction_P Parameter: Age (day) Value: 7
  misc_feature: MA Experiment 20001248 PARAMETER Experiment Name: At_Far-red-induction_P Parameter: Light Value: Far-red vs. White
  misc_feature: MA Experiment 20001248 PARAMETER Experiment Name: At_Far-red-induction_P Parameter: Organism Value: A. thaliana
  misc_feature: MA Experiment 20001248 PARAMETER Experiment Name: At_Far-red-induction_P Parameter: Plant Line Value: Columbia
  misc_feature: MA Experiment 20001248 PARAMETER Experiment Name: At_Far-red-induction_P Parameter: Timepoint (hr) Value: 4
  misc_feature: MA Experiment 20001248 PARAMETER Experiment Name: At_Far-red-induction_P Parameter: Tissue Value: Whole Plant

SEQ ID NO: 34566 - protein, 383 aa, Arabidopsis thaliana; identical to SEQ ID NO: 30976
  peptide (1)..(383): Ceres Seq. ID no. 12324575
  misc_feature (64)..(303): Pfam Name: LEM3 (ligand-effect modulator 3) family / CDC50 family Pfam Description: LEM3 (ligand-effect modulator 3) family / CDC50
  misc_feature (20)..(304): Homolog of NCBI NO: 19570056 NR Description: similar to membrane protein common family
  misc_feature (29)..(303): Homolog of NCBI NO: 25347301 NR Description: T8K14.13 [imported] - Arabidopsis thaliana
  misc_feature (41)..(303): Homolog of NCBI NO: 15219220 NR Description: membrane protein common family; protein id:
  misc_feature (28)..(303): Homolog of NCBI NO: 25347303 NR Description: protein F3O9.16 [imported] - Arabidopsis thaliana
  misc_feature (13)..(303): Homolog of NCBI NO: 18399730 NR Description: membrane protein common family
  misc_feature (20)..(303): Homolog of NCBI NO: 18412377 NR Description: membrane protein common family
  misc_feature (15)..(303): Homolog of NCBI NO: 18404877 NR Description: membrane protein common family
  misc_feature (1)..(303): Homolog of NCBI NO: 9757735 NR Description: gb|AAD25612.1~gene_id:MCL19.21~similar to unknown
  misc_feature (8)..(303): Homolog of NCBI NO: 21554054 NR Description: unknown [Arabidopsis thaliana]
  misc_feature (1)..(303): Homolog of NCBI NO: 18422638 NR Description: membrane protein common family

SEQ ID NO: 34567 - protein, 382 aa, Arabidopsis thaliana; identical to SEQ ID NO: 30977
  peptide (1)..(382): Ceres Seq. ID no. 12324576
  misc_feature (63)..(302): Pfam Name: LEM3 (ligand-effect modulator 3) family / CDC50 family Pfam Description: LEM3 (ligand-effect modulator 3) family / CDC50
  misc_feature (19)..(303): Homolog of NCBI NO: 19570056 NR Description: similar to membrane protein common family
  misc_feature (28)..(302): Homolog of NCBI NO: 25347301 NR Description: T8K14.13 [imported] - Arabidopsis thaliana
  misc_feature (40)..(302): Homolog of NCBI NO: 15219220 NR Description: membrane protein common family; protein id:
  misc_feature (27)..(302): Homolog of NCBI NO: 25347303 NR Description: protein F3O9.16 [imported] - Arabidopsis thaliana
  misc_feature (12)..(302): Homolog of NCBI NO: 18399730 NR Description: membrane protein common family
  misc_feature (19)..(302): Homolog of NCBI NO: 18412377 NR Description: membrane protein common family
  misc_feature (14)..(302): Homolog of NCBI NO: 18404877 NR Description: membrane protein common family
  misc_feature (1)..(302): Homolog of NCBI NO: 9757735 NR Description: gb|AAD25612.1~gene_id:MCL19.21~similar to unknown
  misc_feature (7)..(302): Homolog of NCBI NO: 21554054 NR Description: unknown [Arabidopsis thaliana]
  misc_feature (1)..(302): Homolog of NCBI NO: 18422638 NR Description: membrane protein common family

SEQ ID NO: 34568 - protein, 376 aa, Arabidopsis thaliana; identical to SEQ ID NO: 30978
  peptide (1)..(376): Ceres Seq. ID no. 12324577
  misc_feature (57)..(296): Pfam Name: LEM3 (ligand-effect modulator 3) family / CDC50 family Pfam Description: LEM3 (ligand-effect modulator 3) family / CDC50
  misc_feature (13)..(297): Homolog of NCBI NO: 19570056 NR Description: similar to membrane protein common family
  misc_feature (22)..(296): Homolog of NCBI NO: 25347301 NR Description: T8K14.13 [imported] - Arabidopsis thaliana
  misc_feature (34)..(296): Homolog of NCBI NO: 15219220 NR Description: membrane protein common family; protein id:
  misc_feature (21)..(296): Homolog of NCBI NO: 25347303 NR Description: protein F3O9.16 [imported] - Arabidopsis thaliana
  misc_feature (6)..(296): Homolog of NCBI NO: 18399730 NR Description: membrane protein common family
  misc_feature (13)..(296): Homolog of NCBI NO: 18412377 NR Description: membrane protein common family
  misc_feature (8)..(296): Homolog of NCBI NO: 18404877 NR Description: membrane protein common family
  misc_feature (1)..(296): Homolog of NCBI NO: 9757735 NR Description: gb|AAD25612.1~gene_id:MCL19.21~similar to unknown
  misc_feature (1)..(296): Homolog of NCBI NO: 21554054 NR Description: unknown [Arabidopsis thaliana]
  misc_feature (1)..(296): Homolog of NCBI NO: 18422638 NR Description: membrane protein common family

SEQ ID NO: 34569 - DNA, 822 bp, Arabidopsis thaliana; identical to SEQ ID NO: 30979
  misc_feature (1)..(822): Ceres Seq. ID no. 12321976
  misc_feature: MA Experiment ID: 108461 Result: Up-regulated in Transcription
  misc_feature: MA Experiment 108461 PARAMETER Experiment Name: At_Germinating_Seeds_cDNA_P Parameter: Age (day) Value: 1 vs. 0
  misc_feature: MA Experiment 108461 PARAMETER Experiment Name: At_Germinating_Seeds_cDNA_P Parameter: Tissue Value: Germinating Seeds
  misc_feature: MA Experiment ID: 20000179 Result: Up-regulated in Transcription
  misc_feature: MA Experiment 20000179 PARAMETER Experiment Name: At_Germinating_Seeds_P Parameter: Age (hr) Value: 6 vs. 0
  misc_feature: MA Experiment 20000179 PARAMETER Experiment Name: At_Germinating_Seeds_P Parameter: Tissue Value: Germinating Seeds
  misc_feature: MA Experiment ID: 20000224 Result: Down-regulated in Transcription

SEQ ID NO: 34570 - protein, 215 aa, Arabidopsis thaliana; identical to SEQ ID NO: 30980
  peptide (1)..(215): Ceres Seq. ID no. 12321977
  misc_feature (96)..(215): Homolog of NCBI NO: 16802555 NR Description: lmo0512 [Listeria monocytogenes EGD-e]
  misc_feature (96)..(215): Homolog of NCBI NO: 23098421 NR Description: hypothetical protein [Oceanobacillus iheyensis
  misc_feature (97)..(215): Homolog of NCBI NO: 23098097 NR Description: hypothetical protein [Oceanobacillus iheyensis
  misc_feature (95)..(215): Homolog of NCBI NO: 37520060 NR Description: hypothetical protein glr0491 [Gloeobacter
  misc_feature (36)..(172): Homolog of NCBI NO: 34912624 NR Description: P0410E01.16 [Oryza sativa (japonica
  misc_feature (136)..(173): Homolog of NCBI NO: 25373109 NR Description: F28N24.25 protein - Arabidopsis thaliana
  misc_feature (18)..(110): Homolog of NCBI NO: 25373109 NR Description: F28N24.25 protein - Arabidopsis thaliana
  misc_feature (18)..(215): Homolog of NCBI NO: 30690579 NR Description: expressed protein [Arabidopsis thaliana]
  misc_feature (19)..(215): Homolog of NCBI NO: 21954066 NR Description: unknown protein [Arabidopsis thaliana]
  misc_feature (18)..(215): Homolog of NCBI NO: 18396927 NR Description: expressed protein

SEQ ID NO: 34571 - protein, 198 aa, Arabidopsis thaliana; identical to SEQ ID NO: 30981
  peptide (1)..(198): Ceres Seq. ID no. 12321978
  misc_feature (79)..(198): Homolog of NCBI NO: 16802555 NR Description: lmo0512 [Listeria monocytogenes EGD-e]
  misc_feature (79)..(198): Homolog of NCBI NO: 23098421 NR Description: hypothetical protein [Oceanobacillus iheyensis
  misc_feature (80)..(198): Homolog of NCBI NO: 23098097 NR Description: hypothetical protein [Oceanobacillus iheyensis
  misc_feature (78)..(198): Homolog of NCBI NO: 37520060 NR Description: hypothetical protein glr0491 [Gloeobacter
  misc_feature (19)..(155): Homolog of NCBI NO: 34912624 NR Description: P0410E01.16 [Oryza sativa (japonica
  misc_feature (119)..(156): Homolog of NCBI NO: 25373109 NR Description: F28N24.25 protein - Arabidopsis thaliana
  misc_feature (1)..(93): Homolog of NCBI NO: 25373109 NR Description: F28N24.25 protein - Arabidopsis thaliana
  misc_feature (1)..(198): Homolog of NCBI NO: 30690579 NR Description: expressed protein [Arabidopsis thaliana]
  misc_feature (2)..(198): Homolog of NCBI NO: 21954066 NR Description: unknown protein [Arabidopsis thaliana]
  misc_feature (1)..(198): Homolog of NCBI NO: 18396927 NR Description: expressed protein

SEQ ID NO: 34572 - protein, 137 aa, Arabidopsis thaliana; identical to SEQ ID NO: 30982
  peptide (1)..(137): Ceres Seq. ID no. 12321979
  misc_feature (18)..(137): Homolog of NCBI NO: 16802555 NR Description: lmo0512 [Listeria monocytogenes EGD-e]
  misc_feature (18)..(137): Homolog of NCBI NO: 23098421 NR Description: hypothetical protein [Oceanobacillus iheyensis
  misc_feature (19)..(137): Homolog of NCBI NO: 23098097 NR Description: hypothetical protein [Oceanobacillus iheyensis
  misc_feature (17)..(137): Homolog of NCBI NO: 37520060 NR Description: hypothetical protein glr0491 [Gloeobacter
  misc_feature (1)..(94): Homolog of NCBI NO: 34912624 NR Description: P0410E01.16 [Oryza sativa (japonica
  misc_feature (58)..(95): Homolog of NCBI NO: 25373109 NR Description: F28N24.25 protein - Arabidopsis thaliana
  misc_feature (1)..(32): Homolog of NCBI NO: 25373109 NR Description: F28N24.25 protein - Arabidopsis thaliana
  misc_feature (1)..(137): Homolog of NCBI NO: 30690579 NR Description: expressed protein [Arabidopsis thaliana]
  misc_feature (1)..(137): Homolog of NCBI NO: 21954066 NR Description: unknown protein [Arabidopsis thaliana]
  misc_feature (1)..(137): Homolog of NCBI NO: 18396927 NR Description: expressed protein

SEQ ID NO: 34573 - DNA, 1168 bp, Arabidopsis thaliana; identical to SEQ ID NO: 30983
  misc_feature (1)..(1168): Ceres Seq. ID no. 12324578
  misc_feature: MA Experiment ID: 108434 Result: Down-regulated in Transcription
  misc_feature: MA Experiment 108434 PARAMETER Experiment Name: At_Root_Tips_cDNA_P Parameter: Tissue Value: Root Tips
  misc_feature: MA Experiment ID: 108435 Result: Down-regulated in Transcription
  misc_feature: MA Experiment 108435 PARAMETER Experiment Name: At_stm_Mutants_cDNA_P Parameter: Plant Line Value: wt Landsburg vs stm
  misc_feature: MA Experiment 108435 PARAMETER Experiment Name: At_stm_Mutants_cDNA_P Parameter: Tissue Value: Shoot Apical Meristem Region
  misc_feature: MA Experiment ID: 108462 Result: Up-regulated in Transcription
  misc_feature: MA Experiment 108462 PARAMETER Experiment Name: At_Germinating_Seeds_cDNA_P Parameter: Age (day) Value: 2 vs. 0
  misc_feature: MA Experiment 108462 PARAMETER Experiment Name: At_Germinating_Seeds_cDNA_P Parameter: Tissue Value: Germinating Seeds
  misc_feature: MA Experiment ID: 108463 Result: Up-regulated in Transcription
  misc_feature: MA Experiment 108463 PARAMETER Experiment Name: At_Germinating_Seeds_cDNA_P Parameter: Age (day) Value: 3 vs. 0
  misc_feature: MA Experiment 108463 PARAMETER Experiment Name: At_Germinating_Seeds_cDNA_P Parameter: Tissue Value: Germinating Seeds
  misc_feature: MA Experiment ID: 108464 Result: Up-regulated in Transcription
  misc_feature: MA Experiment 108464 PARAMETER Experiment Name: At_Germinating_Seeds_cDNA_P Parameter: Age (day) Value: 4 vs. 0
  misc_feature: MA Experiment 108464 PARAMETER Experiment Name: At_Germinating_Seeds_cDNA_P Parameter: Tissue Value: Germinating Seeds
  misc_feature: MA Experiment ID: 108561 Result: Down-regulated in Transcription
  misc_feature: MA Experiment 108561 PARAMETER Experiment Name: At_100uM_ABA_cDNA_P Parameter: Timepoint (hr) Value: 6
  misc_feature: MA Experiment 108561 PARAMETER Experiment Name: At_100uM_ABA_cDNA_P Parameter: Tissue Value: Aerial
  misc_feature: MA Experiment 108561 PARAMETER Experiment Name: At_100uM_ABA_cDNA_P Parameter: Treatment Value: 100uM ABA vs. No Treatment
  misc_feature: MA Experiment ID: 20000071 Result: Down-regulated in Transcription
  misc_feature: MA Experiment 20000071 PARAMETER Experiment Name: At_100uM_ABA_Mutants_cDNA_P Parameter: Plant Line Value: CS8104
  misc_feature: MA Experiment 20000071 PARAMETER Experiment Name: At_100uM_ABA_Mutants_cDNA_P Parameter: Timepoint (hr) Value: 6
  misc_feature: MA Experiment 20000071 PARAMETER Experiment Name: At_100uM_ABA_Mutants_cDNA_P Parameter: Tissue Value: Aerial
  misc_feature: MA Experiment 20000071 PARAMETER Experiment Name: At_100uM_ABA_Mutants_cDNA_P Parameter: Treatment Value: 100uM ABA vs. No Treatment
  misc_feature: MA Experiment ID: 20000086 Result: Down-regulated in Transcription
  misc_feature: MA Experiment 20000086 PARAMETER Experiment Name: At_100uM_ABA_Mutants_cDNA_P Parameter: Plant Line Value: CS22
  misc_feature: MA Experiment 20000086 PARAMETER Experiment Name: At_100uM_ABA_Mutants_cDNA_P Parameter: Timepoint (hr) Value: 6
  misc_feature: MA Experiment 20000086 PARAMETER Experiment Name: At_100uM_ABA_Mutants_cDNA_P Parameter: Tissue Value: Aerial
  misc_feature: MA Experiment 20000086 PARAMETER Experiment Name: At_100uM_ABA_Mutants_cDNA_P Parameter: Treatment Value: 100uM ABA vs. No Treatment
  misc_feature: MA Experiment ID: 20000087 Result: Down-regulated in Transcription
  misc_feature: MA Experiment 20000087 PARAMETER Experiment Name: At_100uM_ABA_Mutants_cDNA_P Parameter: Plant Line Value: WS
  misc_feature: MA Experiment 20000087 PARAMETER Experiment Name: At_100uM_ABA_Mutants_cDNA_P Parameter: Timepoint (hr) Value: 6
  misc_feature: MA Experiment 20000087 PARAMETER Experiment Name: At_100uM_ABA_Mutants_cDNA_P Parameter: Tissue Value: Aerial
  misc_feature: MA Experiment 20000087 PARAMETER Experiment Name: At_100uM_ABA_Mutants_cDNA_P Parameter: Treatment Value: 100uM ABA vs. No Treatment
  misc_feature: MA Experiment ID: 20000113 Result: Up-regulated in Transcription
  misc_feature: MA Experiment 20000113 PARAMETER Experiment Name: At_42deg_Heat_cDNA_P Parameter: Temperature (deg C) Value: 42 vs. 22
  misc_feature: MA Experiment 20000113 PARAMETER Experiment Name: At_42deg_Heat_cDNA_P Parameter: Timepoint (hr) Value: 8
  misc_feature: MA Experiment 20000113 PARAMETER Experiment Name: At_42deg_Heat_cDNA_P Parameter: Tissue Value: Aerial
  misc_feature: MA Experiment ID: 20000144 Result: Down-regulated in Transcription
  misc_feature: MA Experiment 20000144 PARAMETER Experiment Name: At_42deg_Heat_cDNA_P Parameter: Temperature (deg C) Value: 42 vs. 22
  misc_feature: MA Experiment 20000144 PARAMETER Experiment Name: At_42deg_Heat_cDNA_P Parameter: Timepoint (hr) Value: 1
  misc_feature: MA Experiment 20000144 PARAMETER Experiment Name: At_42deg_Heat_cDNA_P Parameter: Tissue Value: Aerial
  misc_feature: MA Experiment ID: 20000184 Result: Up-regulated in Transcription
  misc_feature: MA Experiment 20000184 PARAMETER Experiment Name: At_Shoots__P Parameter: Age (day) Value: 7
  misc_feature: MA Experiment 20000184 PARAMETER Experiment Name: At_Shoots__P Parameter: Tissue Value: Shoots vs. Whole Plant
  misc_feature: MA Experiment ID: 20000264 Result: Down-regulated in Transcription
  misc_feature: MA Experiment 20000264 PARAMETER Experiment Name: At_Open_Flower_P Parameter: Age (day) Value: 21
  misc_feature: MA Experiment 20000264 PARAMETER Experiment Name: At_Open_Flower_P Parameter: Plant Line Value: WS
  misc_feature: MA Experiment 20000264 PARAMETER Experiment Name: At_Open_Flower_P Parameter: Tissue Value: Open Flower vs. Whole Plant
  misc_feature: MA Experiment ID: 20000268 Result: Down-regulated in Transcription
  misc_feature: MA Experiment 20000268 PARAMETER Experiment Name: At_100mM_NaCl__P Parameter: Age (day) Value: 14
  misc_feature: MA Experiment 20000268 PARAMETER Experiment Name: At_100mM_NaCl__P Parameter: Organism Value: A. thaliana
  misc_feature: MA Experiment 20000268 PARAMETER Experiment Name: At_100mM_NaCl__P Parameter: Plant Line Value: WS
  misc_feature: MA Experiment 20000268 PARAMETER Experiment Name: At_100mM_NaCl__P Parameter: Timepoint (hr) Value: 6
  misc_feature: MA Experiment 20000268 PARAMETER Experiment Name: At_100mM_NaCl__P Parameter: Tissue Value: Whole Plant
  misc_feature: MA Experiment 20000268 PARAMETER Experiment Name: At_100mM_NaCl__P Parameter: Treatment Value: 100mM NaCl vs. No Treatment
  misc_feature: MA Experiment ID: 20000288 Result: Down-regulated in Transcription
  misc_feature: MA Experiment 20000288 PARAMETER Experiment Name: At_Drought_P Parameter: Age (day) Value: 7
  misc_feature: MA Experiment 20000288 PARAMETER Experiment Name: At_Drought_P Parameter: Organism Value: A. thaliana
  misc_feature: MA Experiment 20000288 PARAMETER Experiment Name: At_Drought_P Parameter: Plant Line Value: WS
  misc_feature: MA Experiment 20000288 PARAMETER Experiment Name: At_Drought_P Parameter: Timepoint (hr) Value: 1
  misc_feature: MA Experiment 20000288 PARAMETER Experiment Name: At_Drought_P Parameter: Tissue Value: Whole Plant
  misc_feature: MA Experiment 20000288 PARAMETER Experiment Name: At_Drought_P Parameter: Treatment Value: Drought vs. No Drought
  misc_feature: MA Experiment ID: 20000441 Result: Up-regulated in Transcription
  misc_feature: MA Experiment 20000441 PARAMETER Experiment Name: At_1uM_BR-BRZ__P Parameter: Tissue Value: Shoot Apices
  misc_feature: MA Experiment 20000441 PARAMETER Experiment Name: At_1uM_BR-BRZ__P Parameter: Treatment Value: 1uM BR vs. No Treatment
  misc_feature: MA Experiment ID: 20000460 Result: Up-regulated in Transcription
  misc_feature: MA Experiment 20000460 PARAMETER Experiment Name: At_10percent_PEG_P Parameter: Age (day) Value: 12
  misc_feature: MA Experiment 20000460 PARAMETER Experiment Name: At_10percent_PEG_P Parameter: Organism Value: A. thaliana
  misc_feature: MA Experiment 20000460 PARAMETER Experiment Name: At_10percent_PEG_P Parameter: Plant Line Value: WS
  misc_feature: MA Experiment 20000460 PARAMETER Experiment Name: At_10percent_PEG_P Parameter: Timepoint (day) Value: 12
  misc_feature: MA Experiment 20000460 PARAMETER Experiment Name: At_10percent_PEG_P Parameter: Tissue Value: Whole Plant
  misc_feature: MA Experiment 20000460 PARAMETER Experiment Name: At_10percent_PEG_P Parameter: Treatment Value: 10percent PEG vs. No Treatment
  misc_feature: MA Experiment ID: 20000495 Result: Down-regulated in Transcription
  misc_feature: MA Experiment 20000495 PARAMETER Experiment Name: At_Guard_Cells_P Parameter: Harvest Date Value: 8/2/2002
  misc_feature: MA Experiment 20000495 PARAMETER Experiment Name: At_Guard_Cells_P Parameter: Organism Value: A. thaliana
  misc_feature: MA Experiment 20000495 PARAMETER Experiment Name: At_Guard_Cells_P Parameter: Tissue Value: Guard Cells vs. Leaves
  misc_feature: MA Experiment ID: 20000527 Result: Up-regulated in Transcription
  misc_feature: MA Experiment 20000527 PARAMETER Experiment Name: At_10percent_PEG_P Parameter: Age (day) Value: 20
  misc_feature: MA Experiment 20000527 PARAMETER Experiment Name: At_10percent_PEG_P Parameter: Organism Value: A. thaliana
  misc_feature: MA Experiment 20000527 PARAMETER Experiment Name: At_10percent_PEG_P Parameter: Plant Line Value: WS
  misc_feature: MA Experiment 20000527 PARAMETER Experiment Name: At_10percent_PEG_P Parameter: Timepoint (day) Value: 20
  misc_feature: MA Experiment 20000527 PARAMETER Experiment Name: At_10percent_PEG_P Parameter: Tissue Value: Whole Plant
  misc_feature: MA Experiment 20000527 PARAMETER Experiment Name: At_10percent_PEG_P Parameter: Treatment Value: 10percent PEG vs. No Treatment
  misc_feature: MA Experiment ID: 20001247 Result: Up-regulated in Transcription
  misc_feature: MA Experiment 20001247 PARAMETER Experiment Name: At_Far-red-induction_P Parameter: Age (day) Value: 7
  misc_feature: MA Experiment 20001247 PARAMETER Experiment Name: At_Far-red-induction_P Parameter: Light Value: Far-red vs. White
  misc_feature: MA Experiment 20001247 PARAMETER Experiment Name: At_Far-red-induction_P Parameter: Organism Value: A. thaliana
  misc_feature: MA Experiment 20001247 PARAMETER Experiment Name: At_Far-red-induction_P Parameter: Plant Line Value: Columbia
  misc_feature: MA Experiment 20001247 PARAMETER Experiment Name: At_Far-red-induction_P Parameter: Timepoint (hr) Value: 1
  misc_feature: MA Experiment 20001247 PARAMETER Experiment Name: At_Far-red-induction_P Parameter: Tissue Value: Whole Plant
  misc_feature: MA Experiment ID: 20001450 Result: Up-regulated in Transcription
  misc_feature: MA Experiment 20001450 PARAMETER Experiment Name: At_Far-red-induction_P Parameter: Age (day) Value: 7
  misc_feature: MA Experiment 20001450 PARAMETER Experiment Name: At_Far-red-induction_P Parameter: Light Value: Far-red vs. White
  misc_feature: MA Experiment 20001450 PARAMETER Experiment Name: At_Far-red-induction_P Parameter: Organism Value: A. thaliana
  misc_feature: MA Experiment 20001450 PARAMETER Experiment Name: At_Far-red-induction_P Parameter: Plant Line Value: Columbia
  misc_feature: MA Experiment 20001450 PARAMETER Experiment Name: At_Far-red-induction_P Parameter: Timepoint (hr) Value: 8
  misc_feature: MA Experiment 20001450 PARAMETER Experiment Name: At_Far-red-induction_P Parameter: Tissue Value: Whole Plant
  misc_feature: MA Experiment ID: 20001557 Result: Up-regulated in Transcription
  misc_feature: MA Experiment 20001557 PARAMETER Experiment Name: At_Drought_Soil_Dry_P Parameter: Age (day) Value: 27
  misc_feature: MA Experiment 20001557 PARAMETER Experiment Name: At_Drought_Soil_Dry_P Parameter: Organism Value: A. thaliana
  misc_feature: MA Experiment 20001557 PARAMETER Experiment Name: At_Drought_Soil_Dry_P Parameter: Plant Line Value: WS
  misc_feature: MA Experiment 20001557 PARAMETER Experiment Name: At_Drought_Soil_Dry_P Parameter: Post Timepoint (hr) Value: 3
  misc_feature: MA Experiment 20001557 PARAMETER Experiment Name: At_Drought_Soil_Dry_P Parameter: Post-Treatment Value: Re-Water vs. No Drought
  misc_feature: MA Experiment 20001557 PARAMETER Experiment Name: At_Drought_Soil_Dry_P Parameter: Timepoint (day) Value: 13
  misc_feature: MA Experiment 20001557 PARAMETER Experiment Name: At_Drought_Soil_Dry_P Parameter: Treatment Value: Drought vs. No Drought
  misc_feature: MA Experiment ID: 20001558 Result: Up-regulated in Transcription
  misc_feature: MA Experiment 20001558 PARAMETER Experiment Name: At_Drought_Soil_Dry_P Parameter: Age (day) Value: 27
  misc_feature: MA Experiment 20001558 PARAMETER Experiment Name: At_Drought_Soil_Dry_P Parameter: Organism Value: A. thaliana
  misc_feature: MA Experiment 20001558 PARAMETER Experiment Name: At_Drought_Soil_Dry_P Parameter: Plant Line Value: WS
  misc_feature: MA Experiment 20001558 PARAMETER Experiment Name: At_Drought_Soil_Dry_P Parameter: Post Timepoint (hr) Value: 6
  misc_feature: MA Experiment 20001558 PARAMETER Experiment Name: At_Drought_Soil_Dry_P Parameter: Post-Treatment Value: Re-Water vs. No Drought
  misc_feature: MA Experiment 20001558 PARAMETER Experiment Name: At_Drought_Soil_Dry_P Parameter: Timepoint (day) Value: 13
  misc_feature: MA Experiment 20001558 PARAMETER Experiment Name: At_Drought_Soil_Dry_P Parameter: Treatment Value: Drought vs. No Drought
  misc_feature: MA Experiment ID: 20001774 Result: Down-regulated in Transcription
  misc_feature: MA Experiment 20001774 PARAMETER Experiment Name: At_Far-red-enriched-adult_P Parameter: Age (day) Value: 31
  misc_feature: MA Experiment 20001774 PARAMETER Experiment Name: At_Far-red-enriched-adult_P Parameter: Light Value: Far-red enriched vs. White
  misc_feature: MA Experiment 20001774 PARAMETER Experiment Name: At_Far-red-enriched-adult_P Parameter: Organism Value: A. thaliana
  misc_feature: MA Experiment 20001774 PARAMETER Experiment Name: At_Far-red-enriched-adult_P Parameter: Plant Line Value: Columbia
  misc_feature: MA Experiment 20001774 PARAMETER Experiment Name: At_Far-red-enriched-adult_P Parameter: Timepoint (hr) Value: 72
  misc_feature: MA Experiment 20001774 PARAMETER Experiment Name: At_Far-red-enriched-adult_P Parameter: Tissue Value: Aerial
  misc_feature: MA Experiment ID: 20001904 Result: Down-regulated in Transcription
  misc_feature: MA Experiment 20001904 PARAMETER Experiment Name: At_Drought_Reproduction_P Parameter: Age (day) Value: 37
  misc_feature: MA Experiment 20001904 PARAMETER Experiment Name: At_Drought_Reproduction_P Parameter: Organism Value: A. thaliana
  misc_feature: MA Experiment 20001904 PARAMETER Experiment Name: At_Drought_Reproduction_P Parameter: Plant Line Value: WS
  misc_feature: MA Experiment 20001904 PARAMETER Experiment Name: At_Drought_Reproduction_P Parameter: Timepoint (day) Value: 7
  misc_feature: MA Experiment 20001904 PARAMETER Experiment Name: At_Drought_Reproduction_P Parameter: Tissue Value: Rosettes
  misc_feature: MA Experiment 20001904 PARAMETER Experiment Name: At_Drought_Reproduction_P Parameter: Treatment Value: Drought vs. No Drought

SEQ ID NO: 34574 - protein, 231 aa, Arabidopsis thaliana; identical to SEQ ID NO: 30984
  peptide (1)..(231): Ceres Seq. ID no. 12324579
  misc_feature (48)..(112): Pfam Name: AP2 domain Pfam Description: AP2 domain
  misc_feature (23)..(156): Homolog of NCBI NO: 15239113 NR Description: transcription factor TINY, putative; protein id:
  misc_feature (20)..(159): Homolog of NCBI NO: 38605845 NR Description: OSJNBb0034G17.3 [Oryza sativa (japonica
  misc_feature (1)..(198): Homolog of NCBI NO: 15232340 NR Description: transcription factor - like protein; protein id:
  misc_feature (18)..(153): Homolog of NCBI NO: 38605848 NR Description: OSJNBb0034G17.6 [Oryza sativa (japonica
  misc_feature (10)..(164): Homolog of NCBI NO: 14140163 NR Description: putative AP2 domain containing protein [Oryza
  misc_feature (48)..(143): Homolog of NCBI NO: 34902130 NR Description: hypothetical protein [Oryza sativa (japonica
  misc_feature (13)..(230): Homolog of NCBI NO: 15219452 NR Description: transcription factor, putative; protein id:
  misc_feature (1)..(192): Homolog of NCBI NO: 15224024 NR Description: hypothetical protein; protein id: At1g77640.1
  misc_feature (1)..(231): Homolog of NCBI NO: 15219139 NR Description: TINY-like protein
  misc_feature (1)..(231): Homolog of NCBI NO: 21554056 NR Description: TINY-like protein [Arabidopsis thaliana]

SEQ ID NO: 34575 - protein, 215 aa, Arabidopsis thaliana; identical to SEQ ID NO: 30985
  peptide (1)..(215): Ceres Seq. ID no. 12324580
  misc_feature (32)..(96): Pfam Name: AP2 domain Pfam Description: AP2 domain
  misc_feature (7)..(140): Homolog of NCBI NO: 15239113 NR Description: transcription factor TINY, putative; protein id:
  misc_feature (4)..(143): Homolog of NCBI NO: 38605845 NR Description: OSJNBb0034G17.3 [Oryza sativa (japonica
  misc_feature (1)..(182): Homolog of NCBI NO: 15232340 NR Description: transcription factor - like protein; protein id:
  misc_feature (2)..(137): Homolog of NCBI NO: 38605848 NR Description: OSJNBb0034G17.6 [Oryza sativa (japonica
  misc_feature (1)..(148): Homolog of NCBI NO: 14140163 NR Description: putative AP2 domain containing protein [Oryza
  misc_feature (32)..(127): Homolog of NCBI NO: 34902130 NR Description: hypothetical protein [Oryza sativa (japonica
  misc_feature (1)..(214): Homolog of NCBI NO: 15219452 NR Description: transcription factor, putative; protein id:
  misc_feature (1)..(176): Homolog of NCBI NO: 15224024 NR Description: hypothetical protein; protein id: At1g77640.1
  misc_feature (1)..(215): Homolog of NCBI NO: 15219139 NR Description: TINY-like protein
  misc_feature (1)..(215): Homolog of NCBI NO: 21554056 NR Description: TINY-like protein [Arabidopsis thaliana]

SEQ ID NO: 34576 - protein, 176 aa, Arabidopsis thaliana; identical to SEQ ID NO: 30986
  peptide (1)..(176): Ceres Seq. ID no. 12324581
  misc_feature (1)..(57): Pfam Name: AP2 domain Pfam Description: AP2 domain
  misc_feature (1)..(101): Homolog of NCBI NO: 15239113 NR Description: transcription factor TINY, putative; protein id:
  misc_feature (1)..(104): Homolog of NCBI NO: 38605845 NR Description: OSJNBb0034G17.3 [Oryza sativa (japonica
  misc_feature (1)..(143): Homolog of NCBI NO: 15232340 NR Description: transcription factor - like protein; protein id:
  misc_feature (1)..(98): Homolog of NCBI NO: 38605848 NR Description: OSJNBb0034G17.6 [Oryza sativa (japonica
  misc_feature (1)..(109): Homolog of NCBI NO: 14140163 NR Description: putative AP2 domain containing protein [Oryza
  misc_feature (1)..(88): Homolog of NCBI NO: 34902130 NR Description: hypothetical protein [Oryza sativa (japonica
  misc_feature (1)..(175): Homolog of NCBI NO: 15219452 NR Description: transcription factor, putative; protein id:
  misc_feature (1)..(137): Homolog of NCBI NO: 15224024 NR Description: hypothetical protein; protein id: At1g77640.1
  misc_feature (1)..(176): Homolog of NCBI NO: 15219139 NR Description: TINY-like protein
  misc_feature (1)..(176): Homolog of NCBI NO: 21554056 NR Description: TINY-like protein [Arabidopsis thaliana]

SEQ ID NO: 34577 - DNA, 941 bp, Arabidopsis thaliana; identical to SEQ ID NO: 30987
  misc_feature (1)..(941): Ceres Seq. ID no. 12340295
  misc_feature: MA Experiment ID: 108569 Result: Up-regulated in Transcription
  misc_feature: MA Experiment 108569 PARAMETER Experiment Name: At_0.001%_MeJA__cDNA_P Parameter: Timepoint (hr) Value: 6
  misc_feature: MA Experiment 108569 PARAMETER Experiment Name: At_0.001%_MeJA__cDNA_P Parameter: Tissue Value: Aerial
  misc_feature: MA Experiment 108569 PARAMETER Experiment Name: At_0.001%_MeJA__cDNA_P Parameter: Treatment Value: 0.001% MeJA vs. No Treatment
  misc_feature: MA Experiment ID: 108573 Result: Up-regulated in Transcription
  misc_feature: MA Experiment 108573 PARAMETER Experiment Name: At_Drought_cDNA_P Parameter: Timepoint (hr) Value: 6
  misc_feature: MA Experiment 108573 PARAMETER Experiment Name: At_Drought_cDNA_P Parameter: Tissue Value: Aerial
  misc_feature: MA Experiment 108573 PARAMETER Experiment Name: At_Drought_cDNA_P Parameter: Treatment Value: Drought vs. No Drought
  misc_feature: MA Experiment ID: 20000111 Result: Up-regulated in Transcription
  misc_feature: MA Experiment 20000111 PARAMETER Experiment Name: At_42deg_Heat_cDNA_P Parameter: Temperature (deg C) Value: 42 vs. 22
  misc_feature: MA Experiment 20000111 PARAMETER Experiment Name: At_42deg_Heat_cDNA_P Parameter: Timepoint (hr) Value: 6
  misc_feature: MA Experiment 20000111 PARAMETER Experiment Name: At_42deg_Heat_cDNA_P Parameter: Tissue Value: Aerial
  misc_feature: MA Experiment ID: 20000112 Result: Up-regulated in Transcription
  misc_feature: MA Experiment 20000112 PARAMETER Experiment Name: At_42deg_Heat_cDNA_P Parameter: Temperature (deg C) Value: 42 vs. 22
  misc_feature: MA Experiment 20000112 PARAMETER Experiment Name: At_42deg_Heat_cDNA_P Parameter: Timepoint (hr) Value: 2
  misc_feature: MA Experiment 20000112 PARAMETER Experiment Name: At_42deg_Heat_cDNA_P Parameter: Tissue Value: Aerial
  misc_feature: MA Experiment ID: 20000113 Result: Up-regulated in Transcription
  misc_feature: MA Experiment 20000113 PARAMETER Experiment Name: At_42deg_Heat_cDNA_P Parameter: Temperature (deg C) Value: 42 vs. 22
  misc_feature: MA Experiment 20000113 PARAMETER Experiment Name: At_42deg_Heat_cDNA_P Parameter: Timepoint (hr) Value: 8
  misc_feature: MA Experiment 20000113 PARAMETER Experiment Name: At_42deg_Heat_cDNA_P Parameter: Tissue Value: Aerial
  misc_feature: MA Experiment ID: 20000224 Result: Down-regulated in Transcription
  misc_feature: MA Experiment ID: 20000227 Result: Down-regulated in Transcription
  misc_feature: MA Experiment 20000227 PARAMETER Experiment Name: At_Root-Tips-vs-Tops_P Parameter: Tissue Value: Root Tips vs. Root Tops
  misc_feature: MA Experiment ID: 20000234 Result: Down-regulated in Transcription
  misc_feature: MA Experiment 20000234 PARAMETER Experiment Name: At_Siliques_P Parameter: Age (day) Value: 21
  misc_feature: MA Experiment 20000234 PARAMETER Experiment Name: At_Siliques_P Parameter: Organism Value: A. thaliana
  misc_feature: MA Experiment 20000234 PARAMETER Experiment Name: At_Siliques_P Parameter: Plant Line Value: WS
  misc_feature: MA Experiment 20000234 PARAMETER Experiment Name: At_Siliques_P Parameter: Tissue Value: Less Than 5mm Siliques vs. Whole Plant
  misc_feature: MA Experiment ID: 20000264 Result: Down-regulated in Transcription
  misc_feature: MA Experiment 20000264 PARAMETER Experiment Name: At_Open_Flower_P Parameter: Age (day) Value: 21
  misc_feature: MA Experiment 20000264 PARAMETER Experiment Name: At_Open_Flower_P Parameter: Plant Line Value: WS
  misc_feature: MA Experiment 20000264 PARAMETER Experiment Name: At_Open_Flower_P Parameter: Tissue Value: Open Flower vs. Whole Plant
  misc_feature: MA Experiment ID: 20000265 Result: Down-regulated in Transcription
  misc_feature: MA Experiment 20000265 PARAMETER Experiment Name: At_Open_Flower_P Parameter: Age (day) Value: 21
  misc_feature: MA Experiment 20000265 PARAMETER Experiment Name: At_Open_Flower_P Parameter: Plant Line Value: WS
  misc_feature: MA Experiment 20000265 PARAMETER Experiment Name: At_Open_Flower_P Parameter: Tissue Value: Closed Flower vs. Whole Plant
  misc_feature: MA Experiment ID: 20000286 Result: Down-regulated in Transcription
  misc_feature: MA Experiment 20000286 PARAMETER Experiment Name: At_Open_Flower_P Parameter: Age (day) Value: 21
  misc_feature: MA Experiment 20000286 PARAMETER Experiment Name: At_Open_Flower_P Parameter: Plant Line Value: WS
  misc_feature: MA Experiment 20000286 PARAMETER Experiment Name: At_Open_Flower_P Parameter: Tissue Value: Half Open vs. Whole Plant
  misc_feature: MA Experiment ID: 20000496 Result: Down-regulated in Transcription
  misc_feature: MA Experiment 20000496 PARAMETER Experiment Name: At_Guard_Cells_P Parameter: Harvest Date Value: 7/19/2002
  misc_feature: MA Experiment 20000496 PARAMETER Experiment Name: At_Guard_Cells_P Parameter: Organism Value: Canola
  misc_feature: MA Experiment 20000496 PARAMETER Experiment Name: At_Guard_Cells_P Parameter: Tissue Value: Guard Cells vs. Leaves
  misc_feature: MA Experiment ID: 20000794 Result: Down-regulated in Transcription
  misc_feature: MA Experiment 20000794 PARAMETER Experiment Name: At_Petals_P Parameter: Age (day) Value: 23-25 days
  misc_feature: MA Experiment 20000794 PARAMETER Experiment Name: At_Petals_P Parameter: Plant Line Value: WS
  misc_feature: MA Experiment 20000794 PARAMETER Experiment Name: At_Petals_P Parameter: Tissue Value: Petals vs. Whole plant
  misc_feature: MA Experiment ID: 20001558 Result: Down-regulated in Transcription
  misc_feature: MA Experiment 20001558 PARAMETER Experiment Name: At_Drought_Soil_Dry_P Parameter: Age (day) Value: 27
  misc_feature: MA Experiment 20001558 PARAMETER Experiment Name: At_Drought_Soil_Dry_P Parameter: Organism Value: A. thaliana
  misc_feature: MA Experiment 20001558 PARAMETER Experiment Name: At_Drought_Soil_Dry_P Parameter: Plant Line Value: WS
  misc_feature: MA Experiment 20001558 PARAMETER Experiment Name: At_Drought_Soil_Dry_P Parameter: Post Timepoint (hr) Value: 6
  misc_feature: MA Experiment 20001558 PARAMETER Experiment Name: At_Drought_Soil_Dry_P Parameter: Post-Treatment Value: Re-Water vs. No Drought
  misc_feature: MA Experiment 20001558 PARAMETER Experiment Name: At_Drought_Soil_Dry_P Parameter: Timepoint (day) Value: 13
  misc_feature: MA Experiment 20001558 PARAMETER Experiment Name: At_Drought_Soil_Dry_P Parameter: Treatment Value: Drought vs. No Drought
  misc_feature: MA Experiment ID: 20001560 Result: Down-regulated in Transcription
  misc_feature: MA Experiment 20001560 PARAMETER Experiment Name: At_Drought_Soil_Dry_P Parameter: Age (day) Value: 28
  misc_feature: MA Experiment 20001560 PARAMETER Experiment Name: At_Drought_Soil_Dry_P Parameter: Organism Value: A. thaliana
  misc_feature: MA Experiment 20001560 PARAMETER Experiment Name: At_Drought_Soil_Dry_P Parameter: Plant Line Value: WS
  misc_feature: MA Experiment 20001560 PARAMETER Experiment Name: At_Drought_Soil_Dry_P Parameter: Post Timepoint (hr) Value: None
  misc_feature: MA Experiment 20001560 PARAMETER Experiment Name: At_Drought_Soil_Dry_P Parameter: Post-Treatment Value: None
  misc_feature: MA Experiment 20001560 PARAMETER Experiment Name: At_Drought_Soil_Dry_P Parameter: Timepoint (day) Value: 14
  misc_feature: MA Experiment 20001560 PARAMETER Experiment Name: At_Drought_Soil_Dry_P Parameter: Treatment Value: Drought vs. No Drought

SEQ ID NO: 34578 - protein, 85 aa, Arabidopsis thaliana; identical to SEQ ID NO: 30988
  peptide (1)..(85): Ceres Seq. ID no. 12340296

SEQ ID NO: 34579 - protein, 75 aa, Arabidopsis thaliana; identical to SEQ ID NO: 30989
  peptide (1)..(75): Ceres Seq. ID no. 12340297
  misc_feature (1)..(55): Homolog of NCBI NO: 15221329 NR Description: hypothetical protein; protein id: At1g12440.1
  misc_feature (1)..(55): Homolog of NCBI NO: 15225894 NR Description: putative zinc finger protein
  misc_feature (1)..(55): Homolog of NCBI NO: 14596167 NR Description: zinc finger-like protein [Arabidopsis thaliana]
  misc_feature (1)..(55): Homolog of NCBI NO: 15234402 NR Description: putative protein
  misc_feature (1)..(55): Homolog of NCBI NO: 18404102 NR Description: expressed protein
  misc_feature (1)..(55): Homolog of NCBI NO: 15231686 NR Description: zinc finger - like protein
  misc_feature (1)..(55): Homolog of NCBI NO: 35187687 NR Description: zinc-finger protein [Oryza sativa (indica
  misc_feature (1)..(55): Homolog of NCBI NO: 11361253 NR Description: hypothetical protein p85RF [imported] - Prunus
  misc_feature (1)..(55): Homolog of NCBI NO: 25082726 NR Description: expressed protein [Arabidopsis thaliana]
  misc_feature (1)..(55): Homolog of NCBI NO: 18403408 NR Description: expressed protein

SEQ ID NO: 34580 - protein, 62 aa, Arabidopsis thaliana; identical to SEQ ID NO: 30990
  peptide (1)..(62): Ceres Seq. ID no. 12340298
  misc_feature (18)..(62): Homolog of NCBI NO: 8778645 NR Description: F5O11.17 [Arabidopsis thaliana]

SEQ ID NO: 34581 - DNA, 1219 bp, Arabidopsis thaliana; identical to SEQ ID NO: 30991
  misc_feature (1)..(1219): Ceres Seq. ID no. 12481880
  misc_feature: MA Experiment ID: 108435 Result: Down-regulated in Transcription
  misc_feature: MA Experiment 108435 PARAMETER Experiment Name: At_stm_Mutants_cDNA_P Parameter: Plant Line Value: wt Landsburg vs stm
  misc_feature: MA Experiment 108435 PARAMETER Experiment Name: At_stm_Mutants_cDNA_P Parameter: Tissue Value: Shoot Apical Meristem Region
  misc_feature: MA Experiment ID: 108462 Result: Up-regulated in Transcription
  misc_feature: MA Experiment 108462 PARAMETER Experiment Name: At_Germinating_Seeds_cDNA_P Parameter: Age (day) Value: 2 vs. 0
  misc_feature: MA Experiment 108462 PARAMETER Experiment Name: At_Germinating_Seeds_cDNA_P Parameter: Tissue Value: Germinating Seeds
  misc_feature: MA Experiment ID: 108463 Result: Up-regulated in Transcription
  misc_feature: MA Experiment 108463 PARAMETER Experiment Name: At_Germinating_Seeds_cDNA_P Parameter: Age (day) Value: 3 vs. 0
  misc_feature: MA Experiment 108463 PARAMETER Experiment Name: At_Germinating_Seeds_cDNA_P Parameter: Tissue Value: Germinating Seeds
  misc_feature: MA Experiment ID: 108464 Result: Up-regulated in Transcription
  misc_feature: MA Experiment 108464 PARAMETER Experiment Name: At_Germinating_Seeds_cDNA_P Parameter: Age (day) Value: 4 vs. 0
  misc_feature: MA Experiment 108464 PARAMETER Experiment Name: At_Germinating_Seeds_cDNA_P Parameter: Tissue Value: Germinating Seeds
  misc_feature: MA Experiment ID: 108595 Result: Down-regulated in Transcription
  misc_feature: MA Experiment 108595 PARAMETER Experiment Name: At_Ler-pi_Ovule_cDNA_P Parameter: Plant Line Value: null
  misc_feature: MA Experiment ID: 20000087 Result: Down-regulated in Transcription
  misc_feature: MA Experiment 20000087 PARAMETER Experiment Name: At_100uM_ABA_Mutants_cDNA_P Parameter: Plant Line Value: WS
  misc_feature: MA Experiment 20000087 PARAMETER Experiment Name: At_100uM_ABA_Mutants_cDNA_P Parameter: Timepoint (hr) Value: 6
  misc_feature: MA Experiment 20000087 PARAMETER Experiment Name: At_100uM_ABA_Mutants_cDNA_P Parameter: Tissue Value: Aerial
  misc_feature: MA Experiment 20000087 PARAMETER Experiment Name: At_100uM_ABA_Mutants_cDNA_P Parameter: Treatment Value: 100uM ABA vs. No Treatment
  misc_feature: MA Experiment ID: 20000113 Result: Up-regulated in Transcription
  misc_feature: MA Experiment 20000113 PARAMETER Experiment Name: At_42deg_Heat_cDNA_P Parameter: Temperature (deg C) Value: 42 vs. 22
  misc_feature: MA Experiment 20000113 PARAMETER Experiment Name: At_42deg_Heat_cDNA_P Parameter: Timepoint (hr) Value: 8
  misc_feature: MA Experiment 20000113 PARAMETER Experiment Name: At_42deg_Heat_cDNA_P Parameter: Tissue Value: Aerial
  misc_feature: MA Experiment ID: 20000224 Result: Down-regulated in Transcription
  misc_feature: MA Experiment ID: 20000439 Result: Down-regulated in Transcription
  misc_feature: MA Experiment 20000439 PARAMETER Experiment Name: At_Roots__P Parameter: Age (day) Value: 14 vs. 21
  misc_feature: MA Experiment 20000439 PARAMETER Experiment Name: At_Roots__P Parameter: Organism Value: A. thaliana
  misc_feature: MA Experiment 20000439 PARAMETER Experiment Name: At_Roots__P Parameter: Tissue Value: Roots vs. Whole Plant
  misc_feature: MA Experiment ID: 20000495 Result: Down-regulated in Transcription
  misc_feature: MA Experiment 20000495 PARAMETER Experiment Name: At_Guard_Cells_P Parameter: Harvest Date Value: 8/2/2002
  misc_feature: MA Experiment 20000495 PARAMETER Experiment Name: At_Guard_Cells_P Parameter: Organism Value: A. thaliana
  misc_feature: MA Experiment 20000495 PARAMETER Experiment Name: At_Guard_Cells_P Parameter: Tissue Value: Guard Cells vs. Leaves

SEQ ID NO: 34582 - protein, 263 aa, Arabidopsis thaliana; identical to SEQ ID NO: 30992
  peptide (1)..(263): Ceres Seq. ID no. 12481881
  misc_feature (7)..(242): Pfam Name: 14-3-3 protein Pfam Description: 14-3-3 protein
  misc_feature (1)..(263): Homolog of NCBI NO: 2822483 NR Description: 14-3-3 protein homolog [Maackia amurensis]
  misc_feature (1)..(263): Homolog of NCBI NO: 1168192 NR Description: 14-3-3-LIKE PROTEIN B (VFA-1433B)
  misc_feature (1)..(263): Homolog of NCBI NO: 1531629 NR Description: GF14 mu [Arabidopsis thaliana]
  misc_feature (1)..(263): Homolog of NCBI NO: 18406007 NR Description: 14-3-3 protein GF14 mu (grf9)

SEQ ID NO: 34583 - protein, 238 aa, Arabidopsis thaliana; identical to SEQ ID NO: 30993
  peptide (1)..(238): Ceres Seq. ID no. 12481882
  misc_feature (1)..(217): Pfam Name: 14-3-3 protein Pfam Description: 14-3-3 protein
  misc_feature (1)..(238): Homolog of NCBI NO: 2822483 NR Description: 14-3-3 protein homolog [Maackia amurensis]
  misc_feature (1)..(238): Homolog of NCBI NO: 1168192 NR Description: 14-3-3-LIKE PROTEIN B (VFA-1433B)
  misc_feature (1)..(238): Homolog of NCBI NO: 1531629 NR Description: GF14 mu [Arabidopsis thaliana]
  misc_feature (1)..(238): Homolog of NCBI NO: 18406007 NR Description: 14-3-3 protein GF14 mu (grf9)

SEQ ID NO: 34584 - protein, 234 aa, Arabidopsis thaliana; identical to SEQ ID NO: 30994
  peptide (1)..(234): Ceres Seq. ID no. 12481883
  misc_feature (1)..(213): Pfam Name: 14-3-3 protein Pfam Description: 14-3-3 protein
  misc_feature (1)..(234): Homolog of NCBI NO: 2822483 NR Description: 14-3-3 protein homolog [Maackia amurensis]
  misc_feature (1)..(234): Homolog of NCBI NO: 1168192 NR Description: 14-3-3-LIKE PROTEIN B (VFA-1433B)
  misc_feature (1)..(234): Homolog of NCBI NO: 1531629 NR Description: GF14 mu [Arabidopsis thaliana]
  misc_feature (1)..(234): Homolog of NCBI NO: 18406007 NR Description: 14-3-3 protein GF14 mu (grf9)

SEQ ID NO: 34585 - DNA, 905 bp, Arabidopsis thaliana; identical to SEQ ID NO: 30995
  misc_feature (1)..(905): Ceres Seq. ID no. 13490791
  misc_feature: MA Experiment ID: 108434 Result: Down-regulated in Transcription
  misc_feature: MA Experiment 108434 PARAMETER Experiment Name: At_Root_Tips_cDNA_P Parameter: Tissue Value: Root Tips
  misc_feature: MA Experiment ID: 108461 Result: Up-regulated in Transcription
  misc_feature: MA Experiment 108461 PARAMETER Experiment Name: At_Germinating_Seeds_cDNA_P Parameter: Age (day) Value: 1 vs. 0
  misc_feature: MA Experiment 108461 PARAMETER Experiment Name: At_Germinating_Seeds_cDNA_P Parameter: Tissue Value: Germinating Seeds
  misc_feature: MA Experiment ID: 108462 Result: Up-regulated in Transcription
  misc_feature: MA Experiment 108462 PARAMETER Experiment Name: At_Germinating_Seeds_cDNA_P Parameter: Age (day) Value: 2 vs. 0
  misc_feature: MA Experiment 108462 PARAMETER Experiment Name: At_Germinating_Seeds_cDNA_P Parameter: Tissue Value: Germinating Seeds
  misc_feature: MA Experiment ID: 108463 Result: Up-regulated in Transcription
  misc_feature: MA Experiment 108463 PARAMETER Experiment Name: At_Germinating_Seeds_cDNA_P Parameter: Age (day) Value: 3 vs. 0
  misc_feature: MA Experiment 108463 PARAMETER Experiment Name: At_Germinating_Seeds_cDNA_P Parameter: Tissue Value: Germinating Seeds
  misc_feature: MA Experiment ID: 108464 Result: Up-regulated in Transcription
  misc_feature: MA Experiment 108464 PARAMETER Experiment Name: At_Germinating_Seeds_cDNA_P Parameter: Age (day) Value: 4 vs. 0
  misc_feature: MA Experiment 108464 PARAMETER Experiment Name: At_Germinating_Seeds_cDNA_P Parameter: Tissue Value: Germinating Seeds
  misc_feature: MA Experiment ID: 108488 Result: Up-regulated in Transcription
  misc_feature: MA Experiment ID: 108489 Result: Up-regulated in Transcription
  misc_feature: MA Experiment ID: 108501 Result: Down-regulated in Transcription
  misc_feature: MA Experiment 108501 PARAMETER Experiment Name: At_ap2_floral_buds_cDNA_P Parameter: Plant Line Value: ap2 (Ler.)
  misc_feature: MA Experiment 108501 PARAMETER Experiment Name: At_ap2_floral_buds_cDNA_P Parameter: Tissue Value: Closed Flower
  misc_feature: MA Experiment ID: 108607 Result: Down-regulated in Transcription
  misc_feature: MA Experiment 108607 PARAMETER Experiment Name: At_100uM_ABA_cDNA_P Parameter: Timepoint (hr) Value: 4
  misc_feature: MA Experiment 108607 PARAMETER Experiment Name: At_100uM_ABA_cDNA_P Parameter: Tissue Value: Aerial
  misc_feature: MA Experiment 108607 PARAMETER Experiment Name: At_100uM_ABA_cDNA_P Parameter: Treatment Value: 100uM ABA vs. No Treatment
  misc_feature: MA Experiment ID: 20000113 Result: Down-regulated in Transcription
  misc_feature: MA Experiment 20000113 PARAMETER Experiment Name: At_42deg_Heat_cDNA_P Parameter: Temperature (deg C) Value: 42 vs. 22
  misc_feature: MA Experiment 20000113 PARAMETER Experiment Name: At_42deg_Heat_cDNA_P Parameter: Timepoint (hr) Value: 8
  misc_feature: MA Experiment 20000113 PARAMETER Experiment Name: At_42deg_Heat_cDNA_P Parameter: Tissue Value: Aerial
  misc_feature: MA Experiment ID: 20000180 Result: Up-regulated in Transcription
  misc_feature: MA Experiment 20000180 PARAMETER Experiment Name: At_Germinating_Seeds_P Parameter: Age (hr) Value: 24 vs. 0
  misc_feature: MA Experiment 20000180 PARAMETER Experiment Name: At_Germinating_Seeds_P Parameter: Tissue Value: Germinating Seeds
  misc_feature: MA Experiment ID: 20000182 Result: Up-regulated in Transcription
  misc_feature: MA Experiment 20000182 PARAMETER Experiment Name: At_2mM_SA_P Parameter: Age (day) Value: 14
  misc_feature: MA Experiment 20000182 PARAMETER Experiment Name: At_2mM_SA_P Parameter: Organism Value: A. thaliana
  misc_feature: MA Experiment 20000182 PARAMETER Experiment Name: At_2mM_SA_P Parameter: Plant Line Value: WS
  misc_feature: MA Experiment 20000182 PARAMETER Experiment Name: At_2mM_SA_P Parameter: Timepoint (hr) Value: 6
  misc_feature: MA Experiment 20000182 PARAMETER Experiment Name: At_2mM_SA_P Parameter: Tissue Value: Aerial
  misc_feature: MA Experiment 20000182 PARAMETER Experiment Name: At_2mM_SA_P Parameter: Treatment Value: 2mM SA vs. No Treatment
  misc_feature: MA Experiment ID: 20000185 Result: Up-regulated in Transcription
  misc_feature: MA Experiment 20000185 PARAMETER Experiment Name: At_Roots__P Parameter: Age (day) Value: 7 vs. 21
  misc_feature: MA Experiment 20000185 PARAMETER Experiment Name: At_Roots__P Parameter: Organism Value: A. thaliana
  misc_feature: MA Experiment 20000185 PARAMETER Experiment Name: At_Roots__P Parameter: Tissue Value: Roots vs. Whole Plant
  misc_feature: MA Experiment ID: 20000224 Result: Down-regulated in Transcription
  misc_feature: MA Experiment ID: 20000227 Result: Down-regulated in Transcription
  misc_feature: MA Experiment 20000227 PARAMETER Experiment Name: At_Root-Tips-vs-Tops_P Parameter: Tissue Value: Root Tips vs. Root Tops
  misc_feature: MA Experiment ID: 20000234 Result: Down-regulated in Transcription
  misc_feature: MA Experiment 20000234 PARAMETER Experiment Name: At_Siliques_P Parameter: Age (day) Value: 21
  misc_feature: MA Experiment 20000234 PARAMETER Experiment Name: At_Siliques_P Parameter: Organism Value: A. thaliana
  misc_feature: MA Experiment 20000234 PARAMETER Experiment Name: At_Siliques_P Parameter: Plant Line Value: WS
  misc_feature: MA Experiment 20000234 PARAMETER Experiment Name: At_Siliques_P Parameter: Tissue Value: Less Than 5mm Siliques vs. Whole Plant
  misc_feature: MA Experiment ID: 20000235 Result: Down-regulated in Transcription
  misc_feature: MA Experiment 20000235 PARAMETER Experiment Name: At_Siliques_P Parameter: Age (day) Value: 21
  misc_feature: MA Experiment 20000235 PARAMETER Experiment Name: At_Siliques_P Parameter: Organism Value: A. thaliana
  misc_feature: MA Experiment 20000235 PARAMETER Experiment Name: At_Siliques_P Parameter: Plant Line Value: WS
  misc_feature: MA Experiment 20000235 PARAMETER Experiment Name: At_Siliques_P Parameter: Tissue Value: 5-10mm Siliques vs. Whole Plant
  misc_feature: MA Experiment ID: 20000264 Result: Down-regulated in Transcription
  misc_feature: MA Experiment 20000264 PARAMETER Experiment Name: At_Open_Flower_P Parameter: Age (day) Value: 21
  misc_feature: MA Experiment 20000264 PARAMETER Experiment Name: At_Open_Flower_P Parameter: Plant Line Value: WS
  misc_feature: MA Experiment 20000264 PARAMETER Experiment Name: At_Open_Flower_P Parameter: Tissue Value: Open Flower vs. Whole Plant
  misc_feature: MA Experiment ID: 20000265 Result: Down-regulated in Transcription
  misc_feature: MA Experiment 20000265 PARAMETER Experiment Name: At_Open_Flower_P Parameter: Age (day) Value: 21
  misc_feature: MA Experiment 20000265 PARAMETER Experiment Name: At_Open_Flower_P Parameter: Plant Line Value: WS
  misc_feature: MA Experiment 20000265 PARAMETER Experiment Name: At_Open_Flower_P Parameter: Tissue Value: Closed Flower vs. Whole Plant
  misc_feature: MA Experiment ID: 20000286 Result: Down-regulated in Transcription
  misc_feature: MA Experiment 20000286 PARAMETER Experiment Name: At_Open_Flower_P Parameter: Age (day) Value: 21
  misc_feature: MA Experiment 20000286 PARAMETER Experiment Name: At_Open_Flower_P Parameter: Plant Line Value: WS
  misc_feature: MA Experiment 20000286 PARAMETER Experiment Name: At_Open_Flower_P Parameter: Tissue Value: Half Open vs. Whole Plant
  misc_feature: MA Experiment ID: 20000437 Result: Down-regulated in Transcription
  misc_feature: MA Experiment 20000437 PARAMETER Experiment Name: At_Drought_P Parameter: Age (day) Value: 8
  misc_feature: MA Experiment 20000437 PARAMETER Experiment Name: At_Drought_P Parameter: Organism Value: A. thaliana
  misc_feature: MA Experiment 20000437 PARAMETER Experiment Name: At_Drought_P Parameter: Plant Line Value: WS
  misc_feature: MA Experiment 20000437 PARAMETER Experiment Name: At_Drought_P Parameter: Timepoint (hr) Value: 24
  misc_feature: MA Experiment 20000437 PARAMETER Experiment Name: At_Drought_P Parameter: Tissue Value: Whole Plant
  misc_feature: MA Experiment 20000437 PARAMETER Experiment Name: At_Drought_P Parameter: Treatment Value: Drought vs. No Drought
  misc_feature: MA Experiment ID: 20000438 Result: Down-regulated in Transcription
  misc_feature: MA Experiment 20000438 PARAMETER Experiment Name: At_Shoots__P Parameter: Age (day) Value: 14
  misc_feature: MA Experiment 20000438 PARAMETER Experiment Name: At_Shoots__P Parameter: Tissue Value: Shoots vs. Whole Plant
  misc_feature: MA Experiment ID: 20000439 Result: Up-regulated in Transcription
  misc_feature: MA Experiment 20000439 PARAMETER Experiment Name: At_Roots__P Parameter: Age (day) Value: 14 vs. 21
  misc_feature: MA Experiment 20000439 PARAMETER Experiment Name: At_Roots__P Parameter: Organism Value: A. thaliana
  misc_feature: MA Experiment 20000439 PARAMETER Experiment Name: At_Roots__P Parameter: Tissue Value: Roots vs. Whole Plant
  misc_feature: MA Experiment ID: 20000794 Result: Down-regulated in Transcription
  misc_feature: MA Experiment 20000794 PARAMETER Experiment Name: At_Petals_P Parameter: Age (day) Value: 23-25 days
  misc_feature: MA Experiment 20000794 PARAMETER Experiment Name: At_Petals_P Parameter: Plant Line Value: WS
  misc_feature: MA Experiment 20000794 PARAMETER Experiment Name: At_Petals_P Parameter: Tissue Value: Petals vs. Whole plant
  misc_feature: MA Experiment ID: 20001248 Result: Up-regulated in Transcription
  misc_feature: MA Experiment 20001248 PARAMETER Experiment Name: At_Far-red-induction_P Parameter: Age (day) Value: 7
  misc_feature: MA Experiment 20001248 PARAMETER Experiment Name: At_Far-red-induction_P Parameter: Light Value: Far-red vs. White
  misc_feature: MA Experiment 20001248 PARAMETER Experiment Name: At_Far-red-induction_P Parameter: Organism Value: A. thaliana
  misc_feature: MA Experiment 20001248 PARAMETER Experiment Name: At_Far-red-induction_P Parameter: Plant Line Value: Columbia
  misc_feature: MA Experiment 20001248 PARAMETER Experiment Name: At_Far-red-induction_P Parameter: Timepoint (hr) Value: 4
  misc_feature: MA Experiment 20001248 PARAMETER Experiment Name: At_Far-red-induction_P Parameter: Tissue Value: Whole Plant
  misc_feature: MA Experiment ID: 20001451 Result: Up-regulated in Transcription
  misc_feature: MA Experiment 20001451 PARAMETER Experiment Name: At_Far-red-induction_P Parameter: Age (day) Value: 7
  misc_feature: MA Experiment 20001451 PARAMETER Experiment Name: At_Far-red-induction_P Parameter: Light Value: Far-red vs. White
  misc_feature: MA Experiment 20001451 PARAMETER Experiment Name: At_Far-red-induction_P Parameter: Organism Value: A. thaliana
  misc_feature: MA Experiment 20001451 PARAMETER Experiment Name: At_Far-red-induction_P Parameter: Plant Line Value: Columbia
  misc_feature: MA Experiment 20001451 PARAMETER Experiment Name: At_Far-red-induction_P Parameter: Timepoint (hr) Value: 24
  misc_feature: MA Experiment 20001451 PARAMETER Experiment Name: At_Far-red-induction_P Parameter: Tissue Value: Whole Plant
  misc_feature: MA Experiment ID: 20001555 Result: Down-regulated in Transcription
  misc_feature: MA Experiment 20001555 PARAMETER Experiment Name: At_Drought_Soil_Dry_P Parameter: Age (day) Value: 24
  misc_feature: MA Experiment 20001555 PARAMETER Experiment Name: At_Drought_Soil_Dry_P Parameter: Organism Value: A. thaliana
  misc_feature: MA Experiment 20001555 PARAMETER Experiment Name: At_Drought_Soil_Dry_P Parameter: Plant Line Value: WS
  misc_feature: MA Experiment 20001555 PARAMETER Experiment Name: At_Drought_Soil_Dry_P Parameter: Post Timepoint (hr) Value: None
  misc_feature: MA Experiment 20001555 PARAMETER Experiment Name: At_Drought_Soil_Dry_P Parameter: Post-Treatment Value: None
  misc_feature: MA Experiment 20001555 PARAMETER Experiment Name: At_Drought_Soil_Dry_P Parameter: Timepoint (day) Value: 10
  misc_feature: MA Experiment 20001555 PARAMETER Experiment Name: At_Drought_Soil_Dry_P Parameter: Treatment Value: Drought vs. No Drought
  misc_feature: MA Experiment ID: 20001774 Result: Down-regulated in Transcription
  misc_feature: MA Experiment 20001774 PARAMETER Experiment Name: At_Far-red-enriched-adult_P Parameter: Age (day) Value: 31
  misc_feature: MA Experiment 20001774 PARAMETER Experiment Name: At_Far-red-enriched-adult_P Parameter: Light Value: Far-red enriched vs. White
  misc_feature: MA Experiment 20001774 PARAMETER Experiment Name: At_Far-red-enriched-adult_P Parameter: Organism Value: A. thaliana
  misc_feature: MA Experiment 20001774 PARAMETER Experiment Name: At_Far-red-enriched-adult_P Parameter: Plant Line Value: Columbia
  misc_feature: MA Experiment 20001774 PARAMETER Experiment Name: At_Far-red-enriched-adult_P Parameter: Timepoint (hr) Value: 72
  misc_feature: MA Experiment 20001774 PARAMETER Experiment Name: At_Far-red-enriched-adult_P Parameter: Tissue Value: Aerial
  misc_feature: MA Experiment ID: 20001905 Result: Up-regulated in Transcription
  misc_feature: MA Experiment 20001905 PARAMETER Experiment Name: At_Drought_Reproduction_P Parameter: Age (day) Value: 40
  misc_feature: MA Experiment 20001905 PARAMETER Experiment Name: At_Drought_Reproduction_P Parameter: Organism Value: A. thaliana
  misc_feature: MA Experiment 20001905 PARAMETER Experiment Name: At_Drought_Reproduction_P Parameter: Plant Line Value: WS
  misc_feature: MA Experiment 20001905 PARAMETER Experiment Name: At_Drought_Reproduction_P Parameter: Timepoint (day) Value: 10
  misc_feature: MA Experiment 20001905 PARAMETER Experiment Name: At_Drought_Reproduction_P Parameter: Tissue Value: Rosettes
  misc_feature: MA Experiment 20001905 PARAMETER Experiment Name: At_Drought_Reproduction_P Parameter: Treatment Value: Drought vs. No Drought

SEQ ID NO: 34586 - protein, 202 aa, Arabidopsis thaliana; identical to SEQ ID NO: 30996
  peptide (1)..(202): Ceres Seq. ID no. 13490792
  misc_feature (36)..(118): Pfam Name: Plastocyanin-like domain Pfam Description: Plastocyanin-like domain
  misc_feature (1)..(167): Homolog of NCBI NO: 38636764 NR Description: putative blue copper binding protein
  misc_feature (9)..(190): Homolog of NCBI NO: 2493318 NR Description: Blue copper protein precursor
  misc_feature (11)..(183): Homolog of NCBI NO: 14140127 NR Description: uclacyanin 3-like protein [Oryza sativa]
  misc_feature (9)..(200): Homolog of NCBI NO: 15232287 NR Description: plastocyanin-like domain containing protein
  misc_feature (9)..(183): Homolog of NCBI NO: 15232289 NR Description: uclacyanin 3 [Arabidopsis thaliana]
  misc_feature (1)..(129): Homolog of NCBI NO: 25282796 NR Description: uclacyanin II [imported] - Arabidopsis thaliana
  misc_feature (1)..(202): Homolog of NCBI NO: 25453522 NR Description: blue copper-binding protein II [imported] -
  misc_feature (1)..(202): Homolog of NCBI NO: 25453521 NR Description: blue copper-binding protein II [imported] -
  misc_feature (1)..(202): Homolog of NCBI NO: 21554060 NR Description: phytocyanin [Arabidopsis thaliana]
  misc_feature (1)..(202): Homolog of NCBI NO: 15224960 NR Description: uclacyanin II [Arabidopsis thaliana]

SEQ ID NO: 34587 - protein, 200 aa, Arabidopsis thaliana; identical to SEQ ID NO: 30997
  peptide (1)..(200): Ceres Seq. ID no. 13490793
  misc_feature (34)..(116): Pfam Name: Plastocyanin-like domain Pfam Description: Plastocyanin-like domain
  misc_feature (1)..(165): Homolog of NCBI NO: 38636764 NR Description: putative blue copper binding protein
  misc_feature (7)..(188): Homolog of NCBI NO: 2493318 NR Description: Blue copper protein precursor
  misc_feature (9)..(181): Homolog of NCBI NO: 14140127 NR Description: uclacyanin 3-like protein [Oryza sativa]
  misc_feature (7)..(198): Homolog of NCBI NO: 15232287 NR Description: plastocyanin-like domain containing protein
  misc_feature (7)..(181): Homolog of NCBI NO: 15232289 NR Description: uclacyanin 3 [Arabidopsis thaliana]
  misc_feature (1)..(127): Homolog of NCBI NO: 25282796 NR Description: uclacyanin II [imported] - Arabidopsis thaliana
  misc_feature (1)..(200): Homolog of NCBI NO: 25453522 NR Description: blue copper-binding protein II [imported] -
  misc_feature (1)..(200): Homolog of NCBI NO: 25453521 NR Description: blue copper-binding protein II [imported] -
  misc_feature (1)..(200): Homolog of NCBI NO: 21554060 NR Description: phytocyanin [Arabidopsis thaliana]
  misc_feature (1)..(200): Homolog of NCBI NO: 15224960 NR Description: uclacyanin II [Arabidopsis thaliana]

SEQ ID NO: 34588 - protein, 194 aa, Arabidopsis thaliana; identical to SEQ ID NO: 30998
  peptide (1)..(194): Ceres Seq. ID no. 13490794
  misc_feature (28)..(110): Pfam Name: Plastocyanin-like domain Pfam Description: Plastocyanin-like domain
  misc_feature (1)..(159): Homolog of NCBI NO: 38636764 NR Description: putative blue copper binding protein
  misc_feature (1)..(182): Homolog of NCBI NO: 2493318 NR Description: Blue copper protein precursor
  misc_feature (3)..(175): Homolog of NCBI NO: 14140127 NR Description: uclacyanin 3-like protein [Oryza sativa]
  misc_feature (1)..(192): Homolog of NCBI NO: 15232287 NR Description: plastocyanin-like domain containing protein
  misc_feature (1)..(175): Homolog of NCBI NO: 15232289 NR Description: uclacyanin 3 [Arabidopsis thaliana]
  misc_feature (1)..(121): Homolog of NCBI NO: 25282796 NR Description: uclacyanin II [imported] - Arabidopsis thaliana
  misc_feature (1)..(194): Homolog of NCBI NO: 25453522 NR Description: blue copper-binding protein II [imported] -
  misc_feature (1)..(194): Homolog of NCBI NO: 25453521 NR Description: blue copper-binding protein II [imported] -
  misc_feature (1)..(194): Homolog of NCBI NO: 21554060 NR Description: phytocyanin [Arabidopsis thaliana]
  misc_feature (1)..(194): Homolog of NCBI NO: 15224960 NR Description: uclacyanin II [Arabidopsis thaliana]

SEQ ID NO: 34589 - DNA, 1904 bp, Arabidopsis thaliana; identical to SEQ ID NO: 30999
  misc_feature (1)..(1904): Ceres Seq. ID no. 12338555
  misc_feature: MA Experiment ID: 20000185 Result: Down-regulated in Transcription
  misc_feature: MA Experiment 20000185 PARAMETER Experiment Name: At_Roots__P Parameter: Age (day) Value: 7 vs. 21
  misc_feature: MA Experiment 20000185 PARAMETER Experiment Name: At_Roots__P Parameter: Organism Value: A. thaliana
  misc_feature: MA Experiment 20000185 PARAMETER Experiment Name: At_Roots__P Parameter: Tissue Value: Roots vs. Whole Plant
  misc_feature: MA Experiment ID: 20000234 Result: Down-regulated in Transcription
  misc_feature: MA Experiment 20000234 PARAMETER Experiment Name: At_Siliques_P Parameter: Age (day) Value: 21
  misc_feature: MA Experiment 20000234 PARAMETER Experiment Name: At_Siliques_P Parameter: Organism Value: A. thaliana
  misc_feature: MA Experiment 20000234 PARAMETER Experiment Name: At_Siliques_P Parameter: Plant Line Value: WS
  misc_feature: MA Experiment 20000234 PARAMETER Experiment Name: At_Siliques_P Parameter: Tissue Value: Less Than 5mm Siliques vs. Whole Plant
  misc_feature: MA Experiment ID: 20000235 Result: Down-regulated in Transcription
  misc_feature: MA Experiment 20000235 PARAMETER Experiment Name: At_Siliques_P Parameter: Age (day) Value: 21
  misc_feature: MA Experiment 20000235 PARAMETER Experiment Name: At_Siliques_P Parameter: Organism Value: A. thaliana
  misc_feature: MA Experiment 20000235 PARAMETER Experiment Name: At_Siliques_P Parameter: Plant Line Value: WS
  misc_feature: MA Experiment 20000235 PARAMETER Experiment Name: At_Siliques_P Parameter: Tissue Value: 5-10mm Siliques vs. Whole Plant
  misc_feature: MA Experiment ID: 20000264 Result: Down-regulated in Transcription
  misc_feature: MA Experiment 20000264 PARAMETER Experiment Name: At_Open_Flower_P Parameter: Age (day) Value: 21
  misc_feature: MA Experiment 20000264 PARAMETER Experiment Name: At_Open_Flower_P Parameter: Plant Line Value: WS
  misc_feature: MA Experiment 20000264 PARAMETER Experiment Name: At_Open_Flower_P Parameter: Tissue Value: Open Flower vs. Whole Plant
  misc_feature: MA Experiment ID: 20000265 Result: Down-regulated in Transcription
  misc_feature: MA Experiment 20000265 PARAMETER Experiment Name: At_Open_Flower_P Parameter: Age (day) Value: 21
  misc_feature: MA Experiment 20000265 PARAMETER Experiment Name: At_Open_Flower_P Parameter: Plant Line Value: WS
  misc_feature: MA Experiment 20000265 PARAMETER Experiment Name: At_Open_Flower_P Parameter: Tissue Value: Closed Flower vs. Whole Plant
  misc_feature: MA Experiment ID: 20000286 Result: Down-regulated in Transcription
  misc_feature: MA Experiment 20000286 PARAMETER Experiment Name: At_Open_Flower_P Parameter: Age (day) Value: 21
  misc_feature: MA Experiment 20000286 PARAMETER Experiment Name: At_Open_Flower_P Parameter: Plant Line Value: WS
  misc_feature: MA Experiment 20000286 PARAMETER Experiment Name: At_Open_Flower_P Parameter: Tissue Value: Half Open vs. Whole Plant
  misc_feature: MA Experiment ID: 20000438 Result: Down-regulated in Transcription
  misc_feature: MA Experiment 20000438 PARAMETER Experiment Name: At_Shoots__P Parameter: Age (day) Value: 14
  misc_feature: MA Experiment 20000438 PARAMETER Experiment Name: At_Shoots__P Parameter: Tissue Value: Shoots vs. Whole Plant
  misc_feature: MA Experiment ID: 20000439 Result: Down-regulated in Transcription
  misc_feature: MA Experiment 20000439 PARAMETER Experiment Name: At_Roots__P Parameter: Age (day) Value: 14 vs. 21
  misc_feature: MA Experiment 20000439 PARAMETER Experiment Name: At_Roots__P Parameter: Organism Value: A. thaliana
  misc_feature: MA Experiment 20000439 PARAMETER Experiment Name: At_Roots__P Parameter: Tissue Value: Roots vs. Whole Plant
  misc_feature: MA Experiment ID: 20001757 Result: Up-regulated in Transcription
  misc_feature: MA Experiment 20001757 PARAMETER Experiment Name: At_50mM_NH4NO3_L-to-H_P Parameter: Timepoint (hr) Value: 6
  misc_feature: MA Experiment 20001757 PARAMETER Experiment Name: At_50mM_NH4NO3_L-to-H_P Parameter: Tissue Value: Leaf
  misc_feature: MA Experiment 20001757 PARAMETER Experiment Name: At_50mM_NH4NO3_L-to-H_P Parameter: Treatment Value: 50mM NH4NO3 vs 100mM Mannitol

SEQ ID NO: 34590 - protein, 466 aa, Arabidopsis thaliana; identical to SEQ ID NO: 31000
  peptide (1)..(466): Ceres Seq. ID no. 12338557
  misc_feature (34)..(189): Homolog of NCBI NO: 13699224 NR Description: GTP cyclohydrolase I [Physarum polycephalum]
  misc_feature (35)..(187): Homolog of NCBI NO: 37521149 NR Description: GTP cyclohydrolase I [Gloeobacter violaceus]
  misc_feature (21)..(187): Homolog of NCBI NO: 21673611 NR Description: GTP cyclohydrolase I [Chlorobium tepidum TLS]
  misc_feature (34)..(221): Homolog of NCBI NO: 14009659 NR Description: GTP cyclohydrolase I [Physarum polycephalum]
  misc_feature (34)..(232): Homolog of NCBI NO: 13699226 NR Description: GTP cyclohydrolase I [Physarum polycephalum]
  misc_feature (28)..(221): Homolog of NCBI NO: 6016111 NR Description: GTP cyclohydrolase I (GTP-CH-I)
  misc_feature (71)..(458): Homolog of NCBI NO: 38346071 NR Description: OSJNBa0084K01.11 [Oryza sativa (japonica
  misc_feature (1)..(452): Homolog of NCBI NO: 17979018 NR Description: GTP cyclohydrolase I [Lycopersicon esculentum]
  misc_feature (1)..(466): Homolog of NCBI NO: 19909132 NR Description: GTP cyclohydrolase I [Arabidopsis thaliana]
  misc_feature (1)..(466): Homolog of NCBI NO: 15231435 NR Description: GTP cyclohydrolase I

SEQ ID NO: 34591 - protein, 450 aa, Arabidopsis thaliana; identical to SEQ ID NO: 31001
  peptide (1)..(450): Ceres Seq. ID no. 12338558
  misc_feature (18)..(173): Homolog of NCBI NO: 13699224 NR Description: GTP cyclohydrolase I [Physarum polycephalum]
  misc_feature (19)..(171): Homolog of NCBI NO: 37521149 NR Description: GTP cyclohydrolase I [Gloeobacter violaceus]
  misc_feature (5)..(171): Homolog of NCBI NO: 21673611 NR Description: GTP cyclohydrolase I [Chlorobium tepidum TLS]
  misc_feature (18)..(205): Homolog of NCBI NO: 14009659 NR Description: GTP cyclohydrolase I [Physarum polycephalum]
  misc_feature (18)..(216): Homolog of NCBI NO: 13699226 NR Description: GTP cyclohydrolase I [Physarum polycephalum]
  misc_feature (12)..(205): Homolog of NCBI NO: 6016111 NR Description: GTP cyclohydrolase I (GTP-CH-I)
  misc_feature (55)..(442): Homolog of NCBI NO: 38346071 NR Description: OSJNBa0084K01.11 [Oryza sativa (japonica
  misc_feature (1)..(436): Homolog of NCBI NO: 17979018 NR Description: GTP cyclohydrolase I [Lycopersicon esculentum]
  misc_feature (1)..(450): Homolog of NCBI NO: 19909132 NR Description: GTP cyclohydrolase I [Arabidopsis thaliana]
  misc_feature (1)..(450): Homolog of NCBI NO: 15231435 NR Description: GTP cyclohydrolase I

SEQ ID NO: 34592 - protein, 234 aa, Arabidopsis thaliana; identical to SEQ ID NO: 31002
  peptide (1)..(234): Ceres Seq. ID no. 12338559
  misc_feature (19)..(221): Homolog of NCBI NO: 37521149 NR Description: GTP cyclohydrolase I [Gloeobacter violaceus]
  misc_feature (44)..(221): Homolog of NCBI NO: 13699226 NR Description: GTP cyclohydrolase I [Physarum polycephalum]
  misc_feature (36)..(222): Homolog of NCBI NO: 4503949 NR Description: GTP cyclohydrolase 1 (dopa-responsive dystonia)
  misc_feature (33)..(224): Homolog of NCBI NO: 6016111 NR Description: GTP cyclohydrolase I (GTP-CH-I)
  misc_feature (32)..(224): Homolog of NCBI NO: 22298852 NR Description: GTP cyclohydrolase I [Thermosynechococcus
  misc_feature (5)..(217): Homolog of NCBI NO: 16605516 NR Description: GTP cyclohydrolase I [Danio rerio]
  misc_feature (1)..(226): Homolog of NCBI NO: 38346071 NR Description: OSJNBa0084K01.11 [Oryza sativa (japonica
  misc_feature (1)..(220): Homolog of NCBI NO: 17979018 NR Description: GTP cyclohydrolase I [Lycopersicon esculentum]
  misc_feature (1)..(234): Homolog of NCBI NO: 19909132 NR Description: GTP cyclohydrolase I [Arabidopsis thaliana]
  misc_feature (1)..(234): Homolog of NCBI NO: 15231435 NR Description: GTP cyclohydrolase I

SEQ ID NO: 34593 - DNA, 1698 bp, Arabidopsis thaliana; identical to SEQ ID NO: 31003
  misc_feature (1)..(1698): Ceres Seq. ID no. 12396660
  misc_feature: MA Experiment ID: 108434 Result: Up-regulated in Transcription
  misc_feature: MA Experiment 108434 PARAMETER Experiment Name: At_Root_Tips_cDNA_P Parameter: Tissue Value: Root Tips
  misc_feature: MA Experiment ID: 108462 Result: Down-regulated in Transcription
  misc_feature: MA Experiment 108462 PARAMETER Experiment Name: At_Germinating_Seeds_cDNA_P Parameter: Age (day) Value: 2 vs. 0
  misc_feature: MA Experiment 108462 PARAMETER Experiment Name: At_Germinating_Seeds_cDNA_P Parameter: Tissue Value: Germinating Seeds
  misc_feature: MA Experiment ID: 108463 Result: Down-regulated in Transcription
  misc_feature: MA Experiment 108463 PARAMETER Experiment Name: At_Germinating_Seeds_cDNA_P Parameter: Age (day) Value: 3 vs. 0
  misc_feature: MA Experiment 108463 PARAMETER Experiment Name: At_Germinating_Seeds_cDNA_P Parameter: Tissue Value: Germinating Seeds
  misc_feature: MA Experiment ID: 108464 Result: Down-regulated in Transcription
  misc_feature: MA Experiment 108464 PARAMETER Experiment Name: At_Germinating_Seeds_cDNA_P Parameter: Age (day) Value: 4 vs. 0
  misc_feature: MA Experiment 108464 PARAMETER Experiment Name: At_Germinating_Seeds_cDNA_P Parameter: Tissue Value: Germinating Seeds
  misc_feature: MA Experiment ID: 108573 Result: Up-regulated in Transcription
  misc_feature: MA Experiment 108573 PARAMETER Experiment Name: At_Drought_cDNA_P Parameter: Timepoint (hr) Value: 6
  misc_feature: MA Experiment 108573 PARAMETER Experiment Name: At_Drought_cDNA_P Parameter: Tissue Value: Aerial
  misc_feature: MA Experiment 108573 PARAMETER Experiment Name: At_Drought_cDNA_P Parameter: Treatment Value: Drought vs. No Drought
  misc_feature: MA Experiment ID: 20000112 Result: Up-regulated in Transcription
  misc_feature: MA Experiment 20000112 PARAMETER Experiment Name: At_42deg_Heat_cDNA_P Parameter: Temperature (deg C) Value: 42 vs. 22
  misc_feature: MA Experiment 20000112 PARAMETER Experiment Name: At_42deg_Heat_cDNA_P Parameter: Timepoint (hr) Value: 2
  misc_feature: MA Experiment 20000112 PARAMETER Experiment Name: At_42deg_Heat_cDNA_P Parameter: Tissue Value: Aerial
  misc_feature: MA Experiment ID: 20000144 Result: Up-regulated in Transcription
  misc_feature: MA Experiment 20000144 PARAMETER Experiment Name: At_42deg_Heat_cDNA_P Parameter: Temperature (deg C) Value: 42 vs. 22
  misc_feature: MA Experiment 20000144 PARAMETER Experiment Name: At_42deg_Heat_cDNA_P Parameter: Timepoint (hr) Value: 1
  misc_feature: MA Experiment 20000144 PARAMETER Experiment Name: At_42deg_Heat_cDNA_P Parameter: Tissue Value: Aerial
  misc_feature: MA Experiment ID: 20001557 Result: Up-regulated in Transcription
  misc_feature: MA Experiment 20001557 PARAMETER Experiment Name: At_Drought_Soil_Dry_P Parameter: Age (day) Value: 27
  misc_feature: MA Experiment 20001557 PARAMETER Experiment Name: At_Drought_Soil_Dry_P Parameter: Organism Value: A. thaliana
  misc_feature: MA Experiment 20001557 PARAMETER Experiment Name: At_Drought_Soil_Dry_P Parameter: Plant Line Value: WS
  misc_feature: MA Experiment 20001557 PARAMETER Experiment Name: At_Drought_Soil_Dry_P Parameter: Post Timepoint (hr) Value: 3
  misc_feature: MA Experiment 20001557 PARAMETER Experiment Name: At_Drought_Soil_Dry_P Parameter: Post-Treatment Value: Re-Water vs. No Drought
  misc_feature: MA Experiment 20001557 PARAMETER Experiment Name: At_Drought_Soil_Dry_P Parameter: Timepoint (day) Value: 13
  misc_feature: MA Experiment 20001557 PARAMETER Experiment Name: At_Drought_Soil_Dry_P Parameter: Treatment Value: Drought vs. No Drought

SEQ ID NO: 34594 - protein, 430 aa, Arabidopsis thaliana; identical to SEQ ID NO: 31004
  peptide (1)..(430): Ceres Seq. ID no. 12396661
  misc_feature (50)..(394): Homolog of NCBI NO: 4704417 NR Description: WS beta-transducin repeats protein [Homo sapiens]
  misc_feature (6)..(394): Homolog of NCBI NO: 22760172 NR Description: unnamed protein product [Homo sapiens]
  misc_feature (6)..(394): Homolog of NCBI NO: 15277891 NR Description: Similar to transducin (beta)-like 2 [Homo sapiens]
  misc_feature (6)..(394): Homolog of NCBI NO: 7549793 NR Description: transducin (beta)-like 2, isoform 1
  misc_feature (43)..(390): Homolog of NCBI NO: 27696175 NR Description: Similar to transducin (beta)-like 2 [Xenopus
  misc_feature (253)..(425): Homolog of NCBI NO: 14091657 NR Description: F6N15.8-like protein [Mangifera indica]
  misc_feature (3)..(429): Homolog of NCBI NO: 30102987 NR Description: putative WD repeat protein
  misc_feature (1)..(141): Homolog of NCBI NO: 7486549 NR Description: hypothetical protein F6N15.8 - Arabidopsis
  misc_feature (123)..(430): Homolog of NCBI NO: 7486549 NR Description: hypothetical protein F6N15.8 - Arabidopsis
  misc_feature (1)..(430): Homolog of NCBI NO: 18411222 NR Description: putative WD repeat membrane protein

SEQ ID NO: 34595 - protein, 394 aa, Arabidopsis thaliana; identical to SEQ ID NO: 31005
  peptide (1)..(394): Ceres Seq. ID no. 12396662
  misc_feature (14)..(358): Homolog of NCBI NO: 4704417 NR Description: WS beta-transducin repeats protein [Homo sapiens]
  misc_feature (1)..(358): Homolog of NCBI NO: 15277891 NR Description: Similar to transducin (beta)-like 2 [Homo sapiens]
  misc_feature (1)..(358): Homolog of NCBI NO: 22760172 NR Description: unnamed protein product [Homo sapiens]
  misc_feature (1)..(358): Homolog of NCBI NO: 7549793 NR Description: transducin (beta)-like 2, isoform 1
  misc_feature (7)..(354): Homolog of NCBI NO: 27696175 NR Description: Similar to transducin (beta)-like 2 [Xenopus
  misc_feature (217)..(389): Homolog of NCBI NO: 14091657 NR Description: F6N15.8-like protein [Mangifera indica]
  misc_feature (1)..(393): Homolog of NCBI NO: 30102987 NR Description: putative WD repeat protein
  misc_feature (1)..(105): Homolog of NCBI NO: 7486549 NR Description: hypothetical protein F6N15.8 - Arabidopsis
  misc_feature (87)..(394): Homolog of NCBI NO: 7486549 NR Description: hypothetical protein F6N15.8 - Arabidopsis
  misc_feature (1)..(394): Homolog of NCBI NO: 18411222 NR Description: putative WD repeat membrane protein

SEQ ID NO: 34596 - protein, 276 aa, Arabidopsis thaliana; identical to SEQ ID NO: 31006
  peptide (1)..(276): Ceres Seq. ID no. 12396663
  misc_feature (1)..(240): Homolog of NCBI NO: 31543845 NR Description: transducin (beta)-like 2 [Mus musculus]
  misc_feature (1)..(240): Homolog of NCBI NO: 4704417 NR Description: WS beta-transducin repeats protein [Homo sapiens]
  misc_feature (1)..(240): Homolog of NCBI NO: 15277891 NR Description: Similar to transducin (beta)-like 2 [Homo sapiens]
  misc_feature (1)..(240): Homolog of NCBI NO: 22760172 NR Description: unnamed protein product [Homo sapiens]
  misc_feature (1)..(240): Homolog of NCBI NO: 7549793 NR Description: transducin (beta)-like 2, isoform 1
  misc_feature (1)..(236): Homolog of NCBI NO: 27696175 NR Description: Similar to transducin (beta)-like 2 [Xenopus
  misc_feature (99)..(271): Homolog of NCBI NO: 14091657 NR Description: F6N15.8-like protein [Mangifera indica]
  misc_feature (1)..(275): Homolog of NCBI NO: 30102987 NR Description: putative WD repeat protein
  misc_feature (1)..(276): Homolog of NCBI NO: 7486549 NR Description: hypothetical protein F6N15.8 - Arabidopsis
  misc_feature (1)..(276): Homolog of NCBI NO: 18411222 NR Description: putative WD repeat membrane protein

SEQ ID NO: 34597 - DNA, 991 bp, Arabidopsis thaliana; identical to SEQ ID NO: 31007
  misc_feature (1)..(991): Ceres Seq. ID no. 13645938
  misc_feature: MA Experiment ID: 20000264 Result: Up-regulated in Transcription
  misc_feature: MA Experiment 20000264 PARAMETER Experiment Name: At_Open_Flower_P Parameter: Age (day) Value: 21
  misc_feature: MA Experiment 20000264 PARAMETER Experiment Name: At_Open_Flower_P Parameter: Plant Line Value: WS
  misc_feature: MA Experiment 20000264 PARAMETER Experiment Name: At_Open_Flower_P Parameter: Tissue Value: Open Flower vs. Whole Plant
  misc_feature: MA Experiment ID: 20000265 Result: Up-regulated in Transcription
  misc_feature: MA Experiment 20000265 PARAMETER Experiment Name: At_Open_Flower_P Parameter: Age (day) Value: 21
  misc_feature: MA Experiment 20000265 PARAMETER Experiment Name: At_Open_Flower_P Parameter: Plant Line Value: WS
  misc_feature: MA Experiment 20000265 PARAMETER Experiment Name: At_Open_Flower_P Parameter: Tissue Value: Closed Flower vs. Whole Plant
  misc_feature: MA Experiment ID: 20000286 Result: Up-regulated in Transcription
  misc_feature: MA Experiment 20000286 PARAMETER Experiment Name: At_Open_Flower_P Parameter: Age (day) Value: 21
  misc_feature: MA Experiment 20000286 PARAMETER Experiment Name: At_Open_Flower_P Parameter: Plant Line Value: WS
  misc_feature: MA Experiment 20000286 PARAMETER Experiment Name: At_Open_Flower_P Parameter: Tissue Value: Half Open vs. Whole Plant
  misc_feature: MA Experiment ID: 20000495 Result: Down-regulated in Transcription
  misc_feature: MA Experiment 20000495 PARAMETER Experiment Name: At_Guard_Cells_P Parameter: Harvest Date Value: 8/2/2002
  misc_feature: MA Experiment 20000495 PARAMETER Experiment Name: At_Guard_Cells_P Parameter: Organism Value: A. thaliana
  misc_feature: MA Experiment 20000495 PARAMETER Experiment Name: At_Guard_Cells_P Parameter: Tissue Value: Guard Cells vs. Leaves
  misc_feature: MA Experiment ID: 20000794 Result: Up-regulated in Transcription
  misc_feature: MA Experiment 20000794 PARAMETER Experiment Name: At_Petals_P Parameter: Age (day) Value: 23-25 days
  misc_feature: MA Experiment 20000794 PARAMETER Experiment Name: At_Petals_P Parameter: Plant Line Value: WS
  misc_feature: MA Experiment 20000794 PARAMETER Experiment Name: At_Petals_P Parameter: Tissue Value: Petals vs. Whole plant
  misc_feature: MA Experiment ID: 20001909 Result: Up-regulated in Transcription
  misc_feature: MA Experiment 20001909 PARAMETER Experiment Name: At_Drought_Reproduction_P Parameter: Age (day) Value: 35
  misc_feature: MA Experiment 20001909 PARAMETER Experiment Name: At_Drought_Reproduction_P Parameter: Organism Value: A. thaliana
  misc_feature: MA Experiment 20001909 PARAMETER Experiment Name: At_Drought_Reproduction_P Parameter: Plant Line Value: WS
  misc_feature: MA Experiment 20001909 PARAMETER Experiment Name: At_Drought_Reproduction_P Parameter: Timepoint (day) Value: 5
  misc_feature: MA Experiment 20001909 PARAMETER Experiment Name: At_Drought_Reproduction_P Parameter: Tissue Value: Flowers
  misc_feature: MA Experiment 20001909 PARAMETER Experiment Name: At_Drought_Reproduction_P Parameter: Treatment Value: Drought vs. No Drought

SEQ ID NO: 34598 - protein, 226 aa, Arabidopsis thaliana; identical to SEQ ID NO: 31008
  peptide (1)..(226): Ceres Seq. ID no. 13645939
  misc_feature (106)..(163): Pfam Name: LIM domain Pfam Description: LIM domain
  misc_feature (1)..(161): Homolog of NCBI NO: 11282608 NR Description: transcription factor L2 [imported] - Arabidopsis
  misc_feature (1)..(188): Homolog of NCBI NO: 15225592 NR Description: LIM-domain protein -related [Arabidopsis
  misc_feature (1)..(205): Homolog of NCBI NO: 15228188 NR Description: transcription factor L2 [Arabidopsis thaliana]
  misc_feature (1)..(183): Homolog of NCBI NO: 7489184 NR Description: probable transcription factor SF3 - common
  misc_feature (1)..(226): Homolog of NCBI NO: 4321401 NR Description: LIM domain protein PLIM-2 [Helianthus annuus]
  misc_feature (1)..(208): Homolog of NCBI NO: 8515104 NR Description: LIM domain protein PLIM-2 [Nicotiana tabacum]
  misc_feature (1)..(214): Homolog of NCBI NO: 15223476 NR Description: LIM domain protein -related [Arabidopsis thaliana]
  misc_feature (1)..(214): Homolog of NCBI NO: 25354704 NR Description: T1N6.19 protein - Arabidopsis thaliana
  misc_feature (2)..(213): Homolog of NCBI NO: 15233063 NR Description: LIM domain protein [Arabidopsis thaliana]
  misc_feature (1)..(226): Homolog of NCBI NO: 15225897 NR Description: LIM-domain protein -related [Arabidopsis

SEQ ID NO: 34599 - protein, 207 aa, Arabidopsis thaliana; identical to SEQ ID NO: 31009
  peptide (1)..(207): Ceres Seq. ID no. 13645940
  misc_feature (87)..(144): Pfam Name: LIM domain Pfam Description: LIM domain
  misc_feature (1)..(142): Homolog of NCBI NO: 11282608 NR Description: transcription factor L2 [imported] - Arabidopsis
  misc_feature (1)..(169): Homolog of NCBI NO: 15225592 NR Description: LIM-domain protein -related [Arabidopsis
  misc_feature (1)..(186): Homolog of NCBI NO: 15228188 NR Description: transcription factor L2 [Arabidopsis thaliana]
  misc_feature (1)..(164): Homolog of NCBI NO: 7489184 NR Description: probable transcription factor SF3 - common
  misc_feature (1)..(207): Homolog of NCBI NO: 4321401 NR Description: LIM domain protein PLIM-2 [Helianthus annuus]
  misc_feature (1)..(189): Homolog of NCBI NO: 8515104 NR Description: LIM domain protein PLIM-2 [Nicotiana tabacum]
  misc_feature (1)..(195): Homolog of NCBI NO: 15223476 NR Description: LIM domain protein -related [Arabidopsis thaliana]
  misc_feature (1)..(195): Homolog of NCBI NO: 25354704 NR Description: T1N6.19 protein - Arabidopsis thaliana
  misc_feature (1)..(194): Homolog of NCBI NO: 15233063 NR Description: LIM domain protein [Arabidopsis thaliana]
  misc_feature (1)..(207): Homolog of NCBI NO: 15225897 NR Description: LIM-domain protein -related [Arabidopsis

SEQ ID NO: 34600 - protein, 175 aa, Arabidopsis thaliana; identical to SEQ ID NO: 31010
  peptide (1)..(175): Ceres Seq. ID no. 13645941
  misc_feature (55)..(112): Pfam Name: LIM domain Pfam Description: LIM domain
  misc_feature (1)..(110): Homolog of NCBI NO: 11282608 NR Description: transcription factor L2 [imported] - Arabidopsis
  misc_feature (1)..(137): Homolog of NCBI NO: 15225592 NR Description: LIM-domain protein -related [Arabidopsis
  misc_feature (1)..(154): Homolog of NCBI NO: 15228188 NR Description: transcription factor L2 [Arabidopsis thaliana]
  misc_feature (1)..(132): Homolog of NCBI NO: 7489184 NR Description: probable transcription factor SF3 - common
  misc_feature (1)..(175): Homolog of NCBI NO: 4321401 NR Description: LIM domain protein PLIM-2 [Helianthus annuus]
  misc_feature (1)..(157): Homolog of NCBI NO: 8515104 NR Description: LIM domain protein PLIM-2 [Nicotiana tabacum]
  misc_feature (1)..(163): Homolog of NCBI NO: 15223476 NR Description: LIM domain protein -related [Arabidopsis thaliana]
  misc_feature (1)..(163): Homolog of NCBI NO: 25354704 NR Description: T1N6.19 protein - Arabidopsis thaliana
  misc_feature (1)..(162): Homolog of NCBI NO: 15233063 NR Description: LIM domain protein [Arabidopsis thaliana]
  misc_feature (1)..(175): Homolog of NCBI NO: 15225897 NR Description: LIM-domain protein -related [Arabidopsis

SEQ ID NO: 34601 - DNA, 1266 bp, Arabidopsis thaliana; identical to SEQ ID NO: 31011
  misc_feature (1)..(1266): Ceres Seq. ID no. 13497673
  misc_feature: MA Experiment ID: 108434 Result: Down-regulated in Transcription
  misc_feature: MA Experiment 108434 PARAMETER Experiment Name: At_Root_Tips_cDNA_P Parameter: Tissue Value: Root Tips
  misc_feature: MA Experiment ID: 108435 Result: Up-regulated in Transcription
  misc_feature: MA Experiment 108435 PARAMETER Experiment Name: At_stm_Mutants_cDNA_P Parameter: Plant Line Value: wt Landsburg vs stm
  misc_feature: MA Experiment 108435 PARAMETER Experiment Name: At_stm_Mutants_cDNA_P Parameter: Tissue Value: Shoot Apical Meristem Region
  misc_feature: MA Experiment ID: 108464 Result: Down-regulated in Transcription
  misc_feature: MA Experiment 108464 PARAMETER Experiment Name: At_Germinating_Seeds_cDNA_P Parameter: Age (day) Value: 4 vs. 0
  misc_feature: MA Experiment 108464 PARAMETER Experiment Name: At_Germinating_Seeds_cDNA_P Parameter: Tissue Value: Germinating Seeds
  misc_feature: MA Experiment ID: 108473 Result: Down-regulated in Transcription
  misc_feature: MA Experiment 108473 PARAMETER Experiment Name: At_Drought_Flowers_cDNA_P Parameter: Timepoint (hr) Value: 7 d
  misc_feature: MA Experiment 108473 PARAMETER Experiment Name: At_Drought_Flowers_cDNA_P Parameter: Tissue Value: Flower
  misc_feature: MA Experiment 108473 PARAMETER Experiment Name: At_Drought_Flowers_cDNA_P Parameter: Treatment Value: Drought vs. No Drought
  misc_feature: MA Experiment ID: 108569 Result: Up-regulated in Transcription
  misc_feature: MA Experiment 108569 PARAMETER Experiment Name: At_0.001%_MeJA__cDNA_P Parameter: Timepoint (hr) Value: 6
  misc_feature: MA Experiment 108569 PARAMETER Experiment Name: At_0.001%_MeJA__cDNA_P Parameter: Tissue Value: Aerial
  misc_feature: MA Experiment 108569 PARAMETER Experiment Name: At_0.001%_MeJA__cDNA_P Parameter: Treatment Value: 0.001% MeJA vs. No Treatment
  misc_feature: MA Experiment ID: 108574 Result: Up-regulated in Transcription
  misc_feature: MA Experiment 108574 PARAMETER Experiment Name: At_Wounding__cDNA_P Parameter: Timepoint (hr) Value: 1
  misc_feature: MA Experiment 108574 PARAMETER Experiment Name: At_Wounding__cDNA_P Parameter: Tissue Value: Aerial
  misc_feature: MA Experiment 108574 PARAMETER Experiment Name: At_Wounding__cDNA_P Parameter: Treatment Value: Wounding vs. No Wounding
  misc_feature: MA Experiment ID: 108576 Result: Down-regulated in Transcription
  misc_feature: MA Experiment 108576 PARAMETER Experiment Name: At_42deg_Heat_cDNA_P Parameter: Temperature (deg C) Value: 42 vs. 22
  misc_feature: MA Experiment 108576 PARAMETER Experiment Name: At_42deg_Heat_cDNA_P Parameter: Timepoint (hr) Value: 1
  misc_feature: MA Experiment 108576 PARAMETER Experiment Name: At_42deg_Heat_cDNA_P Parameter: Tissue Value: Aerial
  misc_feature: MA Experiment ID: 108585 Result: Up-regulated in Transcription
  misc_feature: MA Experiment 108585 PARAMETER Experiment Name: At_5mM_NaNP_cDNA_P Parameter: Timepoint (hr) Value: 6
  misc_feature: MA Experiment 108585 PARAMETER Experiment Name: At_5mM_NaNP_cDNA_P Parameter: Tissue Value: Aerial
  misc_feature: MA Experiment 108585 PARAMETER Experiment Name: At_5mM_NaNP_cDNA_P Parameter: Treatment Value: null
  misc_feature: MA Experiment ID: 108595 Result: Up-regulated in Transcription
  misc_feature: MA Experiment 108595 PARAMETER Experiment Name: At_Ler-pi_Ovule_cDNA_P Parameter: Plant Line Value: null
  misc_feature: MA Experiment ID: 108668 Result: Down-regulated in Transcription
  misc_feature: MA Experiment 108668 PARAMETER Experiment Name: At_2mM_SA_cDNA_P Parameter: Plant Line Value: WS
  misc_feature: MA Experiment 108668 PARAMETER Experiment Name: At_2mM_SA_cDNA_P Parameter: Timepoint (hr) Value: 6
  misc_feature: MA Experiment 108668 PARAMETER Experiment Name: At_2mM_SA_cDNA_P Parameter: Treatment Value: 2mM SA vs. No Treatment
  misc_feature: MA Experiment ID: 20000070 Result: Up-regulated in Transcription
  misc_feature: MA Experiment 20000070 PARAMETER Experiment Name: At_100uM_ABA_Mutants_cDNA_P Parameter: Plant Line Value: CS24
  misc_feature: MA Experiment 20000070 PARAMETER Experiment Name: At_100uM_ABA_Mutants_cDNA_P Parameter: Timepoint (hr) Value: 6
  misc_feature: MA Experiment 20000070 PARAMETER Experiment Name: At_100uM_ABA_Mutants_cDNA_P Parameter: Tissue Value: Aerial
  misc_feature: MA Experiment 20000070 PARAMETER Experiment Name: At_100uM_ABA_Mutants_cDNA_P Parameter: Treatment Value: 100uM ABA vs. No Treatment
  misc_feature: MA Experiment ID: 20000087 Result: Up-regulated in Transcription
  misc_feature: MA Experiment 20000087 PARAMETER Experiment Name: At_100uM_ABA_Mutants_cDNA_P Parameter: Plant Line Value: WS
  misc_feature: MA Experiment 20000087 PARAMETER Experiment Name: At_100uM_ABA_Mutants_cDNA_P Parameter: Timepoint (hr) Value: 6
  misc_feature: MA Experiment 20000087 PARAMETER Experiment Name: At_100uM_ABA_Mutants_cDNA_P Parameter: Tissue Value: Aerial
  misc_feature: MA Experiment 20000087 PARAMETER Experiment Name: At_100uM_ABA_Mutants_cDNA_P Parameter: Treatment Value: 100uM ABA vs. No Treatment
  misc_feature: MA Experiment ID: 20000112 Result: Down-regulated in Transcription
  misc_feature: MA Experiment 20000112 PARAMETER Experiment Name: At_42deg_Heat_cDNA_P Parameter: Temperature (deg C) Value: 42 vs. 22
  misc_feature: MA Experiment 20000112 PARAMETER Experiment Name: At_42deg_Heat_cDNA_P Parameter: Timepoint (hr) Value: 2
  misc_feature: MA Experiment 20000112 PARAMETER Experiment Name: At_42deg_Heat_cDNA_P Parameter: Tissue Value: Aerial
  misc_feature: MA Experiment ID: 20000113 Result: Down-regulated in Transcription
  misc_feature: MA Experiment 20000113 PARAMETER Experiment Name: At_42deg_Heat_cDNA_P Parameter: Temperature (deg C) Value: 42 vs. 22
  misc_feature: MA Experiment 20000113 PARAMETER Experiment Name: At_42deg_Heat_cDNA_P Parameter: Timepoint (hr) Value: 8
  misc_feature: MA Experiment 20000113 PARAMETER Experiment Name: At_42deg_Heat_cDNA_P Parameter: Tissue Value: Aerial
  misc_feature: MA Experiment ID: 20000180 Result: Up-regulated in Transcription
  misc_feature: MA Experiment 20000180 PARAMETER Experiment Name: At_Germinating_Seeds_P Parameter: Age (hr) Value: 24 vs. 0
  misc_feature: MA Experiment 20000180 PARAMETER Experiment Name: At_Germinating_Seeds_P Parameter: Tissue Value: Germinating Seeds
  misc_feature: MA Experiment ID: 20000185 Result: Down-regulated in Transcription
  misc_feature: MA Experiment 20000185 PARAMETER Experiment Name: At_Roots__P Parameter: Age (day) Value: 7 vs. 21
  misc_feature: MA Experiment 20000185 PARAMETER Experiment Name: At_Roots__P Parameter: Organism Value: A. thaliana
  misc_feature: MA Experiment 20000185 PARAMETER Experiment Name: At_Roots__P Parameter: Tissue Value: Roots vs. Whole Plant
  misc_feature: MA Experiment ID: 20000211 Result: Up-regulated in Transcription
  misc_feature: MA Experiment 20000211 PARAMETER Experiment Name: At_0.001percent_MeJA__P Parameter: Age (day) Value: 14
  misc_feature: MA Experiment 20000211 PARAMETER Experiment Name: At_0.001percent_MeJA__P Parameter: Organism Value: A. thaliana
  misc_feature: MA Experiment 20000211 PARAMETER Experiment Name: At_0.001percent_MeJA__P Parameter: Plant Line Value: WS
  misc_feature: MA Experiment 20000211 PARAMETER Experiment Name: At_0.001percent_MeJA__P Parameter: Timepoint (hr) Value: 1
  misc_feature: MA Experiment 20000211 PARAMETER Experiment Name: At_0.001percent_MeJA__P Parameter: Tissue Value: Aerial
  misc_feature: MA Experiment 20000211 PARAMETER Experiment Name: At_0.001percent_MeJA__P Parameter: Treatment Value: 0.001percent MeJA vs. No Treatment
  misc_feature: MA Experiment ID: 20000224 Result: Up-regulated in Transcription
  misc_feature: MA Experiment ID: 20000264 Result: Up-regulated in Transcription
  misc_feature: MA Experiment 20000264 PARAMETER Experiment Name: At_Open_Flower_P Parameter: Age (day) Value: 21
  misc_feature: MA Experiment 20000264 PARAMETER Experiment Name: At_Open_Flower_P Parameter: Plant Line Value: WS
  misc_feature: MA Experiment 20000264 PARAMETER Experiment Name: At_Open_Flower_P Parameter: Tissue Value: Open Flower vs. Whole Plant
  misc_feature: MA Experiment ID: 20000265 Result: Up-regulated in Transcription
  misc_feature: MA Experiment 20000265 PARAMETER Experiment Name: At_Open_Flower_P Parameter: Age (day) Value: 21
  misc_feature: MA Experiment 20000265 PARAMETER Experiment Name: At_Open_Flower_P Parameter: Plant Line Value: WS
  misc_feature: MA Experiment 20000265 PARAMETER Experiment Name: At_Open_Flower_P Parameter: Tissue Value: Closed Flower vs. Whole Plant
  misc_feature: MA Experiment ID: 20000286 Result: Up-regulated in Transcription
  misc_feature: MA Experiment 20000286 PARAMETER Experiment Name: At_Open_Flower_P Parameter: Age (day) Value: 21
  misc_feature: MA Experiment 20000286 PARAMETER Experiment Name: At_Open_Flower_P Parameter: Plant Line Value: WS
  misc_feature: MA Experiment 20000286 PARAMETER Experiment Name: At_Open_Flower_P Parameter: Tissue Value: Half Open vs. Whole Plant
  misc_feature: MA Experiment ID: 20000437 Result: Down-regulated in Transcription
  misc_feature: MA Experiment 20000437 PARAMETER Experiment Name: At_Drought_P Parameter: Age (day) Value: 8
  misc_feature: MA Experiment 20000437 PARAMETER Experiment Name: At_Drought_P Parameter: Organism Value: A. thaliana
  misc_feature: MA Experiment 20000437 PARAMETER Experiment Name: At_Drought_P Parameter: Plant Line Value: WS
  misc_feature: MA Experiment 20000437 PARAMETER Experiment Name: At_Drought_P Parameter: Timepoint (hr) Value: 24
  misc_feature: MA Experiment 20000437 PARAMETER Experiment Name: At_Drought_P Parameter: Tissue Value: Whole Plant
  misc_feature: MA Experiment 20000437 PARAMETER Experiment Name: At_Drought_P Parameter: Treatment Value: Drought vs. No Drought
  misc_feature: MA Experiment ID: 20000438 Result: Down-regulated in Transcription
  misc_feature: MA Experiment 20000438 PARAMETER Experiment Name: At_Shoots__P Parameter: Age (day) Value: 14
  misc_feature: MA Experiment 20000438 PARAMETER Experiment Name: At_Shoots__P Parameter: Tissue Value: Shoots vs. Whole Plant
  misc_feature: MA Experiment ID: 20000495 Result: Up-regulated in Transcription
  misc_feature: MA Experiment 20000495 PARAMETER Experiment Name: At_Guard_Cells_P Parameter: Harvest Date Value: 8/2/2002
  misc_feature: MA Experiment 20000495 PARAMETER Experiment Name: At_Guard_Cells_P Parameter: Organism Value: A. thaliana
  misc_feature: MA Experiment 20000495 PARAMETER Experiment Name: At_Guard_Cells_P Parameter: Tissue Value: Guard Cells vs. Leaves
  misc_feature: MA Experiment ID: 20000794 Result: Down-regulated in Transcription
  misc_feature: MA Experiment 20000794 PARAMETER Experiment Name: At_Petals_P Parameter: Age (day) Value: 23-25 days
  misc_feature: MA Experiment 20000794 PARAMETER Experiment Name: At_Petals_P Parameter: Plant Line Value: WS
  misc_feature: MA Experiment 20000794 PARAMETER Experiment Name: At_Petals_P Parameter: Tissue Value: Petals vs. Whole plant
  misc_feature: MA Experiment ID: 20001248 Result: Down-regulated in Transcription
  misc_feature: MA Experiment 20001248 PARAMETER Experiment Name: At_Far-red-induction_P Parameter: Age (day) Value: 7
  misc_feature: MA Experiment 20001248 PARAMETER Experiment Name: At_Far-red-induction_P Parameter: Light Value: Far-red vs. White
  misc_feature: MA Experiment 20001248 PARAMETER Experiment Name: At_Far-red-induction_P Parameter: Organism Value: A. thaliana
  misc_feature: MA Experiment 20001248 PARAMETER Experiment Name: At_Far-red-induction_P Parameter: Plant Line Value: Columbia
  misc_feature: MA Experiment 20001248 PARAMETER Experiment Name: At_Far-red-induction_P Parameter: Timepoint (hr) Value: 4
  misc_feature: MA Experiment 20001248 PARAMETER Experiment Name: At_Far-red-induction_P Parameter: Tissue Value: Whole Plant
  misc_feature: MA Experiment ID: 20001450 Result: Down-regulated in Transcription
  misc_feature: MA Experiment 20001450 PARAMETER Experiment Name: At_Far-red-induction_P Parameter: Age (day) Value: 7
  misc_feature: MA Experiment 20001450 PARAMETER Experiment Name: At_Far-red-induction_P Parameter: Light Value: Far-red vs. White
  misc_feature: MA Experiment 20001450 PARAMETER Experiment Name: At_Far-red-induction_P Parameter: Organism Value: A. thaliana
  misc_feature: MA Experiment 20001450 PARAMETER Experiment Name: At_Far-red-induction_P Parameter: Plant Line Value: Columbia
  misc_feature: MA Experiment 20001450 PARAMETER Experiment Name: At_Far-red-induction_P Parameter: Timepoint (hr) Value: 8
  misc_feature: MA Experiment 20001450 PARAMETER Experiment Name: At_Far-red-induction_P Parameter: Tissue Value: Whole Plant
  misc_feature: MA Experiment ID: 20001451 Result: Down-regulated in Transcription
  misc_feature: MA Experiment 20001451 PARAMETER Experiment Name: At_Far-red-induction_P Parameter: Age (day) Value: 7
  misc_feature: MA Experiment 20001451 PARAMETER Experiment Name: At_Far-red-induction_P Parameter: Light Value: Far-red vs. White
  misc_feature: MA Experiment 20001451 PARAMETER Experiment Name: At_Far-red-induction_P Parameter: Organism Value: A. thaliana
  misc_feature: MA Experiment 20001451 PARAMETER Experiment Name: At_Far-red-induction_P Parameter: Plant Line Value: Columbia
  misc_feature: MA Experiment 20001451 PARAMETER Experiment Name: At_Far-red-induction_P Parameter: Timepoint (hr) Value: 24
  misc_feature: MA Experiment 20001451 PARAMETER Experiment Name: At_Far-red-induction_P Parameter: Tissue Value: Whole Plant
  misc_feature: MA Experiment ID: 20001560 Result: Up-regulated in Transcription
  misc_feature: MA Experiment 20001560 PARAMETER Experiment Name: At_Drought_Soil_Dry_P Parameter: Age (day) Value: 28
  misc_feature: MA Experiment 20001560 PARAMETER Experiment Name: At_Drought_Soil_Dry_P Parameter: Organism Value: A. thaliana
  misc_feature: MA Experiment 20001560 PARAMETER Experiment Name: At_Drought_Soil_Dry_P Parameter: Plant Line Value: WS
  misc_feature: MA Experiment 20001560 PARAMETER Experiment Name: At_Drought_Soil_Dry_P Parameter: Post Timepoint (hr) Value: None
  misc_feature: MA Experiment 20001560 PARAMETER Experiment Name: At_Drought_Soil_Dry_P Parameter: Post-Treatment Value: None
  misc_feature: MA Experiment 20001560 PARAMETER Experiment Name: At_Drought_Soil_Dry_P Parameter: Timepoint (day) Value: 14
  misc_feature: MA Experiment 20001560 PARAMETER Experiment Name: At_Drought_Soil_Dry_P Parameter: Treatment Value: Drought vs. No Drought
  misc_feature: MA Experiment ID: 20001911 Result: Down-regulated in Transcription
  misc_feature: MA Experiment 20001911 PARAMETER Experiment Name: At_Drought_Reproduction_P Parameter: Age (day) Value: 40
  misc_feature: MA Experiment 20001911 PARAMETER Experiment Name: At_Drought_Reproduction_P Parameter: Organism Value: A. thaliana
  misc_feature: MA Experiment 20001911 PARAMETER Experiment Name: At_Drought_Reproduction_P Parameter: Plant Line Value: WS
  misc_feature: MA Experiment 20001911 PARAMETER Experiment Name: At_Drought_Reproduction_P Parameter: Timepoint (day) Value: 10
  misc_feature: MA Experiment 20001911 PARAMETER Experiment Name: At_Drought_Reproduction_P Parameter: Tissue Value: Flowers
  misc_feature: MA Experiment 20001911 PARAMETER Experiment Name: At_Drought_Reproduction_P Parameter: Treatment Value: Drought vs. No Drought

SEQ ID NO: 34602 - protein, 325 aa, Arabidopsis thaliana; identical to SEQ ID NO: 31012
  peptide (1)..(325): Ceres Seq. ID no. 13497674
  misc_feature (282)..(304): Pfam Name: Leucine Rich Repeat Pfam Description: Leucine Rich Repeat
  misc_feature (7)..(325): Homolog of NCBI NO: 34068091 NR Description: polygalacturonase inhibiting protein [Prunus
  misc_feature (1)..(325): Homolog of NCBI NO: 21667647 NR Description: polygalacturonase-inhibiting protein [Vitis
  misc_feature (8)..(325): Homolog of NCBI NO: 21593869 NR Description: polygalacturonase inhibiting protein 1
  misc_feature (7)..(325): Homolog of NCBI NO: 18148376 NR Description: polygalacturonase-inhibitor protein [Citrus sp.
  misc_feature (7)..(325): Homolog of NCBI NO: 15240182 NR Description: polygalacturonase inhibiting protein (PGIP1)
  misc_feature (7)..(325): Homolog of NCBI NO: 18148925 NR Description: polygalacturonase-inhibitor protein [Citrus sp.
  misc_feature (1)..(202): Homolog of NCBI NO: 12322044 NR Description: unknown protein; 756-145 [Arabidopsis thaliana]
  misc_feature (1)..(325): Homolog of NCBI NO: 7637423 NR Description: leucine-rich repeat protein FLR1 [Arabidopsis
  misc_feature (1)..(325): Homolog of NCBI NO: 16323089 NR Description: At3g12148/T23B7.11 [Arabidopsis thaliana]
  misc_feature (1)..(325): Homolog of NCBI NO: 9294113 NR Description: leucine-rich repeat protein FLR1 [Arabidopsis

SEQ ID NO: 34603 - protein, 164 aa, Arabidopsis thaliana; identical to SEQ ID NO: 31013
  peptide (1)..(164): Ceres Seq. ID no. 13497675
  misc_feature (121)..(143): Pfam Name: Leucine Rich Repeat Pfam Description: Leucine Rich Repeat
  misc_feature (1)..(164): Homolog of NCBI NO: 34068091 NR Description: polygalacturonase inhibiting protein [Prunus
  misc_feature (1)..(164): Homolog of NCBI NO: 21667647 NR Description: polygalacturonase-inhibiting protein [Vitis
  misc_feature (1)..(164): Homolog of NCBI NO: 21593869 NR Description: polygalacturonase inhibiting protein 1
  misc_feature (1)..(164): Homolog of NCBI NO: 18148376 NR Description: polygalacturonase-inhibitor protein [Citrus sp.
  misc_feature (1)..(164): Homolog of NCBI NO: 15240182 NR Description: polygalacturonase inhibiting protein (PGIP1)
  misc_feature (1)..(164): Homolog of NCBI NO: 18148925 NR Description: polygalacturonase-inhibitor protein [Citrus sp.
  misc_feature (1)..(41): Homolog of NCBI NO: 12322044 NR Description: unknown protein; 756-145 [Arabidopsis thaliana]
  misc_feature (1)..(164): Homolog of NCBI NO: 7637423 NR Description: leucine-rich repeat protein FLR1 [Arabidopsis
  misc_feature (1)..(164): Homolog of NCBI NO: 16323089 NR Description: At3g12148/T23B7.11 [Arabidopsis thaliana]
  misc_feature (1)..(164): Homolog of NCBI NO: 9294113 NR Description: leucine-rich repeat protein FLR1 [Arabidopsis

SEQ ID NO: 34604 - DNA, 1336 bp, Arabidopsis thaliana; identical to SEQ ID NO: 31014
  misc_feature (1)..(1336): Ceres Seq. ID no. 12322726
  misc_feature: MA Experiment ID: 108462 Result: Up-regulated in Transcription
  misc_feature: MA Experiment 108462 PARAMETER Experiment Name: At_Germinating_Seeds_cDNA_P Parameter: Age (day) Value: 2 vs. 0
  misc_feature: MA Experiment 108462 PARAMETER Experiment Name: At_Germinating_Seeds_cDNA_P Parameter: Tissue Value: Germinating Seeds
  misc_feature: MA Experiment ID: 108463 Result: Up-regulated in Transcription
  misc_feature: MA Experiment 108463 PARAMETER Experiment Name: At_Germinating_Seeds_cDNA_P Parameter: Age (day) Value: 3 vs. 0
  misc_feature: MA Experiment 108463 PARAMETER Experiment Name: At_Germinating_Seeds_cDNA_P Parameter: Tissue Value: Germinating Seeds
  misc_feature: MA Experiment ID: 108464 Result: Up-regulated in Transcription
  misc_feature: MA Experiment 108464 PARAMETER Experiment Name: At_Germinating_Seeds_cDNA_P Parameter: Age (day) Value: 4 vs. 0
  misc_feature: MA Experiment 108464 PARAMETER Experiment Name: At_Germinating_Seeds_cDNA_P Parameter: Tissue Value: Germinating Seeds
  misc_feature: MA Experiment ID: 108573 Result: Down-regulated in Transcription
  misc_feature: MA Experiment 108573 PARAMETER Experiment Name: At_Drought_cDNA_P Parameter: Timepoint (hr) Value: 6
  misc_feature: MA Experiment 108573 PARAMETER Experiment Name: At_Drought_cDNA_P Parameter: Tissue Value: Aerial
  misc_feature: MA Experiment 108573 PARAMETER Experiment Name: At_Drought_cDNA_P Parameter: Treatment Value: Drought vs. No Drought
  misc_feature: MA Experiment ID: 108577 Result: Down-regulated in Transcription
  misc_feature: MA Experiment 108577 PARAMETER Experiment Name: At_42deg_Heat_cDNA_P Parameter: Temperature (deg C) Value: 42 vs. 22
  misc_feature: MA Experiment 108577 PARAMETER Experiment Name: At_42deg_Heat_cDNA_P Parameter: Timepoint (hr) Value: 6
  misc_feature: MA Experiment 108577 PARAMETER Experiment Name: At_42deg_Heat_cDNA_P Parameter: Tissue Value: Aerial
  misc_feature: MA Experiment ID: 20000111 Result: Down-regulated in Transcription
  misc_feature: MA Experiment 20000111 PARAMETER Experiment Name: At_42deg_Heat_cDNA_P Parameter: Temperature (deg C) Value: 42 vs. 22
  misc_feature: MA Experiment 20000111 PARAMETER Experiment Name: At_42deg_Heat_cDNA_P Parameter: Timepoint (hr) Value: 6
  misc_feature: MA Experiment 20000111 PARAMETER Experiment Name: At_42deg_Heat_cDNA_P Parameter: Tissue Value: Aerial
  misc_feature: MA Experiment ID: 20000113 Result: Down-regulated in Transcription
  misc_feature: MA Experiment 20000113 PARAMETER Experiment Name: At_42deg_Heat_cDNA_P Parameter: Temperature (deg C) Value: 42 vs. 22
  misc_feature: MA Experiment 20000113 PARAMETER Experiment Name: At_42deg_Heat_cDNA_P Parameter: Timepoint (hr) Value: 8
  misc_feature: MA Experiment 20000113 PARAMETER Experiment Name: At_42deg_Heat_cDNA_P Parameter: Tissue Value: Aerial
  misc_feature: MA Experiment ID: 20000180 Result: Up-regulated in Transcription
  misc_feature: MA Experiment 20000180 PARAMETER Experiment Name: At_Germinating_Seeds_P Parameter: Age (hr) Value: 24 vs. 0
  misc_feature: MA Experiment 20000180 PARAMETER Experiment Name: At_Germinating_Seeds_P Parameter: Tissue Value: Germinating Seeds
  misc_feature: MA Experiment ID: 20000185 Result: Down-regulated in Transcription
  misc_feature: MA Experiment 20000185 PARAMETER Experiment Name: At_Roots__P Parameter: Age (day) Value: 7 vs. 21
  misc_feature: MA Experiment 20000185 PARAMETER Experiment Name: At_Roots__P Parameter: Organism Value: A. thaliana
  misc_feature: MA Experiment 20000185 PARAMETER Experiment Name: At_Roots__P Parameter: Tissue Value: Roots vs. Whole Plant
  misc_feature: MA Experiment ID: 20000224 Result: Up-regulated in Transcription
  misc_feature: MA Experiment ID: 20000438 Result: Down-regulated in Transcription
  misc_feature: MA Experiment 20000438 PARAMETER Experiment Name: At_Shoots__P Parameter: Age (day) Value: 14
  misc_feature: MA Experiment 20000438 PARAMETER Experiment Name: At_Shoots__P Parameter: Tissue Value: Shoots vs. Whole Plant
  misc_feature: MA Experiment ID: 20000439 Result: Down-regulated in Transcription
  misc_feature: MA Experiment 20000439 PARAMETER Experiment Name: At_Roots__P Parameter: Age (day) Value: 14 vs. 21
  misc_feature: MA Experiment 20000439 PARAMETER Experiment Name: At_Roots__P Parameter: Organism Value: A. thaliana
  misc_feature: MA Experiment 20000439 PARAMETER Experiment Name: At_Roots__P Parameter: Tissue Value: Roots vs. Whole Plant
  misc_feature: MA Experiment ID: 20000496 Result: Up-regulated in Transcription
  misc_feature: MA Experiment 20000496 PARAMETER Experiment Name: At_Guard_Cells_P Parameter: Harvest Date Value: 7/19/2002
  misc_feature: MA Experiment 20000496 PARAMETER Experiment Name: At_Guard_Cells_P Parameter: Organism Value: Canola
  misc_feature: MA Experiment 20000496 PARAMETER Experiment Name: At_Guard_Cells_P Parameter: Tissue Value: Guard Cells vs. Leaves
  misc_feature: MA Experiment ID: 20001905 Result: Down-regulated in Transcription
  misc_feature: MA Experiment 20001905 PARAMETER Experiment Name: At_Drought_Reproduction_P Parameter: Age (day) Value: 40
  misc_feature: MA Experiment 20001905 PARAMETER Experiment Name: At_Drought_Reproduction_P Parameter: Organism Value: A. thaliana
  misc_feature: MA Experiment 20001905 PARAMETER Experiment Name: At_Drought_Reproduction_P Parameter: Plant Line Value: WS
  misc_feature: MA Experiment 20001905 PARAMETER Experiment Name: At_Drought_Reproduction_P Parameter: Timepoint (day) Value: 10
  misc_feature: MA Experiment 20001905 PARAMETER Experiment Name: At_Drought_Reproduction_P Parameter: Tissue Value: Rosettes
  misc_feature: MA Experiment 20001905 PARAMETER Experiment Name: At_Drought_Reproduction_P Parameter: Treatment Value: Drought vs. No Drought

SEQ ID NO: 34605 - protein, 339 aa, Arabidopsis thaliana; identical to SEQ ID NO: 31015
  peptide (1)..(339): Ceres Seq. ID no. 12322727
  misc_feature (299)..(338): Pfam Name: CCT motif Pfam Description: CCT motif
  misc_feature (106)..(336): Homolog of NCBI NO: 18409053 NR Description: CONSTANS B-box zinc finger family protein
  misc_feature (280)..(337): Homolog of NCBI NO: 18390719 NR Description: expressed protein
  misc_feature (226)..(339): Homolog of NCBI NO: 18416659 NR Description: putative protein
  misc_feature (199)..(336): Homolog of NCBI NO: 30689221 NR Description: CONSTANS B-box zinc finger family protein
  misc_feature (199)..(336): Homolog of NCBI NO: 25403018 NR Description: probable zinc finger protein [imported] -
  misc_feature (199)..(336): Homolog of NCBI NO: 20260550 NR Description: unknown protein [Arabidopsis thaliana]
  misc_feature (226)..(336): Homolog of NCBI NO: 13702811 NR Description: putative zinc finger protein [Oryza sativa]
  misc_feature (35)..(339): Homolog of NCBI NO: 21554072 NR Description: unknown [Arabidopsis thaliana]
  misc_feature (1)..(339): Homolog of NCBI NO: 18417359 NR Description: putative protein
  misc_feature (35)..(332): Homolog of NCBI NO: 11357545 NR Description: hypothetical protein F18O22.160 - Arabidopsis

SEQ ID NO: 34606 - protein, 305 aa, Arabidopsis thaliana; identical to SEQ ID NO: 31016
  peptide (1)..(305): Ceres Seq. ID no. 12322728
  misc_feature (265)..(304): Pfam Name: CCT motif Pfam Description: CCT motif
  misc_feature (72)..(302): Homolog of NCBI NO: 18409053 NR Description: CONSTANS B-box zinc finger family protein
  misc_feature (246)..(303): Homolog of NCBI NO: 18390719 NR Description: expressed protein
  misc_feature (192)..(305): Homolog of NCBI NO: 18416659 NR Description: putative protein
  misc_feature (165)..(302): Homolog of NCBI NO: 30689221 NR Description: CONSTANS B-box zinc finger family protein
  misc_feature (165)..(302): Homolog of NCBI NO: 25403018 NR Description: probable zinc finger protein [imported] -
  misc_feature (165)..(302): Homolog of NCBI NO: 20260550 NR Description: unknown protein [Arabidopsis thaliana]
  misc_feature (192)..(302): Homolog of NCBI NO: 13702811 NR Description: putative zinc finger protein [Oryza sativa]
  misc_feature (1)..(305): Homolog of NCBI NO: 21554072 NR Description: unknown [Arabidopsis thaliana]
  misc_feature (1)..(305): Homolog of NCBI NO: 18417359 NR Description: putative protein
  misc_feature (1)..(298): Homolog of NCBI NO: 11357545 NR Description: hypothetical protein F18O22.160 - Arabidopsis

SEQ ID NO: 34607 - protein, 172 aa, Arabidopsis thaliana; identical to SEQ ID NO: 31017
  peptide (1)..(172): Ceres Seq. ID no. 12322729

SEQ ID NO: 34608 - DNA, 789 bp, Arabidopsis thaliana; identical to SEQ ID NO: 31018
  misc_feature (1)..(789): Ceres Seq. ID no. 12397073
  misc_feature: MA Experiment ID: 108434 Result: Down-regulated in Transcription
  misc_feature: MA Experiment 108434 PARAMETER Experiment Name: At_Root_Tips_cDNA_P Parameter: Tissue Value: Root Tips
  misc_feature: MA Experiment ID: 108462 Result: Up-regulated in Transcription
  misc_feature: MA Experiment 108462 PARAMETER Experiment Name: At_Germinating_Seeds_cDNA_P Parameter: Age (day) Value: 2 vs. 0
  misc_feature: MA Experiment 108462 PARAMETER Experiment Name: At_Germinating_Seeds_cDNA_P Parameter: Tissue Value: Germinating Seeds
  misc_feature: MA Experiment ID: 108463 Result: Up-regulated in Transcription
  misc_feature: MA Experiment 108463 PARAMETER Experiment Name: At_Germinating_Seeds_cDNA_P Parameter: Age (day) Value: 3 vs. 0
  misc_feature: MA Experiment 108463 PARAMETER Experiment Name: At_Germinating_Seeds_cDNA_P Parameter: Tissue Value: Germinating Seeds
  misc_feature: MA Experiment ID: 108605 Result: Down-regulated in Transcription
  misc_feature: MA Experiment 108605 PARAMETER Experiment Name: At_100uM_ABA_cDNA_P Parameter: Timepoint (hr) Value: 6
  misc_feature: MA Experiment 108605 PARAMETER Experiment Name: At_100uM_ABA_cDNA_P Parameter: Tissue Value: Aerial
  misc_feature: MA Experiment 108605 PARAMETER Experiment Name: At_100uM_ABA_cDNA_P Parameter: Treatment Value: 100uM ABA vs. No Treatment
  misc_feature: MA Experiment ID: 20000180 Result: Up-regulated in Transcription
  misc_feature: MA Experiment 20000180 PARAMETER Experiment Name: At_Germinating_Seeds_P Parameter: Age (hr) Value: 24 vs. 0
  misc_feature: MA Experiment 20000180 PARAMETER Experiment Name: At_Germinating_Seeds_P Parameter: Tissue Value: Germinating Seeds
  misc_feature: MA Experiment ID: 20000227 Result: Down-regulated in Transcription
  misc_feature: MA Experiment 20000227 PARAMETER Experiment Name: At_Root-Tips-vs-Tops_P Parameter: Tissue Value: Root Tips vs. Root Tops
  misc_feature: MA Experiment ID: 20000794 Result: Up-regulated in Transcription
  misc_feature: MA Experiment 20000794 PARAMETER Experiment Name: At_Petals_P Parameter: Age (day) Value: 23-25 days
  misc_feature: MA Experiment 20000794 PARAMETER Experiment Name: At_Petals_P Parameter: Plant Line Value: WS
  misc_feature: MA Experiment 20000794 PARAMETER Experiment Name: At_Petals_P Parameter: Tissue Value: Petals vs. Whole plant
  misc_feature: MA Experiment ID: 20001247 Result: Down-regulated in Transcription
  misc_feature: MA Experiment 20001247 PARAMETER Experiment Name: At_Far-red-induction_P Parameter: Age (day) Value: 7
  misc_feature: MA Experiment 20001247 PARAMETER Experiment Name: At_Far-red-induction_P Parameter: Light Value: Far-red vs. White
  misc_feature: MA Experiment 20001247 PARAMETER Experiment Name: At_Far-red-induction_P Parameter: Organism Value: A. thaliana
  misc_feature: MA Experiment 20001247 PARAMETER Experiment Name: At_Far-red-induction_P Parameter: Plant Line Value: Columbia
  misc_feature: MA Experiment 20001247 PARAMETER Experiment Name: At_Far-red-induction_P Parameter: Timepoint (hr) Value: 1
  misc_feature: MA Experiment 20001247 PARAMETER Experiment Name: At_Far-red-induction_P Parameter: Tissue Value: Whole Plant
  misc_feature: MA Experiment ID: 20001459 Result: Up-regulated in Transcription
  misc_feature: MA Experiment 20001459 PARAMETER Experiment Name: At_50mM_NH4NO3_L-to-H_P Parameter: Age (day) Value: Undefined
  misc_feature: MA Experiment 20001459 PARAMETER Experiment Name: At_50mM_NH4NO3_L-to-H_P Parameter: Organism Value: Undefined
  misc_feature: MA Experiment 20001459 PARAMETER Experiment Name: At_50mM_NH4NO3_L-to-H_P Parameter: Plant Line Value: Undefined
  misc_feature: MA Experiment 20001459 PARAMETER Experiment Name: At_50mM_NH4NO3_L-to-H_P Parameter: Timepoint (hr) Value: 4
  misc_feature: MA Experiment 20001459 PARAMETER Experiment Name: At_50mM_NH4NO3_L-to-H_P Parameter: Tissue Value: Siliques
  misc_feature: MA Experiment 20001459 PARAMETER Experiment Name: At_50mM_NH4NO3_L-to-H_P Parameter: Treatment Value: 50mM NH4NO3 vs. 100mM Manitol
  misc_feature: MA Experiment ID: 20001911 Result: Up-regulated in Transcription
  misc_feature: MA Experiment 20001911 PARAMETER Experiment Name: At_Drought_Reproduction_P Parameter: Age (day) Value: 40
  misc_feature: MA Experiment 20001911 PARAMETER Experiment Name: At_Drought_Reproduction_P Parameter: Organism Value: A. thaliana
  misc_feature: MA Experiment 20001911 PARAMETER Experiment Name: At_Drought_Reproduction_P Parameter: Plant Line Value: WS
  misc_feature: MA Experiment 20001911 PARAMETER Experiment Name: At_Drought_Reproduction_P Parameter: Timepoint (day) Value: 10
  misc_feature: MA Experiment 20001911 PARAMETER Experiment Name: At_Drought_Reproduction_P Parameter: Tissue Value: Flowers
  misc_feature: MA Experiment 20001911 PARAMETER Experiment Name: At_Drought_Reproduction_P Parameter: Treatment Value: Drought vs. No Drought

SEQ ID NO: 34609 - protein, 70 aa, Arabidopsis thaliana; identical to SEQ ID NO: 31019
  peptide (1)..(70): Ceres Seq. ID no. 12397074
  misc_feature (1)..(63): Homolog of NCBI NO: 462322 NR Description: 18.3 KD CLASS I HEAT SHOCK PROTEIN (HSP 18.3)
  misc_feature (1)..(67): Homolog of NCBI NO: 123548 NR Description: 17.8 KD CLASS I HEAT SHOCK PROTEIN (CLONE
  misc_feature (1)..(64): Homolog of NCBI NO: 4185754 NR Description: cytosolic I small heat shock protein HSP17.2IB
  misc_feature (1)..(67): Homolog of NCBI NO: 18073561 NR Description: 20.5 kDa heat-shock protein [Helianthus annuus]
  misc_feature (1)..(67): Homolog of NCBI NO: 11276924 NR Description: heat-shock protein, low molecular weight
  misc_feature (1)..(67): Homolog of NCBI NO: 71495 NR Description: heat shock protein (clone DChsp17.7) - carrot
  misc_feature (1)..(67): Homolog of NCBI NO: 15220832 NR Description: 17.6 kDa heat shock protein (AA 1-156); protein
  misc_feature (1)..(67): Homolog of NCBI NO: 7441323 NR Description: heat shock protein 18p - common tobacco
  misc_feature (1)..(63): Homolog of NCBI NO: 16930753 NR Description: small heat shock protein [Retama raetam]
  misc_feature (1)..(70): Homolog of NCBI NO: 18423654 NR Description: expressed protein

SEQ ID NO: 34610 - protein, 49 aa, Arabidopsis thaliana; identical to SEQ ID NO: 31020
  peptide (1)..(49): Ceres Seq. ID no. 12397075
  misc_feature (16)..(49): Homolog of NCBI NO: 18423654 NR Description: expressed protein

SEQ ID NO: 34611 - DNA, 670 bp, Arabidopsis thaliana; identical to SEQ ID NO: 31021
  misc_feature (1)..(670): Ceres Seq. ID no. 12601447
  misc_feature: MA Experiment ID: 108434 Result: Up-regulated in Transcription
  misc_feature: MA Experiment 108434 PARAMETER Experiment Name: At_Root_Tips_cDNA_P Parameter: Tissue Value: Root Tips
  misc_feature: MA Experiment ID: 108461 Result: Up-regulated in Transcription
  misc_feature: MA Experiment 108461 PARAMETER Experiment Name: At_Germinating_Seeds_cDNA_P Parameter: Age (day) Value: 1 vs. 0
  misc_feature: MA Experiment 108461 PARAMETER Experiment Name: At_Germinating_Seeds_cDNA_P Parameter: Tissue Value: Germinating Seeds
  misc_feature: MA Experiment ID: 108595 Result: Up-regulated in Transcription
  misc_feature: MA Experiment 108595 PARAMETER Experiment Name: At_Ler-pi_Ovule_cDNA_P Parameter: Plant Line Value: null
  misc_feature: MA Experiment ID: 108607 Result: Down-regulated in Transcription
  misc_feature: MA Experiment 108607 PARAMETER Experiment Name: At_100uM_ABA_cDNA_P Parameter: Timepoint (hr) Value: 4
  misc_feature: MA Experiment 108607 PARAMETER Experiment Name: At_100uM_ABA_cDNA_P Parameter: Tissue Value: Aerial
  misc_feature: MA Experiment 108607 PARAMETER Experiment Name: At_100uM_ABA_cDNA_P Parameter: Treatment Value: 100uM ABA vs. No Treatment
  misc_feature: MA Experiment ID: 108668 Result: Down-regulated in Transcription
  misc_feature: MA Experiment 108668 PARAMETER Experiment Name: At_2mM_SA_cDNA_P Parameter: Plant Line Value: WS
  misc_feature: MA Experiment 108668 PARAMETER Experiment Name: At_2mM_SA_cDNA_P Parameter: Timepoint (hr) Value: 6
  misc_feature: MA Experiment 108668 PARAMETER Experiment Name: At_2mM_SA_cDNA_P Parameter: Treatment Value: 2mM SA vs. No Treatment

SEQ ID NO: 34612 - protein, 223 aa, Arabidopsis thaliana; identical to SEQ ID NO: 31022
  peptide (1)..(223): Ceres Seq. ID no. 12601448
  misc_feature (42)..(217): Pfam Name: Formin Homology 2 Domain Pfam Description: Formin Homology 2 Domain
  misc_feature (42)..(217): Pfam Name: Formin Homology 2 Domain Pfam Description: Formin Homology 2 Domain
  misc_feature (41)..(213): Homolog of NCBI NO: 480109 NR Description: EPPT protein - hydromedusa (Podocoryne carnea)
  misc_feature (41)..(213): Homolog of NCBI NO: 480109 NR Description: EPPT protein - hydromedusa (Podocoryne carnea)
  misc_feature (41)..(213): Homolog of NCBI NO: 480109 NR Description: EPPT protein - hydromedusa (Podocoryne carnea)
  misc_feature (41)..(213): Homolog of NCBI NO: 480109 NR Description: EPPT protein - hydromedusa (Podocoryne carnea)
  misc_feature (41)..(213): Homolog of NCBI NO: 480109 NR Description: EPPT protein - hydromedusa (Podocoryne carnea)
  misc_feature (41)..(213): Homolog of NCBI NO: 480109 NR Description: EPPT protein - hydromedusa (Podocoryne carnea)
  misc_feature (41)..(213): Homolog of NCBI NO: 480109 NR Description: EPPT protein - hydromedusa (Podocoryne carnea)
  misc_feature (41)..(213): Homolog of NCBI NO: 480109 NR Description: EPPT protein - hydromedusa (Podocoryne carnea)
  misc_feature (11)..(213): Homolog of NCBI NO: 15217879 NR Description: prolin-rich protein, putative; protein id:
  misc_feature (28)..(222): Homolog of NCBI NO: 15217879 NR Description: prolin-rich protein, putative; protein id:
  misc_feature (41)..(213): Homolog of NCBI NO: 480109 NR Description: EPPT protein - hydromedusa (Podocoryne carnea)
  misc_feature (41)..(213): Homolog of NCBI NO: 480109 NR Description: EPPT protein - hydromedusa (Podocoryne carnea)
  misc_feature (41)..(213): Homolog of NCBI NO: 480109 NR Description: EPPT protein - hydromedusa (Podocoryne carnea)
  misc_feature (41)..(213): Homolog of NCBI NO: 480109 NR Description: EPPT protein - hydromedusa (Podocoryne carnea)
  misc_feature (41)..(213): Homolog of NCBI NO: 480109 NR Description: EPPT protein - hydromedusa (Podocoryne carnea)
  misc_feature (41)..(213): Homolog of NCBI NO: 480109 NR Description: EPPT protein - hydromedusa (Podocoryne carnea)
  misc_feature (41)..(213): Homolog of NCBI NO: 480109 NR Description: EPPT protein - hydromedusa (Podocoryne carnea)
  misc_feature (41)..(213): Homolog of NCBI NO: 480109 NR Description: EPPT protein - hydromedusa (Podocoryne carnea)
  misc_feature (28)..(222): Homolog of NCBI NO: 15217879 NR Description: prolin-rich protein, putative; protein id:
  misc_feature (11)..(213): Homolog of NCBI NO: 15217879 NR Description: prolin-rich protein, putative; protein id:

SEQ ID NO: 34613 - protein, 213 aa, Arabidopsis thaliana; identical to SEQ ID NO: 31023
  peptide (1)..(213): Ceres Seq. ID no. 12601449
  misc_feature (32)..(207): Pfam Name: Formin Homology 2 Domain Pfam Description: Formin Homology 2 Domain
  misc_feature (32)..(207): Pfam Name: Formin Homology 2 Domain Pfam Description: Formin Homology 2 Domain
  misc_feature (31)..(203): Homolog of NCBI NO: 480109 NR Description: EPPT protein - hydromedusa (Podocoryne carnea)
  misc_feature (31)..(203): Homolog of NCBI NO: 480109 NR Description: EPPT protein - hydromedusa (Podocoryne carnea)
  misc_feature (31)..(203): Homolog of NCBI NO: 480109 NR Description: EPPT protein - hydromedusa (Podocoryne carnea)
  misc_feature (31)..(203): Homolog of NCBI NO: 480109 NR Description: EPPT protein - hydromedusa (Podocoryne carnea)
  misc_feature (31)..(203): Homolog of NCBI NO: 480109 NR Description: EPPT protein - hydromedusa (Podocoryne carnea)
  misc_feature (31)..(203): Homolog of NCBI NO: 480109 NR Description: EPPT protein - hydromedusa (Podocoryne carnea)
  misc_feature (31)..(203): Homolog of NCBI NO: 480109 NR Description: EPPT protein - hydromedusa (Podocoryne carnea)
  misc_feature (31)..(203): Homolog of NCBI NO: 480109 NR Description: EPPT protein - hydromedusa (Podocoryne carnea)
  misc_feature (1)..(203): Homolog of NCBI NO: 15217879 NR Description: prolin-rich protein, putative; protein id:
  misc_feature (18)..(212): Homolog of NCBI NO: 15217879 NR Description: prolin-rich protein, putative; protein id:
  misc_feature (31)..(203): Homolog of NCBI NO: 480109 NR Description: EPPT protein - hydromedusa (Podocoryne carnea)
  misc_feature (31)..(203): Homolog of NCBI NO: 480109 NR Description: EPPT protein - hydromedusa (Podocoryne carnea)
  misc_feature (31)..(203): Homolog of NCBI NO: 480109 NR Description: EPPT protein - hydromedusa (Podocoryne carnea)
  misc_feature (31)..(203): Homolog of NCBI NO: 480109 NR Description: EPPT protein - hydromedusa (Podocoryne carnea)
  misc_feature (31)..(203): Homolog of NCBI NO: 480109 NR Description: EPPT protein - hydromedusa (Podocoryne carnea)
  misc_feature (31)..(203): Homolog of NCBI NO: 480109 NR Description: EPPT protein - hydromedusa (Podocoryne carnea)
  misc_feature (31)..(203): Homolog of NCBI NO: 480109 NR Description: EPPT protein - hydromedusa (Podocoryne carnea)
  misc_feature (31)..(203): Homolog of NCBI NO: 480109 NR Description: EPPT protein - hydromedusa (Podocoryne carnea)
  misc_feature (18)..(212): Homolog of NCBI NO: 15217879 NR Description: prolin-rich protein, putative; protein id:
  misc_feature (1)..(203): Homolog of NCBI NO: 15217879 NR Description: prolin-rich protein, putative; protein id:

SEQ ID NO: 34614 - DNA, 2380 bp, Arabidopsis thaliana; identical to SEQ ID NO: 31024
  misc_feature (1)..(2380): Ceres Seq. ID no. 12330997
  misc_feature: MA Experiment ID: 108434 Result: Down-regulated in Transcription
  misc_feature: MA Experiment 108434 PARAMETER Experiment Name: At_Root_Tips_cDNA_P Parameter: Tissue Value: Root Tips
  misc_feature: MA Experiment ID: 108488 Result: Down-regulated in Transcription
  misc_feature: MA Experiment ID: 108561 Result: Up-regulated in Transcription
  misc_feature: MA Experiment 108561 PARAMETER Experiment Name: At_100uM_ABA_cDNA_P Parameter: Timepoint (hr) Value: 6
  misc_feature: MA Experiment 108561 PARAMETER Experiment Name: At_100uM_ABA_cDNA_P Parameter: Tissue Value: Aerial
  misc_feature: MA Experiment 108561 PARAMETER Experiment Name: At_100uM_ABA_cDNA_P Parameter: Treatment Value: 100uM ABA vs. No Treatment
  misc_feature: MA Experiment ID: 108572 Result: Up-regulated in Transcription
  misc_feature: MA Experiment 108572 PARAMETER Experiment Name: At_Drought_cDNA_P Parameter: Timepoint (hr) Value: 1
  misc_feature: MA Experiment 108572 PARAMETER Experiment Name: At_Drought_cDNA_P Parameter: Tissue Value: Aerial
  misc_feature: MA Experiment 108572 PARAMETER Experiment Name: At_Drought_cDNA_P Parameter: Treatment Value: Drought vs. No Drought
  misc_feature: MA Experiment ID: 108573 Result: Up-regulated in Transcription
  misc_feature: MA Experiment 108573 PARAMETER Experiment Name: At_Drought_cDNA_P Parameter: Timepoint (hr) Value: 6
  misc_feature: MA Experiment 108573 PARAMETER Experiment Name: At_Drought_cDNA_P Parameter: Tissue Value: Aerial
  misc_feature: MA Experiment 108573 PARAMETER Experiment Name: At_Drought_cDNA_P Parameter: Treatment Value: Drought vs. No Drought
  misc_feature: MA Experiment ID: 108585 Result: Up-regulated in Transcription
  misc_feature: MA Experiment 108585 PARAMETER Experiment Name: At_5mM_NaNP_cDNA_P Parameter: Timepoint (hr) Value: 6
  misc_feature: MA Experiment 108585 PARAMETER Experiment Name: At_5mM_NaNP_cDNA_P Parameter: Tissue Value: Aerial
  misc_feature: MA Experiment 108585 PARAMETER Experiment Name: At_5mM_NaNP_cDNA_P Parameter: Treatment Value: null
  misc_feature: MA Experiment ID: 20000070 Result: Up-regulated in Transcription
  misc_feature: MA Experiment 20000070 PARAMETER Experiment Name: At_100uM_ABA_Mutants_cDNA_P Parameter: Plant Line Value: CS24
  misc_feature: MA Experiment 20000070 PARAMETER Experiment Name: At_100uM_ABA_Mutants_cDNA_P Parameter: Timepoint (hr) Value: 6
  misc_feature: MA Experiment 20000070 PARAMETER Experiment Name: At_100uM_ABA_Mutants_cDNA_P Parameter: Tissue Value: Aerial
  misc_feature: MA Experiment 20000070 PARAMETER Experiment Name: At_100uM_ABA_Mutants_cDNA_P Parameter: Treatment Value: 100uM ABA vs. No Treatment
  misc_feature: MA Experiment ID: 20000184 Result: Down-regulated in Transcription
  misc_feature: MA Experiment 20000184 PARAMETER Experiment Name: At_Shoots__P Parameter: Age (day) Value: 7
  misc_feature: MA Experiment 20000184 PARAMETER Experiment Name: At_Shoots__P Parameter: Tissue Value: Shoots vs. Whole Plant
  misc_feature: MA Experiment ID: 20000234 Result: Down-regulated in Transcription
  misc_feature: MA Experiment 20000234 PARAMETER Experiment Name: At_Siliques_P Parameter: Age (day) Value: 21
  misc_feature: MA Experiment 20000234 PARAMETER Experiment Name: At_Siliques_P Parameter: Organism Value: A. thaliana
  misc_feature: MA Experiment 20000234 PARAMETER Experiment Name: At_Siliques_P Parameter: Plant Line Value: WS
  misc_feature: MA Experiment 20000234 PARAMETER Experiment Name: At_Siliques_P Parameter: Tissue Value: Less Than 5mm Siliques vs. Whole Plant
  misc_feature: MA Experiment ID: 20000235 Result: Down-regulated in Transcription
  misc_feature: MA Experiment 20000235 PARAMETER Experiment Name: At_Siliques_P Parameter: Age (day) Value: 21
  misc_feature: MA Experiment 20000235 PARAMETER Experiment Name: At_Siliques_P Parameter: Organism Value: A. thaliana
  misc_feature: MA Experiment 20000235 PARAMETER Experiment Name: At_Siliques_P Parameter: Plant Line Value: WS
  misc_feature: MA Experiment 20000235 PARAMETER Experiment Name: At_Siliques_P Parameter: Tissue Value: 5-10mm Siliques vs. Whole Plant
  misc_feature: MA Experiment ID: 20000265 Result: Down-regulated in Transcription
  misc_feature: MA Experiment 20000265 PARAMETER Experiment Name: At_Open_Flower_P Parameter: Age (day) Value: 21
  misc_feature: MA Experiment 20000265 PARAMETER Experiment Name: At_Open_Flower_P Parameter: Plant Line Value: WS
  misc_feature: MA Experiment 20000265 PARAMETER Experiment Name: At_Open_Flower_P Parameter: Tissue Value: Closed Flower vs. Whole Plant
  misc_feature: MA Experiment ID: 20000438 Result: Down-regulated in Transcription
  misc_feature: MA Experiment 20000438 PARAMETER Experiment Name: At_Shoots__P Parameter: Age (day) Value: 14
  misc_feature: MA Experiment 20000438 PARAMETER Experiment Name: At_Shoots__P Parameter: Tissue Value: Shoots vs. Whole Plant
  misc_feature: MA Experiment ID: 20000794 Result: Up-regulated in Transcription
  misc_feature: MA Experiment 20000794 PARAMETER Experiment Name: At_Petals_P Parameter: Age (day) Value: 23-25 days
  misc_feature: MA Experiment 20000794 PARAMETER Experiment Name: At_Petals_P Parameter: Plant Line Value: WS
  misc_feature: MA Experiment 20000794 PARAMETER Experiment Name: At_Petals_P Parameter: Tissue Value: Petals vs. Whole plant
  misc_feature: MA Experiment ID: 20001905 Result: Up-regulated in Transcription
  misc_feature: MA Experiment 20001905 PARAMETER Experiment Name: At_Drought_Reproduction_P Parameter: Age (day) Value: 40
  misc_feature: MA Experiment 20001905 PARAMETER Experiment Name: At_Drought_Reproduction_P Parameter: Organism Value: A. thaliana
  misc_feature: MA Experiment 20001905 PARAMETER Experiment Name: At_Drought_Reproduction_P Parameter: Plant Line Value: WS
  misc_feature: MA Experiment 20001905 PARAMETER Experiment Name: At_Drought_Reproduction_P Parameter: Timepoint (day) Value: 10
  misc_feature: MA Experiment 20001905 PARAMETER Experiment Name: At_Drought_Reproduction_P Parameter: Tissue Value: Rosettes
  misc_feature: MA Experiment 20001905 PARAMETER Experiment Name: At_Drought_Reproduction_P Parameter: Treatment Value: Drought vs. No Drought
  misc_feature: MA Experiment ID: 20001906 Result: Up-regulated in Transcription
  misc_feature: MA Experiment 20001906 PARAMETER Experiment Name: At_Drought_Reproduction_P Parameter: Age (day) Value: 35
  misc_feature: MA Experiment 20001906 PARAMETER Experiment Name: At_Drought_Reproduction_P Parameter: Organism Value: A. thaliana
  misc_feature: MA Experiment 20001906 PARAMETER Experiment Name: At_Drought_Reproduction_P Parameter: Plant Line Value: WS
  misc_feature: MA Experiment 20001906 PARAMETER Experiment Name: At_Drought_Reproduction_P Parameter: Timepoint (day) Value: 5
  misc_feature: MA Experiment 20001906 PARAMETER Experiment Name: At_Drought_Reproduction_P Parameter: Tissue Value: Siliques
  misc_feature: MA Experiment 20001906 PARAMETER Experiment Name: At_Drought_Reproduction_P Parameter: Treatment Value: Drought vs. No Drought
  misc_feature: MA Experiment ID: 20001908 Result: Up-regulated in Transcription
  misc_feature: MA Experiment 20001908 PARAMETER Experiment Name: At_Drought_Reproduction_P Parameter: Age (day) Value: 40
  misc_feature: MA Experiment 20001908 PARAMETER Experiment Name: At_Drought_Reproduction_P Parameter: Organism Value: A. thaliana
  misc_feature: MA Experiment 20001908 PARAMETER Experiment Name: At_Drought_Reproduction_P Parameter: Plant Line Value: WS
  misc_feature: MA Experiment 20001908 PARAMETER Experiment Name: At_Drought_Reproduction_P Parameter: Timepoint (day) Value: 10
  misc_feature: MA Experiment 20001908 PARAMETER Experiment Name: At_Drought_Reproduction_P Parameter: Tissue Value: Siliques
  misc_feature: MA Experiment 20001908 PARAMETER Experiment Name: At_Drought_Reproduction_P Parameter: Treatment Value: Drought vs. No Drought

SEQ ID NO: 34615 - protein, 319 aa, Arabidopsis thaliana; identical to SEQ ID NO: 31025
  peptide (1)..(319): Ceres Seq. ID no. 12330998
  misc_feature (1)..(235): Homolog of NCBI NO: 15222572 NR Description: wall-associated kinase, putative
  misc_feature (1)..(255): Homolog of NCBI NO: 15408726 NR Description: P0443D08.8 [Oryza sativa (japonica
  misc_feature (1)..(235): Homolog of NCBI NO: 34911340 NR Description: P0034C09.1 [Oryza sativa (japonica
  misc_feature (1)..(245): Homolog of NCBI NO: 25402857 NR Description: protein F15H18.11 [imported] - Arabidopsis
  misc_feature (1)..(245): Homolog of NCBI NO: 15221764 NR Description: wall-associated kinase, putative; protein id:
  misc_feature (1)..(259): Homolog of NCBI NO: 15408730 NR Description: P0443D08.12 [Oryza sativa (japonica
  misc_feature (1)..(236): Homolog of NCBI NO: 30698255 NR Description: protein kinase family [Arabidopsis thaliana]
  misc_feature (1)..(236): Homolog of NCBI NO: 26450415 NR Description: unknown protein [Arabidopsis thaliana]
  misc_feature (1)..(236): Homolog of NCBI NO: 9758129 NR Description: contains similarity to protein
  misc_feature (1)..(316): Homolog of NCBI NO: 34902300 NR Description: Putative protein kinase [Oryza sativa (japonica

SEQ ID NO: 34616 - protein, 311 aa, Arabidopsis thaliana; identical to SEQ ID NO: 31026
  peptide (1)..(311): Ceres Seq. ID no. 12330999
  misc_feature (34)..(57): Homolog of NCBI NO: 7486495 NR Description: hypothetical protein F6E21.30 - Arabidopsis
  misc_feature (34)..(57): Homolog of NCBI NO: 30688910 NR Description: WAK-like kinase (WLK) [Arabidopsis thaliana]
  misc_feature (7)..(182): Homolog of NCBI NO: 22329045 NR Description: WAK-like kinase (WLK); protein id: At4g31100.1
  misc_feature (23)..(55): Homolog of NCBI NO: 15219447 NR Description: WAK-like kinase (WLK)
  misc_feature (36)..(55): Homolog of NCBI NO: 15222427 NR Description: WAK-like kinase (WLK); protein id: At1g69730.1
  misc_feature (3)..(250): Homolog of NCBI NO: 18411489 NR Description: Expressed protein
  misc_feature (170)..(263): Homolog of NCBI NO: 30698255 NR Description: protein kinase family [Arabidopsis thaliana]
  misc_feature (39)..(263): Homolog of NCBI NO: 26450415 NR Description: unknown protein [Arabidopsis thaliana]
  misc_feature (39)..(263): Homolog of NCBI NO: 9758129 NR Description: contains similarity to protein
  misc_feature (36)..(311): Homolog of NCBI NO: 34902300 NR Description: Putative protein kinase [Oryza sativa (japonica

SEQ ID NO: 34617 - protein, 307 aa, Arabidopsis thaliana; identical to SEQ ID NO: 31027
  peptide (1)..(307): Ceres Seq. ID no. 12331000
  misc_feature (30)..(53): Homolog of NCBI NO: 7486495 NR Description: hypothetical protein F6E21.30 - Arabidopsis
  misc_feature (30)..(53): Homolog of NCBI NO: 30688910 NR Description: WAK-like kinase (WLK) [Arabidopsis thaliana]
  misc_feature (3)..(178): Homolog of NCBI NO: 22329045 NR Description: WAK-like kinase (WLK); protein id: At4g31100.1
  misc_feature (19)..(51): Homolog of NCBI NO: 15219447 NR Description: WAK-like kinase (WLK)
  misc_feature (32)..(51): Homolog of NCBI NO: 15222427 NR Description: WAK-like kinase (WLK); protein id: At1g69730.1
  misc_feature (1)..(246): Homolog of NCBI NO: 18411489 NR Description: Expressed protein
  misc_feature (166)..(259): Homolog of NCBI NO: 30698255 NR Description: protein kinase family [Arabidopsis thaliana]
  misc_feature (35)..(259): Homolog of NCBI NO: 26450415 NR Description: unknown protein [Arabidopsis thaliana]
  misc_feature (35)..(259): Homolog of NCBI NO: 9758129 NR Description: contains similarity to protein
  misc_feature (32)..(307): Homolog of NCBI NO: 34902300 NR Description: Putative protein kinase [Oryza sativa (japonica

SEQ ID NO: 34618 - DNA, 977 bp, Arabidopsis thaliana; identical to SEQ ID NO: 31028
  misc_feature (1)..(977): Ceres Seq. ID no. 12322651
  misc_feature: MA Experiment ID: 108435 Result: Down-regulated in Transcription
  misc_feature: MA Experiment 108435 PARAMETER Experiment Name: At_stm_Mutants_cDNA_P Parameter: Plant Line Value: wt Landsburg vs stm
  misc_feature: MA Experiment 108435 PARAMETER Experiment Name: At_stm_Mutants_cDNA_P Parameter: Tissue Value: Shoot Apical Meristem Region
  misc_feature: MA Experiment ID: 108462 Result: Up-regulated in Transcription
  misc_feature: MA Experiment 108462 PARAMETER Experiment Name: At_Germinating_Seeds_cDNA_P Parameter: Age (day) Value: 2 vs. 0
  misc_feature: MA Experiment 108462 PARAMETER Experiment Name: At_Germinating_Seeds_cDNA_P Parameter: Tissue Value: Germinating Seeds
  misc_feature: MA Experiment ID: 108464 Result: Up-regulated in Transcription
  misc_feature: MA Experiment 108464 PARAMETER Experiment Name: At_Germinating_Seeds_cDNA_P Parameter: Age (day) Value: 4 vs. 0
  misc_feature: MA Experiment 108464 PARAMETER Experiment Name: At_Germinating_Seeds_cDNA_P Parameter: Tissue Value: Germinating Seeds
  misc_feature: MA Experiment ID: 108595 Result: Down-regulated in Transcription
  misc_feature: MA Experiment 108595 PARAMETER Experiment Name: At_Ler-pi_Ovule_cDNA_P Parameter: Plant Line Value: null
  misc_feature: MA Experiment ID: 20000070 Result: Down-regulated in Transcription
  misc_feature: MA Experiment 20000070 PARAMETER Experiment Name: At_100uM_ABA_Mutants_cDNA_P Parameter: Plant Line Value: CS24
  misc_feature: MA Experiment 20000070 PARAMETER Experiment Name: At_100uM_ABA_Mutants_cDNA_P Parameter: Timepoint (hr) Value: 6
  misc_feature: MA Experiment 20000070 PARAMETER Experiment Name: At_100uM_ABA_Mutants_cDNA_P Parameter: Tissue Value: Aerial
  misc_feature: MA Experiment 20000070 PARAMETER Experiment Name: At_100uM_ABA_Mutants_cDNA_P Parameter: Treatment Value: 100uM ABA vs. No Treatment
  misc_feature: MA Experiment ID: 20000185 Result: Down-regulated in Transcription
  misc_feature: MA Experiment 20000185 PARAMETER Experiment Name: At_Roots__P Parameter: Age (day) Value: 7 vs. 21
  misc_feature: MA Experiment 20000185 PARAMETER Experiment Name: At_Roots__P Parameter: Organism Value: A. thaliana
  misc_feature: MA Experiment 20000185 PARAMETER Experiment Name: At_Roots__P Parameter: Tissue Value: Roots vs. Whole Plant
  misc_feature: MA Experiment ID: 20000264 Result: Down-regulated in Transcription
  misc_feature: MA Experiment 20000264 PARAMETER Experiment Name: At_Open_Flower_P Parameter: Age (day) Value: 21
  misc_feature: MA Experiment 20000264 PARAMETER Experiment Name: At_Open_Flower_P Parameter: Plant Line Value: WS
  misc_feature: MA Experiment 20000264 PARAMETER Experiment Name: At_Open_Flower_P Parameter: Tissue Value: Open Flower vs. Whole Plant
  misc_feature: MA Experiment ID: 20000437 Result: Down-regulated in Transcription
  misc_feature: MA Experiment 20000437 PARAMETER Experiment Name: At_Drought_P Parameter: Age (day) Value: 8
  misc_feature: MA Experiment 20000437 PARAMETER Experiment Name: At_Drought_P Parameter: Organism Value: A. thaliana
  misc_feature: MA Experiment 20000437 PARAMETER Experiment Name: At_Drought_P Parameter: Plant Line Value: WS
  misc_feature: MA Experiment 20000437 PARAMETER Experiment Name: At_Drought_P Parameter: Timepoint (hr) Value: 24
  misc_feature: MA Experiment 20000437 PARAMETER Experiment Name: At_Drought_P Parameter: Tissue Value: Whole Plant
  misc_feature: MA Experiment 20000437 PARAMETER Experiment Name: At_Drought_P Parameter: Treatment Value: Drought vs. No Drought
  misc_feature: MA Experiment ID: 20000438 Result: Up-regulated in Transcription
  misc_feature: MA Experiment 20000438 PARAMETER Experiment Name: At_Shoots__P Parameter: Age (day) Value: 14
  misc_feature: MA Experiment 20000438 PARAMETER Experiment Name: At_Shoots__P Parameter: Tissue Value: Shoots vs. Whole Plant
  misc_feature: MA Experiment ID: 20000439 Result: Down-regulated in Transcription
  misc_feature: MA Experiment 20000439 PARAMETER Experiment Name: At_Roots__P Parameter: Age (day) Value: 14 vs. 21
  misc_feature: MA Experiment 20000439 PARAMETER Experiment Name: At_Roots__P Parameter: Organism Value: A. thaliana
  misc_feature: MA Experiment 20000439 PARAMETER Experiment Name: At_Roots__P Parameter: Tissue Value: Roots vs. Whole Plant
  misc_feature: MA Experiment ID: 20000794 Result: Down-regulated in Transcription
  misc_feature: MA Experiment 20000794 PARAMETER Experiment Name: At_Petals_P Parameter: Age (day) Value: 23-25 days
  misc_feature: MA Experiment 20000794 PARAMETER Experiment Name: At_Petals_P Parameter: Plant Line Value: WS
  misc_feature: MA Experiment 20000794 PARAMETER Experiment Name: At_Petals_P Parameter: Tissue Value: Petals vs. Whole plant
  misc_feature: MA Experiment ID: 20001757 Result: Up-regulated in Transcription
  misc_feature: MA Experiment 20001757 PARAMETER Experiment Name: At_50mM_NH4NO3_L-to-H_P Parameter: Timepoint (hr) Value: 6
  misc_feature: MA Experiment 20001757 PARAMETER Experiment Name: At_50mM_NH4NO3_L-to-H_P Parameter: Tissue Value: Leaf
  misc_feature: MA Experiment 20001757 PARAMETER Experiment Name: At_50mM_NH4NO3_L-to-H_P Parameter: Treatment Value: 50mM NH4NO3 vs 100mM Mannitol
  misc_feature: MA Experiment ID: 20001905 Result: Down-regulated in Transcription
  misc_feature: MA Experiment 20001905 PARAMETER Experiment Name: At_Drought_Reproduction_P Parameter: Age (day) Value: 40
  misc_feature: MA Experiment 20001905 PARAMETER Experiment Name: At_Drought_Reproduction_P Parameter: Organism Value: A. thaliana
  misc_feature: MA Experiment 20001905 PARAMETER Experiment Name: At_Drought_Reproduction_P Parameter: Plant Line Value: WS
  misc_feature: MA Experiment 20001905 PARAMETER Experiment Name: At_Drought_Reproduction_P Parameter: Timepoint (day) Value: 10
  misc_feature: MA Experiment 20001905 PARAMETER Experiment Name: At_Drought_Reproduction_P Parameter: Tissue Value: Rosettes
  misc_feature: MA Experiment 20001905 PARAMETER Experiment Name: At_Drought_Reproduction_P Parameter: Treatment Value: Drought vs. No Drought

SEQ ID NO: 34619 - protein, 231 aa, Arabidopsis thaliana; identical to SEQ ID NO: 31029
  peptide (1)..(231): Ceres Seq. ID no. 12322652
  misc_feature (1)..(230): Homolog of NCBI NO: 30697554 NR Description: auxin-regulated protein [Arabidopsis thaliana]
  misc_feature (1)..(231): Homolog of NCBI NO: 30697556 NR Description: auxin-regulated protein [Arabidopsis thaliana]
  misc_feature (135)..(230): Homolog of NCBI NO: 11072026 NR Description: F12A21.16 [Arabidopsis thaliana]
  misc_feature (17)..(137): Homolog of NCBI NO: 11072026 NR Description: F12A21.16 [Arabidopsis thaliana]

SEQ ID NO: 34620 - protein, 227 aa, Arabidopsis thaliana; identical to SEQ ID NO: 31030
  peptide (1)..(227): Ceres Seq. ID no. 12322653
  misc_feature (1)..(226): Homolog of NCBI NO: 30697554 NR Description: auxin-regulated protein [Arabidopsis thaliana]
  misc_feature (1)..(227): Homolog of NCBI NO: 30697556 NR Description: auxin-regulated protein [Arabidopsis thaliana]
  misc_feature (131)..(226): Homolog of NCBI NO: 11072026 NR Description: F12A21.16 [Arabidopsis thaliana]
  misc_feature (13)..(133): Homolog of NCBI NO: 11072026 NR Description: F12A21.16 [Arabidopsis thaliana]

SEQ ID NO: 34621 - protein, 184 aa, Arabidopsis thaliana; identical to SEQ ID NO: 31031
  peptide (1)..(184): Ceres Seq. ID no. 12322654
  misc_feature (1)..(183): Homolog of NCBI NO: 30697554 NR Description: auxin-regulated protein [Arabidopsis thaliana]
  misc_feature (1)..(184): Homolog of NCBI NO: 30697556 NR Description: auxin-regulated protein [Arabidopsis thaliana]
  misc_feature (88)..(183): Homolog of NCBI NO: 11072026 NR Description: F12A21.16 [Arabidopsis thaliana]
  misc_feature (1)..(90): Homolog of NCBI NO: 11072026 NR Description: F12A21.16 [Arabidopsis thaliana]

SEQ ID NO: 34622 - DNA, 621 bp, Arabidopsis thaliana; identical to SEQ ID NO: 31032
  misc_feature (1)..(621): Ceres Seq. ID no. 12559532
  misc_feature: MA Experiment ID: 108434 Result: Up-regulated in Transcription
  misc_feature: MA Experiment 108434 PARAMETER Experiment Name: At_Root_Tips_cDNA_P Parameter: Tissue Value: Root Tips
  misc_feature: MA Experiment ID: 108462 Result: Down-regulated in Transcription
  misc_feature: MA Experiment 108462 PARAMETER Experiment Name: At_Germinating_Seeds_cDNA_P Parameter: Age (day) Value: 2 vs. 0
  misc_feature: MA Experiment 108462 PARAMETER Experiment Name: At_Germinating_Seeds_cDNA_P Parameter: Tissue Value: Germinating Seeds
  misc_feature: MA Experiment ID: 108463 Result: Down-regulated in Transcription
  misc_feature: MA Experiment 108463 PARAMETER Experiment Name: At_Germinating_Seeds_cDNA_P Parameter: Age (day) Value: 3 vs. 0
  misc_feature: MA Experiment 108463 PARAMETER Experiment Name: At_Germinating_Seeds_cDNA_P Parameter: Tissue Value: Germinating Seeds
  misc_feature: MA Experiment ID: 108464 Result: Down-regulated in Transcription
  misc_feature: MA Experiment 108464 PARAMETER Experiment Name: At_Germinating_Seeds_cDNA_P Parameter: Age (day) Value: 4 vs. 0
  misc_feature: MA Experiment 108464 PARAMETER Experiment Name: At_Germinating_Seeds_cDNA_P Parameter: Tissue Value: Germinating Seeds
  misc_feature: MA Experiment ID: 108573 Result: Down-regulated in Transcription
  misc_feature: MA Experiment 108573 PARAMETER Experiment Name: At_Drought_cDNA_P Parameter: Timepoint (hr) Value: 6
  misc_feature: MA Experiment 108573 PARAMETER Experiment Name: At_Drought_cDNA_P Parameter: Tissue Value: Aerial
  misc_feature: MA Experiment 108573 PARAMETER Experiment Name: At_Drought_cDNA_P Parameter: Treatment Value: Drought vs. No Drought
  misc_feature: MA Experiment ID: 20000184 Result: Up-regulated in Transcription
  misc_feature: MA Experiment 20000184 PARAMETER Experiment Name: At_Shoots__P Parameter: Age (day) Value: 7
  misc_feature: MA Experiment 20000184 PARAMETER Experiment Name: At_Shoots__P Parameter: Tissue Value: Shoots vs. Whole Plant
  misc_feature: MA Experiment ID: 20001451 Result: Up-regulated in Transcription
  misc_feature: MA Experiment 20001451 PARAMETER Experiment Name: At_Far-red-induction_P Parameter: Age (day) Value: 7
  misc_feature: MA Experiment 20001451 PARAMETER Experiment Name: At_Far-red-induction_P Parameter: Light Value: Far-red vs. White
  misc_feature: MA Experiment 20001451 PARAMETER Experiment Name: At_Far-red-induction_P Parameter: Organism Value: A. thaliana
  misc_feature: MA Experiment 20001451 PARAMETER Experiment Name: At_Far-red-induction_P Parameter: Plant Line Value: Columbia
  misc_feature: MA Experiment 20001451 PARAMETER Experiment Name: At_Far-red-induction_P Parameter: Timepoint (hr) Value: 24
  misc_feature: MA Experiment 20001451 PARAMETER Experiment Name: At_Far-red-induction_P Parameter: Tissue Value: Whole Plant
  misc_feature: MA Experiment ID: 20001560 Result: Up-regulated in Transcription
  misc_feature: MA Experiment 20001560 PARAMETER Experiment Name: At_Drought_Soil_Dry_P Parameter: Age (day) Value: 28
  misc_feature: MA Experiment 20001560 PARAMETER Experiment Name: At_Drought_Soil_Dry_P Parameter: Organism Value: A. thaliana
  misc_feature: MA Experiment 20001560 PARAMETER Experiment Name: At_Drought_Soil_Dry_P Parameter: Plant Line Value: WS
  misc_feature: MA Experiment 20001560 PARAMETER Experiment Name: At_Drought_Soil_Dry_P Parameter: Post Timepoint (hr) Value: None
  misc_feature: MA Experiment 20001560 PARAMETER Experiment Name: At_Drought_Soil_Dry_P Parameter: Post-Treatment Value: None
  misc_feature: MA Experiment 20001560 PARAMETER Experiment Name: At_Drought_Soil_Dry_P Parameter: Timepoint (day) Value: 14
  misc_feature: MA Experiment 20001560 PARAMETER Experiment Name: At_Drought_Soil_Dry_P Parameter: Treatment Value: Drought vs. No Drought
  misc_feature: MA Experiment ID: 20001757 Result: Up-regulated in Transcription
  misc_feature: MA Experiment 20001757 PARAMETER Experiment Name: At_50mM_NH4NO3_L-to-H_P Parameter: Timepoint (hr) Value: 6
  misc_feature: MA Experiment 20001757 PARAMETER Experiment Name: At_50mM_NH4NO3_L-to-H_P Parameter: Tissue Value: Leaf
  misc_feature: MA Experiment 20001757 PARAMETER Experiment Name: At_50mM_NH4NO3_L-to-H_P Parameter: Treatment Value: 50mM NH4NO3 vs 100mM Mannitol

SEQ ID NO: 34623 - protein, 115 aa, Arabidopsis thaliana; identical to SEQ ID NO: 31033
  peptide (1)..(115): Ceres Seq. ID no. 12559533
  misc_feature (17)..(114): Pfam Name: 60s Acidic ribosomal protein Pfam Description: 60s Acidic ribosomal protein
  misc_feature (17)..(114): Pfam Name: 60s Acidic ribosomal protein Pfam Description: 60s Acidic ribosomal protein
  misc_feature (1)..(115): Homolog of NCBI NO: 3122752 NR Description: 60S ACIDIC RIBOSOMAL PROTEIN P2
  misc_feature (1)..(115): Homolog of NCBI NO: 899610 NR Description: acidic ribosomal protein P2
  misc_feature (1)..(115): Homolog of NCBI NO: 730583 NR Description: 60S acidic ribosomal protein P2
  misc_feature (1)..(115): Homolog of NCBI NO: 1173073 NR Description: 60S ACIDIC RIBOSOMAL PROTEIN P2A (P2)
  misc_feature (1)..(115): Homolog of NCBI NO: 34906408 NR Description: putative 60S acidic ribosomal protein P2A
  misc_feature (1)..(115): Homolog of NCBI NO: 3122752 NR Description: 60S ACIDIC RIBOSOMAL PROTEIN P2
  misc_feature (1)..(115): Homolog of NCBI NO: 730583 NR Description: 60S acidic ribosomal protein P2
  misc_feature (1)..(115): Homolog of NCBI NO: 34906408 NR Description: putative 60S acidic ribosomal protein P2A
  misc_feature (1)..(115): Homolog of NCBI NO: 15226231 NR Description: 60S acidic ribosomal protein P2
  misc_feature (1)..(115): Homolog of NCBI NO: 21593095 NR Description: 60S acidic ribosomal protein P2 [Arabidopsis
  misc_feature (1)..(115): Homolog of NCBI NO: 15226230 NR Description: 60S acidic ribosomal protein P2
  misc_feature (1)..(115): Homolog of NCBI NO: 15230454 NR Description: acidic ribosomal protein P2 -like; protein id:
  misc_feature (1)..(115): Homolog of NCBI NO: 24473796 NR Description: 60s acidic ribosomal protein [Prunus dulcis]
  misc_feature (1)..(115): Homolog of NCBI NO: 1173073 NR Description: 60S ACIDIC RIBOSOMAL PROTEIN P2A (P2)
  misc_feature (1)..(115): Homolog of NCBI NO: 899610 NR Description: acidic ribosomal protein P2
  misc_feature (1)..(115): Homolog of NCBI NO: 24473796 NR Description: 60s acidic ribosomal protein [Prunus dulcis]
  misc_feature (1)..(115): Homolog of NCBI NO: 15230454 NR Description: acidic ribosomal protein P2 -like; protein id:
  misc_feature (1)..(115): Homolog of NCBI NO: 15226230 NR Description: 60S acidic ribosomal protein P2
  misc_feature (1)..(115): Homolog of NCBI NO: 21593095 NR Description: 60S acidic ribosomal protein P2 [Arabidopsis
  misc_feature (1)..(115): Homolog of NCBI NO: 15226231 NR Description: 60S acidic ribosomal protein P2

SEQ ID NO: 34624 - DNA, 1051 bp, Arabidopsis thaliana; identical to SEQ ID NO: 31034
  misc_feature (1)..(1051): Ceres Seq. ID no. 12579915
  misc_feature: MA Experiment ID: 108435 Result: Down-regulated in Transcription
  misc_feature: MA Experiment 108435 PARAMETER Experiment Name: At_stm_Mutants_cDNA_P Parameter: Plant Line Value: wt Landsburg vs stm
  misc_feature: MA Experiment 108435 PARAMETER Experiment Name: At_stm_Mutants_cDNA_P Parameter: Tissue Value: Shoot Apical Meristem Region
  misc_feature: MA Experiment ID: 108462 Result: Down-regulated in Transcription
  misc_feature: MA Experiment 108462 PARAMETER Experiment Name: At_Germinating_Seeds_cDNA_P Parameter: Age (day) Value: 2 vs. 0
  misc_feature: MA Experiment 108462 PARAMETER Experiment Name: At_Germinating_Seeds_cDNA_P Parameter: Tissue Value: Germinating Seeds
  misc_feature: MA Experiment ID: 108488 Result: Up-regulated in Transcription
  misc_feature: MA Experiment ID: 108573 Result: Down-regulated in Transcription
  misc_feature: MA Experiment 108573 PARAMETER Experiment Name: At_Drought_cDNA_P Parameter: Timepoint (hr) Value: 6
  misc_feature: MA Experiment 108573 PARAMETER Experiment Name: At_Drought_cDNA_P Parameter: Tissue Value: Aerial
  misc_feature: MA Experiment 108573 PARAMETER Experiment Name: At_Drought_cDNA_P Parameter: Treatment Value: Drought vs. No Drought
  misc_feature: MA Experiment ID: 108594 Result: Up-regulated in Transcription
  misc_feature: MA Experiment 108594 PARAMETER Experiment Name: At_Ler-rhl_Root_cDNA_P Parameter: Plant Line Value: null
  misc_feature: MA Experiment ID: 108595 Result: Down-regulated in Transcription
  misc_feature: MA Experiment 108595 PARAMETER Experiment Name: At_Ler-pi_Ovule_cDNA_P Parameter: Plant Line Value: null
  misc_feature: MA Experiment ID: 20000069 Result: Down-regulated in Transcription
  misc_feature: MA Experiment 20000069 PARAMETER Experiment Name: At_100uM_ABA_Mutants_cDNA_P Parameter: Plant Line Value: CS23
  misc_feature: MA Experiment 20000069 PARAMETER Experiment Name: At_100uM_ABA_Mutants_cDNA_P Parameter: Timepoint (hr) Value: 6
  misc_feature: MA Experiment 20000069 PARAMETER Experiment Name: At_100uM_ABA_Mutants_cDNA_P Parameter: Tissue Value: Aerial
  misc_feature: MA Experiment 20000069 PARAMETER Experiment Name: At_100uM_ABA_Mutants_cDNA_P Parameter: Treatment Value: 100uM ABA vs. No Treatment
  misc_feature: MA Experiment ID: 20000070 Result: Down-regulated in Transcription
  misc_feature: MA Experiment 20000070 PARAMETER Experiment Name: At_100uM_ABA_Mutants_cDNA_P Parameter: Plant Line Value: CS24
  misc_feature: MA Experiment 20000070 PARAMETER Experiment Name: At_100uM_ABA_Mutants_cDNA_P Parameter: Timepoint (hr) Value: 6
  misc_feature: MA Experiment 20000070 PARAMETER Experiment Name: At_100uM_ABA_Mutants_cDNA_P Parameter: Tissue Value: Aerial
  misc_feature: MA Experiment 20000070 PARAMETER Experiment Name: At_100uM_ABA_Mutants_cDNA_P Parameter: Treatment Value: 100uM ABA vs. No Treatment
  misc_feature: MA Experiment ID: 20000071 Result: Down-regulated in Transcription
  misc_feature: MA Experiment 20000071 PARAMETER Experiment Name: At_100uM_ABA_Mutants_cDNA_P Parameter: Plant Line Value: CS8104
  misc_feature: MA Experiment 20000071 PARAMETER Experiment Name: At_100uM_ABA_Mutants_cDNA_P Parameter: Timepoint (hr) Value: 6
  misc_feature: MA Experiment 20000071 PARAMETER Experiment Name: At_100uM_ABA_Mutants_cDNA_P Parameter: Tissue Value: Aerial
  misc_feature: MA Experiment 20000071 PARAMETER Experiment Name: At_100uM_ABA_Mutants_cDNA_P Parameter: Treatment Value: 100uM ABA vs. No Treatment
  misc_feature: MA Experiment ID: 20000072 Result: Down-regulated in Transcription
  misc_feature: MA Experiment 20000072 PARAMETER Experiment Name: At_100uM_ABA_Mutants_cDNA_P Parameter: Plant Line Value: CS8105
  misc_feature: MA Experiment 20000072 PARAMETER Experiment Name: At_100uM_ABA_Mutants_cDNA_P Parameter: Timepoint (hr) Value: 6
  misc_feature: MA Experiment 20000072 PARAMETER Experiment Name: At_100uM_ABA_Mutants_cDNA_P Parameter: Tissue Value: Aerial
  misc_feature: MA Experiment 20000072 PARAMETER Experiment Name: At_100uM_ABA_Mutants_cDNA_P Parameter: Treatment Value: 100uM ABA vs. No Treatment
  misc_feature: MA Experiment ID: 20000086 Result: Down-regulated in Transcription
  misc_feature: MA Experiment 20000086 PARAMETER Experiment Name: At_100uM_ABA_Mutants_cDNA_P Parameter: Plant Line Value: CS22
  misc_feature: MA Experiment 20000086 PARAMETER Experiment Name: At_100uM_ABA_Mutants_cDNA_P Parameter: Timepoint (hr) Value: 6
  misc_feature: MA Experiment 20000086 PARAMETER Experiment Name: At_100uM_ABA_Mutants_cDNA_P Parameter: Tissue Value: Aerial
  misc_feature: MA Experiment 20000086 PARAMETER Experiment Name: At_100uM_ABA_Mutants_cDNA_P Parameter: Treatment Value: 100uM ABA vs. No Treatment
  misc_feature: MA Experiment ID: 20000087 Result: Down-regulated in Transcription
  misc_feature: MA Experiment 20000087 PARAMETER Experiment Name: At_100uM_ABA_Mutants_cDNA_P Parameter: Plant Line Value: WS
  misc_feature: MA Experiment 20000087 PARAMETER Experiment Name: At_100uM_ABA_Mutants_cDNA_P Parameter: Timepoint (hr) Value: 6
  misc_feature: MA Experiment 20000087 PARAMETER Experiment Name: At_100uM_ABA_Mutants_cDNA_P Parameter: Tissue Value: Aerial
  misc_feature: MA Experiment 20000087 PARAMETER Experiment Name: At_100uM_ABA_Mutants_cDNA_P Parameter: Treatment Value: 100uM ABA vs. No Treatment
  misc_feature: MA Experiment ID: 20000088 Result: Down-regulated in Transcription
  misc_feature: MA Experiment 20000088 PARAMETER Experiment Name: At_100uM_ABA_Mutants_cDNA_P Parameter: Plant Line Value: Landsberg
  misc_feature: MA Experiment 20000088 PARAMETER Experiment Name: At_100uM_ABA_Mutants_cDNA_P Parameter: Timepoint (hr) Value: 6
  misc_feature: MA Experiment 20000088 PARAMETER Experiment Name: At_100uM_ABA_Mutants_cDNA_P Parameter: Tissue Value: Aerial
  misc_feature: MA Experiment 20000088 PARAMETER Experiment Name: At_100uM_ABA_Mutants_cDNA_P Parameter: Treatment Value: 100uM ABA vs. No Treatment
  misc_feature: MA Experiment ID: 20000089 Result: Down-regulated in Transcription
  misc_feature: MA Experiment ID: 20000090 Result: Down-regulated in Transcription
  misc_feature: MA Experiment ID: 20000117 Result: Down-regulated in Transcription
  misc_feature: MA Experiment 20000117 PARAMETER Experiment Name: At_100uM_ABA_Mutants_cDNA_P Parameter: Plant Line Value: Columbia
  misc_feature: MA Experiment 20000117 PARAMETER Experiment Name: At_100uM_ABA_Mutants_cDNA_P Parameter: Timepoint (hr) Value: 6
  misc_feature: MA Experiment 20000117 PARAMETER Experiment Name: At_100uM_ABA_Mutants_cDNA_P Parameter: Tissue Value: Aerial
  misc_feature: MA Experiment 20000117 PARAMETER Experiment Name: At_100uM_ABA_Mutants_cDNA_P Parameter: Treatment Value: 100uM ABA vs. No Treatment
  misc_feature: MA Experiment ID: 20000184 Result: Up-regulated in Transcription
  misc_feature: MA Experiment 20000184 PARAMETER Experiment Name: At_Shoots__P Parameter: Age (day) Value: 7
  misc_feature: MA Experiment 20000184 PARAMETER Experiment Name: At_Shoots__P Parameter: Tissue Value: Shoots vs. Whole Plant
  misc_feature: MA Experiment ID: 20000185 Result: Down-regulated in Transcription
  misc_feature: MA Experiment 20000185 PARAMETER Experiment Name: At_Roots__P Parameter: Age (day) Value: 7 vs. 21
  misc_feature: MA Experiment 20000185 PARAMETER Experiment Name: At_Roots__P Parameter: Organism Value: A. thaliana
  misc_feature: MA Experiment 20000185 PARAMETER Experiment Name: At_Roots__P Parameter: Tissue Value: Roots vs. Whole Plant
  misc_feature: MA Experiment ID: 20000224 Result: Down-regulated in Transcription
  misc_feature: MA Experiment ID: 20000234 Result: Down-regulated in Transcription
  misc_feature: MA Experiment 20000234 PARAMETER Experiment Name: At_Siliques_P Parameter: Age (day) Value: 21
  misc_feature: MA Experiment 20000234 PARAMETER Experiment Name: At_Siliques_P Parameter: Organism Value: A. thaliana
  misc_feature: MA Experiment 20000234 PARAMETER Experiment Name: At_Siliques_P Parameter: Plant Line Value: WS
  misc_feature: MA Experiment 20000234 PARAMETER Experiment Name: At_Siliques_P Parameter: Tissue Value: Less Than 5mm Siliques vs. Whole Plant
  misc_feature: MA Experiment ID: 20000264 Result: Down-regulated in Transcription
  misc_feature: MA Experiment 20000264 PARAMETER Experiment Name: At_Open_Flower_P Parameter: Age (day) Value: 21
  misc_feature: MA Experiment 20000264 PARAMETER Experiment Name: At_Open_Flower_P Parameter: Plant Line Value: WS
  misc_feature: MA Experiment 20000264 PARAMETER Experiment Name: At_Open_Flower_P Parameter: Tissue Value: Open Flower vs. Whole Plant
  misc_feature: MA Experiment ID: 20000286 Result: Down-regulated in Transcription
  misc_feature: MA Experiment 20000286 PARAMETER Experiment Name: At_Open_Flower_P Parameter: Age (day) Value: 21
  misc_feature: MA Experiment 20000286 PARAMETER Experiment Name: At_Open_Flower_P Parameter: Plant Line Value: WS
  misc_feature: MA Experiment 20000286 PARAMETER Experiment Name: At_Open_Flower_P Parameter: Tissue Value: Half Open vs. Whole Plant
  misc_feature: MA Experiment ID: 20000437 Result: Down-regulated in Transcription
  misc_feature: MA Experiment 20000437 PARAMETER Experiment Name: At_Drought_P Parameter: Age (day) Value: 8
  misc_feature: MA Experiment 20000437 PARAMETER Experiment Name: At_Drought_P Parameter: Organism Value: A. thaliana
  misc_feature: MA Experiment 20000437 PARAMETER Experiment Name: At_Drought_P Parameter: Plant Line Value: WS
  misc_feature: MA Experiment 20000437 PARAMETER Experiment Name: At_Drought_P Parameter: Timepoint (hr) Value: 24
  misc_feature: MA Experiment 20000437 PARAMETER Experiment Name: At_Drought_P Parameter: Tissue Value: Whole Plant
  misc_feature: MA Experiment 20000437 PARAMETER Experiment Name: At_Drought_P Parameter: Treatment Value: Drought vs. No Drought
  misc_feature: MA Experiment ID: 20000439 Result: Down-regulated in Transcription
  misc_feature: MA Experiment 20000439 PARAMETER Experiment Name: At_Roots__P Parameter: Age (day) Value: 14 vs. 21
  misc_feature: MA Experiment 20000439 PARAMETER Experiment Name: At_Roots__P Parameter: Organism Value: A. thaliana
  misc_feature: MA Experiment 20000439 PARAMETER Experiment Name: At_Roots__P Parameter: Tissue Value: Roots vs. Whole Plant
  misc_feature: MA Experiment ID: 20000527 Result: Up-regulated in Transcription
  misc_feature: MA Experiment 20000527 PARAMETER Experiment Name: At_10percent_PEG_P Parameter: Age (day) Value: 20
  misc_feature: MA Experiment 20000527 PARAMETER Experiment Name: At_10percent_PEG_P Parameter: Organism Value: A. thaliana
  misc_feature: MA Experiment 20000527 PARAMETER Experiment Name: At_10percent_PEG_P Parameter: Plant Line Value: WS
  misc_feature: MA Experiment 20000527 PARAMETER Experiment Name: At_10percent_PEG_P Parameter: Timepoint (day) Value: 20
  misc_feature: MA Experiment 20000527 PARAMETER Experiment Name: At_10percent_PEG_P Parameter: Tissue Value: Whole Plant
  misc_feature: MA Experiment 20000527 PARAMETER Experiment Name: At_10percent_PEG_P Parameter: Treatment Value: 10percent PEG vs. No Treatment
  misc_feature: MA Experiment ID: 20000794 Result: Down-regulated in Transcription
  misc_feature: MA Experiment 20000794 PARAMETER Experiment Name: At_Petals_P Parameter: Age (day) Value: 23-25 days
  misc_feature: MA Experiment 20000794 PARAMETER Experiment Name: At_Petals_P Parameter: Plant Line Value: WS
  misc_feature: MA Experiment 20000794 PARAMETER Experiment Name: At_Petals_P Parameter: Tissue Value: Petals vs. Whole plant
  misc_feature: MA Experiment ID: 20001450 Result: Up-regulated in Transcription
  misc_feature: MA Experiment 20001450 PARAMETER Experiment Name: At_Far-red-induction_P Parameter: Age (day) Value: 7
  misc_feature: MA Experiment 20001450 PARAMETER Experiment Name: At_Far-red-induction_P Parameter: Light Value: Far-red vs. White
  misc_feature: MA Experiment 20001450 PARAMETER Experiment Name: At_Far-red-induction_P Parameter: Organism Value: A. thaliana
  misc_feature: MA Experiment 20001450 PARAMETER Experiment Name: At_Far-red-induction_P Parameter: Plant Line Value: Columbia
  misc_feature: MA Experiment 20001450 PARAMETER Experiment Name: At_Far-red-induction_P Parameter: Timepoint (hr) Value: 8
  misc_feature: MA Experiment 20001450 PARAMETER Experiment Name: At_Far-red-induction_P Parameter: Tissue Value: Whole Plant
  misc_feature: MA Experiment ID: 20001451 Result: Up-regulated in Transcription
  misc_feature: MA Experiment 20001451 PARAMETER Experiment Name: At_Far-red-induction_P Parameter: Age (day) Value: 7
  misc_feature: MA Experiment 20001451 PARAMETER Experiment Name: At_Far-red-induction_P Parameter: Light Value: Far-red vs. White
  misc_feature: MA Experiment 20001451 PARAMETER Experiment Name: At_Far-red-induction_P Parameter: Organism Value: A. thaliana
  misc_feature: MA Experiment 20001451 PARAMETER Experiment Name: At_Far-red-induction_P Parameter: Plant Line Value: Columbia
  misc_feature: MA Experiment 20001451 PARAMETER Experiment Name: At_Far-red-induction_P Parameter: Timepoint (hr) Value: 24
  misc_feature: MA Experiment 20001451 PARAMETER Experiment Name: At_Far-red-induction_P Parameter: Tissue Value: Whole Plant
  misc_feature: MA Experiment ID: 20001905 Result: Down-regulated in Transcription
  misc_feature: MA Experiment 20001905 PARAMETER Experiment Name: At_Drought_Reproduction_P Parameter: Age (day) Value: 40
  misc_feature: MA Experiment 20001905 PARAMETER Experiment Name: At_Drought_Reproduction_P Parameter: Organism Value: A. thaliana
  misc_feature: MA Experiment 20001905 PARAMETER Experiment Name: At_Drought_Reproduction_P Parameter: Plant Line Value: WS
  misc_feature: MA Experiment 20001905 PARAMETER Experiment Name: At_Drought_Reproduction_P Parameter: Timepoint (day) Value: 10
  misc_feature: MA Experiment 20001905 PARAMETER Experiment Name: At_Drought_Reproduction_P Parameter: Tissue Value: Rosettes
  misc_feature: MA Experiment 20001905 PARAMETER Experiment Name: At_Drought_Reproduction_P Parameter: Treatment Value: Drought vs. No Drought

SEQ ID NO: 34625 - protein, 148 aa, Arabidopsis thaliana; identical to SEQ ID NO: 31035
  peptide (1)..(148): Ceres Seq. ID no. 12579916
  misc_feature (1)..(68): Pfam Name: SOR/SNZ family Pfam Description: SOR/SNZ family
  misc_feature (1)..(146): Homolog of NCBI NO: 19115894 NR Description: putative stress-induced protein
  misc_feature (1)..(137): Homolog of NCBI NO: 22970419 NR Description: hypothetical protein [Chloroflexus aurantiacus]
  misc_feature (1)..(148): Homolog of NCBI NO: 37530308 NR Description: putative pyridoxine/pyridoxal 5-phosphate
  misc_feature (1)..(148): Homolog of NCBI NO: 13310484 NR Description: Sor-like protein [Ginkgo biloba]
  misc_feature (1)..(148): Homolog of NCBI NO: 34394152 NR Description: putative ethylene-inducible protein
  misc_feature (1)..(148): Homolog of NCBI NO: 10719739 NR Description: putative pyridoxine biosynthetic enzyme
  misc_feature (1)..(148): Homolog of NCBI NO: 21617922 NR Description: pyridoxine biosynthesis protein-like [Arabidopsis
  misc_feature (1)..(148): Homolog of NCBI NO: 2501578 NR Description: ETHYLENE-INDUCIBLE PROTEIN HEVER
  misc_feature (1)..(148): Homolog of NCBI NO: 15240972 NR Description: pyridoxine biosynthesis protein - like
  misc_feature (1)..(148): Homolog of NCBI NO: 15224470 NR Description: similar to SOR1 from the fungus Cercospora

SEQ ID NO: 34626 - protein, 116 aa, Arabidopsis thaliana; identical to SEQ ID NO: 31036
  peptide (1)..(116): Ceres Seq. ID no. 12579917
  misc_feature (38)..(75): Pfam Name: Indole-3-glycerol phosphate synthase Pfam Description: Indole-3-glycerol phosphate synthase
  misc_feature (1)..(114): Homolog of NCBI NO: 19115894 NR Description: putative stress-induced protein
  misc_feature (1)..(105): Homolog of NCBI NO: 22970419 NR Description: hypothetical protein [Chloroflexus aurantiacus]
  misc_feature (1)..(116): Homolog of NCBI NO: 37530308 NR Description: putative pyridoxine/pyridoxal 5-phosphate
  misc_feature (1)..(116): Homolog of NCBI NO: 13310484 NR Description: Sor-like protein [Ginkgo biloba]
  misc_feature (1)..(116): Homolog of NCBI NO: 34394152 NR Description: putative ethylene-inducible protein
  misc_feature (1)..(116): Homolog of NCBI NO: 10719739 NR Description: putative pyridoxine biosynthetic enzyme
  misc_feature (1)..(116): Homolog of NCBI NO: 21617922 NR Description: pyridoxine biosynthesis protein-like [Arabidopsis
  misc_feature (1)..(116): Homolog of NCBI NO: 2501578 NR Description: ETHYLENE-INDUCIBLE PROTEIN HEVER
  misc_feature (1)..(116): Homolog of NCBI NO: 15240972 NR Description: pyridoxine biosynthesis protein - like
  misc_feature (1)..(116): Homolog of NCBI NO: 15224470 NR Description: similar to SOR1 from the fungus Cercospora

SEQ ID NO: 34627 - protein, 100 aa, Arabidopsis thaliana; identical to SEQ ID NO: 31037
  peptide (1)..(100): Ceres Seq. ID no. 12579918
  misc_feature (9)..(93): Pfam Name: SOR/SNZ family Pfam Description: SOR/SNZ family
  misc_feature (7)..(93): Homolog of NCBI NO: 19115894 NR Description: putative stress-induced protein
  misc_feature (6)..(93): Homolog of NCBI NO: 22970419 NR Description: hypothetical protein [Chloroflexus aurantiacus]
  misc_feature (1)..(93): Homolog of NCBI NO: 37530308 NR Description: putative pyridoxine/pyridoxal 5-phosphate
  misc_feature (1)..(93): Homolog of NCBI NO: 13310484 NR Description: Sor-like protein [Ginkgo biloba]
  misc_feature (1)..(93): Homolog of NCBI NO: 34394152 NR Description: putative ethylene-inducible protein
  misc_feature (1)..(93): Homolog of NCBI NO: 10719739 NR Description: putative pyridoxine biosynthetic enzyme
  misc_feature (1)..(93): Homolog of NCBI NO: 21617922 NR Description: pyridoxine biosynthesis protein-like [Arabidopsis
  misc_feature (1)..(93): Homolog of NCBI NO: 2501578 NR Description: ETHYLENE-INDUCIBLE PROTEIN HEVER
  misc_feature (1)..(93): Homolog of NCBI NO: 15240972 NR Description: pyridoxine biosynthesis protein - like
  misc_feature (1)..(93): Homolog of NCBI NO: 15224470 NR Description: similar to SOR1 from the fungus Cercospora

SEQ ID NO: 34628 - DNA, 752 bp, Arabidopsis thaliana; identical to SEQ ID NO: 31038
  misc_feature (1)..(752): Ceres Seq. ID no. 13487050
  misc_feature: MA Experiment ID: 108434 Result: Up-regulated in Transcription
  misc_feature: MA Experiment 108434 PARAMETER Experiment Name: At_Root_Tips_cDNA_P Parameter: Tissue Value: Root Tips
  misc_feature: MA Experiment ID: 108461 Result: Up-regulated in Transcription
  misc_feature: MA Experiment 108461 PARAMETER Experiment Name: At_Germinating_Seeds_cDNA_P Parameter: Age (day) Value: 1 vs. 0
  misc_feature: MA Experiment 108461 PARAMETER Experiment Name: At_Germinating_Seeds_cDNA_P Parameter: Tissue Value: Germinating Seeds
  misc_feature: MA Experiment ID: 108462 Result: Up-regulated in Transcription
  misc_feature: MA Experiment 108462 PARAMETER Experiment Name: At_Germinating_Seeds_cDNA_P Parameter: Age (day) Value: 2 vs. 0
  misc_feature: MA Experiment 108462 PARAMETER Experiment Name: At_Germinating_Seeds_cDNA_P Parameter: Tissue Value: Germinating Seeds
  misc_feature: MA Experiment ID: 108561 Result: Down-regulated in Transcription
  misc_feature: MA Experiment 108561 PARAMETER Experiment Name: At_100uM_ABA_cDNA_P Parameter: Timepoint (hr) Value: 6
  misc_feature: MA Experiment 108561 PARAMETER Experiment Name: At_100uM_ABA_cDNA_P Parameter: Tissue Value: Aerial
  misc_feature: MA Experiment 108561 PARAMETER Experiment Name: At_100uM_ABA_cDNA_P Parameter: Treatment Value: 100uM ABA vs. No Treatment
  misc_feature: MA Experiment ID: 108573 Result: Down-regulated in Transcription
  misc_feature: MA Experiment 108573 PARAMETER Experiment Name: At_Drought_cDNA_P Parameter: Timepoint (hr) Value: 6
  misc_feature: MA Experiment 108573 PARAMETER Experiment Name: At_Drought_cDNA_P Parameter: Tissue Value: Aerial
  misc_feature: MA Experiment 108573 PARAMETER Experiment Name: At_Drought_cDNA_P Parameter: Treatment Value: Drought vs. No Drought
  misc_feature: MA Experiment ID: 108577 Result: Down-regulated in Transcription
  misc_feature: MA Experiment 108577 PARAMETER Experiment Name: At_42deg_Heat_cDNA_P Parameter: Temperature (deg C) Value: 42 vs. 22
  misc_feature: MA Experiment 108577 PARAMETER Experiment Name: At_42deg_Heat_cDNA_P Parameter: Timepoint (hr) Value: 6
  misc_feature: MA Experiment 108577 PARAMETER Experiment Name: At_42deg_Heat_cDNA_P Parameter: Tissue Value: Aerial
  misc_feature: MA Experiment ID: 108579 Result: Up-regulated in Transcription
  misc_feature: MA Experiment 108579 PARAMETER Experiment Name: At_4deg_Cold_cDNA_P Parameter: Temperature (deg C) Value: 4 vs. 22
  misc_feature: MA Experiment 108579 PARAMETER Experiment Name: At_4deg_Cold_cDNA_P Parameter: Timepoint (hr) Value: 6
  misc_feature: MA Experiment 108579 PARAMETER Experiment Name: At_4deg_Cold_cDNA_P Parameter: Tissue Value: Aerial
  misc_feature: MA Experiment ID: 108585 Result: Down-regulated in Transcription
  misc_feature: MA Experiment 108585 PARAMETER Experiment Name: At_5mM_NaNP_cDNA_P Parameter: Timepoint (hr) Value: 6
  misc_feature: MA Experiment 108585 PARAMETER Experiment Name: At_5mM_NaNP_cDNA_P Parameter: Tissue Value: Aerial
  misc_feature: MA Experiment 108585 PARAMETER Experiment Name: At_5mM_NaNP_cDNA_P Parameter: Treatment Value: null
  misc_feature: MA Experiment ID: 20000069 Result: Down-regulated in Transcription
  misc_feature: MA Experiment 20000069 PARAMETER Experiment Name: At_100uM_ABA_Mutants_cDNA_P Parameter: Plant Line Value: CS23
  misc_feature: MA Experiment 20000069 PARAMETER Experiment Name: At_100uM_ABA_Mutants_cDNA_P Parameter: Timepoint (hr) Value: 6
  misc_feature: MA Experiment 20000069 PARAMETER Experiment Name: At_100uM_ABA_Mutants_cDNA_P Parameter: Tissue Value: Aerial
  misc_feature: MA Experiment 20000069 PARAMETER Experiment Name: At_100uM_ABA_Mutants_cDNA_P Parameter: Treatment Value: 100uM ABA vs. No Treatment
  misc_feature: MA Experiment ID: 20000071 Result: Down-regulated in Transcription
  misc_feature: MA Experiment 20000071 PARAMETER Experiment Name: At_100uM_ABA_Mutants_cDNA_P Parameter: Plant Line Value: CS8104
  misc_feature: MA Experiment 20000071 PARAMETER Experiment Name: At_100uM_ABA_Mutants_cDNA_P Parameter: Timepoint (hr) Value: 6
  misc_feature: MA Experiment 20000071 PARAMETER Experiment Name: At_100uM_ABA_Mutants_cDNA_P Parameter: Tissue Value: Aerial
  misc_feature: MA Experiment 20000071 PARAMETER Experiment Name: At_100uM_ABA_Mutants_cDNA_P Parameter: Treatment Value: 100uM ABA vs. No Treatment
  misc_feature: MA Experiment ID: 20000093 Result: Down-regulated in Transcription
  misc_feature: MA Experiment 20000093 PARAMETER Experiment Name: At_42deg_Heat_cDNA_P Parameter: Temperature (deg C) Value: 42 vs. 22
  misc_feature: MA Experiment 20000093 PARAMETER Experiment Name: At_42deg_Heat_cDNA_P Parameter: Timepoint (hr) Value: 0.5
  misc_feature: MA Experiment 20000093 PARAMETER Experiment Name: At_42deg_Heat_cDNA_P Parameter: Tissue Value: Aerial
  misc_feature: MA Experiment ID: 20000111 Result: Down-regulated in Transcription
  misc_feature: MA Experiment 20000111 PARAMETER Experiment Name: At_42deg_Heat_cDNA_P Parameter: Temperature (deg C) Value: 42 vs. 22
  misc_feature: MA Experiment 20000111 PARAMETER Experiment Name: At_42deg_Heat_cDNA_P Parameter: Timepoint (hr) Value: 6
  misc_feature: MA Experiment 20000111 PARAMETER Experiment Name: At_42deg_Heat_cDNA_P Parameter: Tissue Value: Aerial
  misc_feature: MA Experiment ID: 20000112 Result: Down-regulated in Transcription
  misc_feature: MA Experiment 20000112 PARAMETER Experiment Name: At_42deg_Heat_cDNA_P Parameter: Temperature (deg C) Value: 42 vs. 22
  misc_feature: MA Experiment 20000112 PARAMETER Experiment Name: At_42deg_Heat_cDNA_P Parameter: Timepoint (hr) Value: 2
  misc_feature: MA Experiment 20000112 PARAMETER Experiment Name: At_42deg_Heat_cDNA_P Parameter: Tissue Value: Aerial
  misc_feature: MA Experiment ID: 20000113 Result: Down-regulated in Transcription
  misc_feature: MA Experiment 20000113 PARAMETER Experiment Name: At_42deg_Heat_cDNA_P Parameter: Temperature (deg C) Value: 42 vs. 22
  misc_feature: MA Experiment 20000113 PARAMETER Experiment Name: At_42deg_Heat_cDNA_P Parameter: Timepoint (hr) Value: 8
  misc_feature: MA Experiment 20000113 PARAMETER Experiment Name: At_42deg_Heat_cDNA_P Parameter: Tissue Value: Aerial
  misc_feature: MA Experiment ID: 20000117 Result: Down-regulated in Transcription
  misc_feature: MA Experiment 20000117 PARAMETER Experiment Name: At_100uM_ABA_Mutants_cDNA_P Parameter: Plant Line Value: Columbia
  misc_feature: MA Experiment 20000117 PARAMETER Experiment Name: At_100uM_ABA_Mutants_cDNA_P Parameter: Timepoint (hr) Value: 6
  misc_feature: MA Experiment 20000117 PARAMETER Experiment Name: At_100uM_ABA_Mutants_cDNA_P Parameter: Tissue Value: Aerial
  misc_feature: MA Experiment 20000117 PARAMETER Experiment Name: At_100uM_ABA_Mutants_cDNA_P Parameter: Treatment Value: 100uM ABA vs. No Treatment
  misc_feature: MA Experiment ID: 20000144 Result: Down-regulated in Transcription
  misc_feature: MA Experiment 20000144 PARAMETER Experiment Name: At_42deg_Heat_cDNA_P Parameter: Temperature (deg C) Value: 42 vs. 22
  misc_feature: MA Experiment 20000144 PARAMETER Experiment Name: At_42deg_Heat_cDNA_P Parameter: Timepoint (hr) Value: 1
  misc_feature: MA Experiment 20000144 PARAMETER Experiment Name: At_42deg_Heat_cDNA_P Parameter: Tissue Value: Aerial
  misc_feature: MA Experiment ID: 20000179 Result: Up-regulated in Transcription
  misc_feature: MA Experiment 20000179 PARAMETER Experiment Name: At_Germinating_Seeds_P Parameter: Age (hr) Value: 6 vs. 0
  misc_feature: MA Experiment 20000179 PARAMETER Experiment Name: At_Germinating_Seeds_P Parameter: Tissue Value: Germinating Seeds
  misc_feature: MA Experiment ID: 20000180 Result: Up-regulated in Transcription
  misc_feature: MA Experiment 20000180 PARAMETER Experiment Name: At_Germinating_Seeds_P Parameter: Age (hr) Value: 24 vs. 0
  misc_feature: MA Experiment 20000180 PARAMETER Experiment Name: At_Germinating_Seeds_P Parameter: Tissue Value: Germinating Seeds
  misc_feature: MA Experiment ID: 20000185 Result: Up-regulated in Transcription
  misc_feature: MA Experiment 20000185 PARAMETER Experiment Name: At_Roots__P Parameter: Age (day) Value: 7 vs. 21
  misc_feature: MA Experiment 20000185 PARAMETER Experiment Name: At_Roots__P Parameter: Organism Value: A. thaliana
  misc_feature: MA Experiment 20000185 PARAMETER Experiment Name: At_Roots__P Parameter: Tissue Value: Roots vs. Whole Plant
  misc_feature: MA Experiment ID: 20000234 Result: Up-regulated in Transcription
  misc_feature: MA Experiment 20000234 PARAMETER Experiment Name: At_Siliques_P Parameter: Age (day) Value: 21
  misc_feature: MA Experiment 20000234 PARAMETER Experiment Name: At_Siliques_P Parameter: Organism Value: A. thaliana
  misc_feature: MA Experiment 20000234 PARAMETER Experiment Name: At_Siliques_P Parameter: Plant Line Value: WS
  misc_feature: MA Experiment 20000234 PARAMETER Experiment Name: At_Siliques_P Parameter: Tissue Value: Less Than 5mm Siliques vs. Whole Plant
  misc_feature: MA Experiment ID: 20000264 Result: Up-regulated in Transcription
  misc_feature: MA Experiment 20000264 PARAMETER Experiment Name: At_Open_Flower_P Parameter: Age (day) Value: 21
  misc_feature: MA Experiment 20000264 PARAMETER Experiment Name: At_Open_Flower_P Parameter: Plant Line Value: WS
  misc_feature: MA Experiment 20000264 PARAMETER Experiment Name: At_Open_Flower_P Parameter: Tissue Value: Open Flower vs. Whole Plant
  misc_feature: MA Experiment ID: 20000265 Result: Up-regulated in Transcription
  misc_feature: MA Experiment 20000265 PARAMETER Experiment Name: At_Open_Flower_P Parameter: Age (day) Value: 21
  misc_feature: MA Experiment 20000265 PARAMETER Experiment Name: At_Open_Flower_P Parameter: Plant Line Value: WS
  misc_feature: MA Experiment 20000265 PARAMETER Experiment Name: At_Open_Flower_P Parameter: Tissue Value: Closed Flower vs. Whole Plant
  misc_feature: MA Experiment ID: 20000437 Result: Down-regulated in Transcription
  misc_feature: MA Experiment 20000437 PARAMETER Experiment Name: At_Drought_P Parameter: Age (day) Value: 8
  misc_feature: MA Experiment 20000437 PARAMETER Experiment Name: At_Drought_P Parameter: Organism Value: A. thaliana
  misc_feature: MA Experiment 20000437 PARAMETER Experiment Name: At_Drought_P Parameter: Plant Line Value: WS
  misc_feature: MA Experiment 20000437 PARAMETER Experiment Name: At_Drought_P Parameter: Timepoint (hr) Value: 24
  misc_feature: MA Experiment 20000437 PARAMETER Experiment Name: At_Drought_P Parameter: Tissue Value: Whole Plant
  misc_feature: MA Experiment 20000437 PARAMETER Experiment Name: At_Drought_P Parameter: Treatment Value: Drought vs. No Drought
  misc_feature: MA Experiment ID: 20001248 Result: Down-regulated in Transcription
  misc_feature: MA Experiment 20001248 PARAMETER Experiment Name: At_Far-red-induction_P Parameter: Age (day) Value: 7
  misc_feature: MA Experiment 20001248 PARAMETER Experiment Name: At_Far-red-induction_P Parameter: Light Value: Far-red vs. White
  misc_feature: MA Experiment 20001248 PARAMETER Experiment Name: At_Far-red-induction_P Parameter: Organism Value: A. thaliana
  misc_feature: MA Experiment 20001248 PARAMETER Experiment Name: At_Far-red-induction_P Parameter: Plant Line Value: Columbia
  misc_feature: MA Experiment 20001248 PARAMETER Experiment Name: At_Far-red-induction_P Parameter: Timepoint (hr) Value: 4
  misc_feature: MA Experiment 20001248 PARAMETER Experiment Name: At_Far-red-induction_P Parameter: Tissue Value: Whole Plant
  misc_feature: MA Experiment ID: 20001451 Result: Down-regulated in Transcription
  misc_feature: MA Experiment 20001451 PARAMETER Experiment Name: At_Far-red-induction_P Parameter: Age (day) Value: 7
  misc_feature: MA Experiment 20001451 PARAMETER Experiment Name: At_Far-red-induction_P Parameter: Light Value: Far-red vs. White
  misc_feature: MA Experiment 20001451 PARAMETER Experiment Name: At_Far-red-induction_P Parameter: Organism Value: A. thaliana
  misc_feature: MA Experiment 20001451 PARAMETER Experiment Name: At_Far-red-induction_P Parameter: Plant Line Value: Columbia
  misc_feature: MA Experiment 20001451 PARAMETER Experiment Name: At_Far-red-induction_P Parameter: Timepoint (hr) Value: 24
  misc_feature: MA Experiment 20001451 PARAMETER Experiment Name: At_Far-red-induction_P Parameter: Tissue Value: Whole Plant
  misc_feature: MA Experiment ID: 20001555 Result: Down-regulated in Transcription
  misc_feature: MA Experiment 20001555 PARAMETER Experiment Name: At_Drought_Soil_Dry_P Parameter: Age (day) Value: 24
  misc_feature: MA Experiment 20001555 PARAMETER Experiment Name: At_Drought_Soil_Dry_P Parameter: Organism Value: A. thaliana
  misc_feature: MA Experiment 20001555 PARAMETER Experiment Name: At_Drought_Soil_Dry_P Parameter: Plant Line Value: WS
  misc_feature: MA Experiment 20001555 PARAMETER Experiment Name: At_Drought_Soil_Dry_P Parameter: Post Timepoint (hr) Value: None
  misc_feature: MA Experiment 20001555 PARAMETER Experiment Name: At_Drought_Soil_Dry_P Parameter: Post-Treatment Value: None
  misc_feature: MA Experiment 20001555 PARAMETER Experiment Name: At_Drought_Soil_Dry_P Parameter: Timepoint (day) Value: 10
  misc_feature: MA Experiment 20001555 PARAMETER Experiment Name: At_Drought_Soil_Dry_P Parameter: Treatment Value: Drought vs. No Drought
  misc_feature: MA Experiment ID: 20001556 Result: Down-regulated in Transcription
  misc_feature: MA Experiment 20001556 PARAMETER Experiment Name: At_Drought_Soil_Dry_P Parameter: Age (day) Value: 26
  misc_feature: MA Experiment 20001556 PARAMETER Experiment Name: At_Drought_Soil_Dry_P Parameter: Organism Value: A. thaliana
  misc_feature: MA Experiment 20001556 PARAMETER Experiment Name: At_Drought_Soil_Dry_P Parameter: Plant Line Value: WS
  misc_feature: MA Experiment 20001556 PARAMETER Experiment Name: At_Drought_Soil_Dry_P Parameter: Post Timepoint (hr) Value: None
  misc_feature: MA Experiment 20001556 PARAMETER Experiment Name: At_Drought_Soil_Dry_P Parameter: Post-Treatment Value: None
  misc_feature: MA Experiment 20001556 PARAMETER Experiment Name: At_Drought_Soil_Dry_P Parameter: Timepoint (day) Value: 12
  misc_feature: MA Experiment 20001556 PARAMETER Experiment Name: At_Drought_Soil_Dry_P Parameter: Treatment Value: Drought vs. No Drought
  misc_feature: MA Experiment ID: 20001557 Result: Down-regulated in Transcription
  misc_feature: MA Experiment 20001557 PARAMETER Experiment Name: At_Drought_Soil_Dry_P Parameter: Age (day) Value: 27
  misc_feature: MA Experiment 20001557 PARAMETER Experiment Name: At_Drought_Soil_Dry_P Parameter: Organism Value: A. thaliana
  misc_feature: MA Experiment 20001557 PARAMETER Experiment Name: At_Drought_Soil_Dry_P Parameter: Plant Line Value: WS
  misc_feature: MA Experiment 20001557 PARAMETER Experiment Name: At_Drought_Soil_Dry_P Parameter: Post Timepoint (hr) Value: 3
  misc_feature: MA Experiment 20001557 PARAMETER Experiment Name: At_Drought_Soil_Dry_P Parameter: Post-Treatment Value: Re-Water vs. No Drought
  misc_feature: MA Experiment 20001557 PARAMETER Experiment Name: At_Drought_Soil_Dry_P Parameter: Timepoint (day) Value: 13
  misc_feature: MA Experiment 20001557 PARAMETER Experiment Name: At_Drought_Soil_Dry_P Parameter: Treatment Value: Drought vs. No Drought
  misc_feature: MA Experiment ID: 20001559 Result: Down-regulated in Transcription
  misc_feature: MA Experiment 20001559 PARAMETER Experiment Name: At_Drought_Soil_Dry_P Parameter: Age (day) Value: 28
  misc_feature: MA Experiment 20001559 PARAMETER Experiment Name: At_Drought_Soil_Dry_P Parameter: Organism Value: A. thaliana
  misc_feature: MA Experiment 20001559 PARAMETER Experiment Name: At_Drought_Soil_Dry_P Parameter: Plant Line Value: WS
  misc_feature: MA Experiment 20001559 PARAMETER Experiment Name: At_Drought_Soil_Dry_P Parameter: Post Timepoint (hr) Value: 29
  misc_feature: MA Experiment 20001559 PARAMETER Experiment Name: At_Drought_Soil_Dry_P Parameter: Post-Treatment Value: Re-Water vs. No Drought
  misc_feature: MA Experiment 20001559 PARAMETER Experiment Name: At_Drought_Soil_Dry_P Parameter: Timepoint (day) Value: 14
  misc_feature: MA Experiment 20001559 PARAMETER Experiment Name: At_Drought_Soil_Dry_P Parameter: Treatment Value: Drought vs. No Drought
  misc_feature: MA Experiment ID: 20001905 Result: Down-regulated in Transcription
  misc_feature: MA Experiment 20001905 PARAMETER Experiment Name: At_Drought_Reproduction_P Parameter: Age (day) Value: 40
  misc_feature: MA Experiment 20001905 PARAMETER Experiment Name: At_Drought_Reproduction_P Parameter: Organism Value: A. thaliana
  misc_feature: MA Experiment 20001905 PARAMETER Experiment Name: At_Drought_Reproduction_P Parameter: Plant Line Value: WS
  misc_feature: MA Experiment 20001905 PARAMETER Experiment Name: At_Drought_Reproduction_P Parameter: Timepoint (day) Value: 10
  misc_feature: MA Experiment 20001905 PARAMETER Experiment Name: At_Drought_Reproduction_P Parameter: Tissue Value: Rosettes
  misc_feature: MA Experiment 20001905 PARAMETER Experiment Name: At_Drought_Reproduction_P Parameter: Treatment Value: Drought vs. No Drought

SEQ ID NO: 34629 - protein, 150 aa, Arabidopsis thaliana; identical to SEQ ID NO: 31039
  peptide (1)..(150): Ceres Seq. ID no. 13487051
  misc_feature (6)..(129): Pfam Name: Core histone H2A/H2B/H3/H4 Pfam Description: Core histone H2A/H2B/H3/H4
  misc_feature (1)..(150): Homolog of NCBI NO: 122006 NR Description: HISTONE H2A
  misc_feature (6)..(150): Homolog of NCBI NO: 121982 NR Description: HISTONE H2A.2.2
  misc_feature (1)..(150): Homolog of NCBI NO: 15241857 NR Description: histone H2A, putative [Arabidopsis thaliana]
  misc_feature (5)..(150): Homolog of NCBI NO: 729671 NR Description: Histone H2A
  misc_feature (1)..(150): Homolog of NCBI NO: 7649159 NR Description: histone H2A [Euphorbia esula]
  misc_feature (5)..(150): Homolog of NCBI NO: 34914498 NR Description: putative histone H2A [Oryza sativa (japonica
  misc_feature (1)..(150): Homolog of NCBI NO: 122003 NR Description: HISTONE H2A
  misc_feature (1)..(150): Homolog of NCBI NO: 27529852 NR Description: H2A histone [Nicotiana tabacum]
  misc_feature (1)..(150): Homolog of NCBI NO: 122007 NR Description: Histone H2A
  misc_feature (1)..(150): Homolog of NCBI NO: 15238549 NR Description: histone H2A, putative [Arabidopsis thaliana]

SEQ ID NO: 34630 - protein, 122 aa, Arabidopsis thaliana; identical to SEQ ID NO: 31040
  peptide (1)..(122): Ceres Seq. ID no. 13487052
  misc_feature (1)..(101): Pfam Name: Core histone H2A/H2B/H3/H4 Pfam Description: Core histone H2A/H2B/H3/H4
  misc_feature (1)..(122): Homolog of NCBI NO: 122006 NR Description: HISTONE H2A
  misc_feature (1)..(122): Homolog of NCBI NO: 121982 NR Description: HISTONE H2A.2.2
  misc_feature (1)..(122): Homolog of NCBI NO: 15241857 NR Description: histone H2A, putative [Arabidopsis thaliana]
  misc_feature (1)..(122): Homolog of NCBI NO: 729671 NR Description: Histone H2A
  misc_feature (1)..(122): Homolog of NCBI NO: 7649159 NR Description: histone H2A [Euphorbia esula]
  misc_feature (1)..(122): Homolog of NCBI NO: 34914498 NR Description: putative histone H2A [Oryza sativa (japonica
  misc_feature (1)..(122): Homolog of NCBI NO: 122003 NR Description: HISTONE H2A
  misc_feature (1)..(122): Homolog of NCBI NO: 27529852 NR Description: H2A histone [Nicotiana tabacum]
  misc_feature (1)..(122): Homolog of NCBI NO: 122007 NR Description: Histone H2A
  misc_feature (1)..(122): Homolog of NCBI NO: 15238549 NR Description: histone H2A, putative [Arabidopsis thaliana]

SEQ ID NO: 34631 - protein, 90 aa, Arabidopsis thaliana; identical to SEQ ID NO: 31041
  peptide (1)..(90): Ceres Seq. ID no. 13487053
  misc_feature (1)..(69): Pfam Name: Core histone H2A/H2B/H3/H4 Pfam Description: Core histone H2A/H2B/H3/H4
  misc_feature (1)..(90): Homolog of NCBI NO: 122006 NR Description: HISTONE H2A
  misc_feature (1)..(90): Homolog of NCBI NO: 121982 NR Description: HISTONE H2A.2.2
  misc_feature (1)..(90): Homolog of NCBI NO: 15241857 NR Description: histone H2A, putative [Arabidopsis thaliana]
  misc_feature (1)..(90): Homolog of NCBI NO: 729671 NR Description: Histone H2A
  misc_feature (1)..(90): Homolog of NCBI NO: 7649159 NR Description: histone H2A [Euphorbia esula]
  misc_feature (1)..(90): Homolog of NCBI NO: 34914498 NR Description: putative histone H2A [Oryza sativa (japonica
  misc_feature (1)..(90): Homolog of NCBI NO: 122003 NR Description: HISTONE H2A
  misc_feature (1)..(90): Homolog of NCBI NO: 27529852 NR Description: H2A histone [Nicotiana tabacum]
  misc_feature (1)..(90): Homolog of NCBI NO: 122007 NR Description: Histone H2A
  misc_feature (1)..(90): Homolog of NCBI NO: 15238549 NR Description: histone H2A, putative [Arabidopsis thaliana]

SEQ ID NO: 34632 - DNA, 1517 bp, Arabidopsis thaliana; identical to SEQ ID NO: 31042
  misc_feature (1)..(1517): Ceres Seq. ID no. 12322684
  misc_feature: MA Experiment ID: 108434 Result: Down-regulated in Transcription
  misc_feature: MA Experiment 108434 PARAMETER Experiment Name: At_Root_Tips_cDNA_P Parameter: Tissue Value: Root Tips
  misc_feature: MA Experiment ID: 108462 Result: Up-regulated in Transcription
  misc_feature: MA Experiment 108462 PARAMETER Experiment Name: At_Germinating_Seeds_cDNA_P Parameter: Age (day) Value: 2 vs. 0
  misc_feature: MA Experiment 108462 PARAMETER Experiment Name: At_Germinating_Seeds_cDNA_P Parameter: Tissue Value: Germinating Seeds
  misc_feature: MA Experiment ID: 108463 Result: Up-regulated in Transcription
  misc_feature: MA Experiment 108463 PARAMETER Experiment Name: At_Germinating_Seeds_cDNA_P Parameter: Age (day) Value: 3 vs. 0
  misc_feature: MA Experiment 108463 PARAMETER Experiment Name: At_Germinating_Seeds_cDNA_P Parameter: Tissue Value: Germinating Seeds
  misc_feature: MA Experiment ID: 108464 Result: Up-regulated in Transcription
  misc_feature: MA Experiment 108464 PARAMETER Experiment Name: At_Germinating_Seeds_cDNA_P Parameter: Age (day) Value: 4 vs. 0
  misc_feature: MA Experiment 108464 PARAMETER Experiment Name: At_Germinating_Seeds_cDNA_P Parameter: Tissue Value: Germinating Seeds
  misc_feature: MA Experiment ID: 108488 Result: Down-regulated in Transcription
  misc_feature: MA Experiment ID: 108561 Result: Up-regulated in Transcription
  misc_feature: MA Experiment 108561 PARAMETER Experiment Name: At_100uM_ABA_cDNA_P Parameter: Timepoint (hr) Value: 6
  misc_feature: MA Experiment 108561 PARAMETER Experiment Name: At_100uM_ABA_cDNA_P Parameter: Tissue Value: Aerial
  misc_feature: MA Experiment 108561 PARAMETER Experiment Name: At_100uM_ABA_cDNA_P Parameter: Treatment Value: 100uM ABA vs. No Treatment
  misc_feature: MA Experiment ID: 108572 Result: Up-regulated in Transcription
  misc_feature: MA Experiment 108572 PARAMETER Experiment Name: At_Drought_cDNA_P Parameter: Timepoint (hr) Value: 1
  misc_feature: MA Experiment 108572 PARAMETER Experiment Name: At_Drought_cDNA_P Parameter: Tissue Value: Aerial
  misc_feature: MA Experiment 108572 PARAMETER Experiment Name: At_Drought_cDNA_P Parameter: Treatment Value: Drought vs. No Drought
  misc_feature: MA Experiment ID: 108573 Result: Up-regulated in Transcription
  misc_feature: MA Experiment 108573 PARAMETER Experiment Name: At_Drought_cDNA_P Parameter: Timepoint (hr) Value: 6
  misc_feature: MA Experiment 108573 PARAMETER Experiment Name: At_Drought_cDNA_P Parameter: Tissue Value: Aerial
  misc_feature: MA Experiment 108573 PARAMETER Experiment Name: At_Drought_cDNA_P Parameter: Treatment Value: Drought vs. No Drought
  misc_feature: MA Experiment ID: 108574 Result: Up-regulated in Transcription
  misc_feature: MA Experiment 108574 PARAMETER Experiment Name: At_Wounding__cDNA_P Parameter: Timepoint (hr) Value: 1
  misc_feature: MA Experiment 108574 PARAMETER Experiment Name: At_Wounding__cDNA_P Parameter: Tissue Value: Aerial
  misc_feature: MA Experiment 108574 PARAMETER Experiment Name: At_Wounding__cDNA_P Parameter: Treatment Value: Wounding vs. No Wounding
  misc_feature: MA Experiment ID: 108576 Result: Up-regulated in Transcription
  misc_feature: MA Experiment 108576 PARAMETER Experiment Name: At_42deg_Heat_cDNA_P Parameter: Temperature (deg C) Value: 42 vs. 22
  misc_feature: MA Experiment 108576 PARAMETER Experiment Name: At_42deg_Heat_cDNA_P Parameter: Timepoint (hr) Value: 1
  misc_feature: MA Experiment 108576 PARAMETER Experiment Name: At_42deg_Heat_cDNA_P Parameter: Tissue Value: Aerial
  misc_feature: MA Experiment ID: 108577 Result: Up-regulated in Transcription
  misc_feature: MA Experiment 108577 PARAMETER Experiment Name: At_42deg_Heat_cDNA_P Parameter: Temperature (deg C) Value: 42 vs. 22
  misc_feature: MA Experiment 108577 PARAMETER Experiment Name: At_42deg_Heat_cDNA_P Parameter: Timepoint (hr) Value: 6
  misc_feature: MA Experiment 108577 PARAMETER Experiment Name: At_42deg_Heat_cDNA_P Parameter: Tissue Value: Aerial
  misc_feature: MA Experiment ID: 108585 Result: Up-regulated in Transcription
  misc_feature: MA Experiment 108585 PARAMETER Experiment Name: At_5mM_NaNP_cDNA_P Parameter: Timepoint (hr) Value: 6
  misc_feature: MA Experiment 108585 PARAMETER Experiment Name: At_5mM_NaNP_cDNA_P Parameter: Tissue Value: Aerial
  misc_feature: MA Experiment 108585 PARAMETER Experiment Name: At_5mM_NaNP_cDNA_P Parameter: Treatment Value: null
  misc_feature: MA Experiment ID: 108595 Result: Up-regulated in Transcription
  misc_feature: MA Experiment 108595 PARAMETER Experiment Name: At_Ler-pi_Ovule_cDNA_P Parameter: Plant Line Value: null
  misc_feature: MA Experiment ID: 108608 Result: Up-regulated in Transcription
  misc_feature: MA Experiment 108608 PARAMETER Experiment Name: At_100uM_ABA_cDNA_P Parameter: Timepoint (hr) Value: 1
  misc_feature: MA Experiment 108608 PARAMETER Experiment Name: At_100uM_ABA_cDNA_P Parameter: Tissue Value: Aerial
  misc_feature: MA Experiment 108608 PARAMETER Experiment Name: At_100uM_ABA_cDNA_P Parameter: Treatment Value: 100uM ABA vs. No Treatment
  misc_feature: MA Experiment ID: 108668 Result: Up-regulated in Transcription
  misc_feature: MA Experiment 108668 PARAMETER Experiment Name: At_2mM_SA_cDNA_P Parameter: Plant Line Value: WS
  misc_feature: MA Experiment 108668 PARAMETER Experiment Name: At_2mM_SA_cDNA_P Parameter: Timepoint (hr) Value: 6
  misc_feature: MA Experiment 108668 PARAMETER Experiment Name: At_2mM_SA_cDNA_P Parameter: Treatment Value: 2mM SA vs. No Treatment
  misc_feature: MA Experiment ID: 20000093 Result: Up-regulated in Transcription
  misc_feature: MA Experiment 20000093 PARAMETER Experiment Name: At_42deg_Heat_cDNA_P Parameter: Temperature (deg C) Value: 42 vs. 22
  misc_feature: MA Experiment 20000093 PARAMETER Experiment Name: At_42deg_Heat_cDNA_P Parameter: Timepoint (hr) Value: 0.5
  misc_feature: MA Experiment 20000093 PARAMETER Experiment Name: At_42deg_Heat_cDNA_P Parameter: Tissue Value: Aerial
  misc_feature: MA Experiment ID: 20000111 Result: Up-regulated in Transcription
  misc_feature: MA Experiment 20000111 PARAMETER Experiment Name: At_42deg_Heat_cDNA_P Parameter: Temperature (deg C) Value: 42 vs. 22
  misc_feature: MA Experiment 20000111 PARAMETER Experiment Name: At_42deg_Heat_cDNA_P Parameter: Timepoint (hr) Value: 6
  misc_feature: MA Experiment 20000111 PARAMETER Experiment Name: At_42deg_Heat_cDNA_P Parameter: Tissue Value: Aerial
  misc_feature: MA Experiment ID: 20000112 Result: Up-regulated in Transcription
  misc_feature: MA Experiment 20000112 PARAMETER Experiment Name: At_42deg_Heat_cDNA_P Parameter: Temperature (deg C) Value: 42 vs. 22
  misc_feature: MA Experiment 20000112 PARAMETER Experiment Name: At_42deg_Heat_cDNA_P Parameter: Timepoint (hr) Value: 2
  misc_feature: MA Experiment 20000112 PARAMETER Experiment Name: At_42deg_Heat_cDNA_P Parameter: Tissue Value: Aerial
  misc_feature: MA Experiment ID: 20000113 Result: Up-regulated in Transcription
  misc_feature: MA Experiment 20000113 PARAMETER Experiment Name: At_42deg_Heat_cDNA_P Parameter: Temperature (deg C) Value: 42 vs. 22
  misc_feature: MA Experiment 20000113 PARAMETER Experiment Name: At_42deg_Heat_cDNA_P Parameter: Timepoint (hr) Value: 8
  misc_feature: MA Experiment 20000113 PARAMETER Experiment Name: At_42deg_Heat_cDNA_P Parameter: Tissue Value: Aerial
  misc_feature: MA Experiment ID: 20000144 Result: Up-regulated in Transcription
  misc_feature: MA Experiment 20000144 PARAMETER Experiment Name: At_42deg_Heat_cDNA_P Parameter: Temperature (deg C) Value: 42 vs. 22
  misc_feature: MA Experiment 20000144 PARAMETER Experiment Name: At_42deg_Heat_cDNA_P Parameter: Timepoint (hr) Value: 1
  misc_feature: MA Experiment 20000144 PARAMETER Experiment Name: At_42deg_Heat_cDNA_P Parameter: Tissue Value: Aerial
  misc_feature: MA Experiment ID: 20000166 Result: Up-regulated in Transcription
  misc_feature: MA Experiment 20000166 PARAMETER Experiment Name: At_100uM_ABA_P Parameter: Age (day) Value: 14
  misc_feature: MA Experiment 20000166 PARAMETER Experiment Name: At_100uM_ABA_P Parameter: Organism Value: A. thaliana
  misc_feature: MA Experiment 20000166 PARAMETER Experiment Name: At_100uM_ABA_P Parameter: Plant Line Value: WS
  misc_feature: MA Experiment 20000166 PARAMETER Experiment Name: At_100uM_ABA_P Parameter: Timepoint (hr) Value: 1
  misc_feature: MA Experiment 20000166 PARAMETER Experiment Name: At_100uM_ABA_P Parameter: Tissue Value: Aerial
  misc_feature: MA Experiment 20000166 PARAMETER Experiment Name: At_100uM_ABA_P Parameter: Treatment Value: 100uM ABA vs. No Treatment
  misc_feature: MA Experiment ID: 20000171 Result: Up-regulated in Transcription
  misc_feature: MA Experiment 20000171 PARAMETER Experiment Name: At_42deg_Heat_P Parameter: Age (day) Value: 14
  misc_feature: MA Experiment 20000171 PARAMETER Experiment Name: At_42deg_Heat_P Parameter: Organism Value: A. thaliana
  misc_feature: MA Experiment 20000171 PARAMETER Experiment Name: At_42deg_Heat_P Parameter: Plant Line Value: WS
  misc_feature: MA Experiment 20000171 PARAMETER Experiment Name: At_42deg_Heat_P Parameter: Temperature (deg C) Value: 42 vs. 22
  misc_feature: MA Experiment 20000171 PARAMETER Experiment Name: At_42deg_Heat_P Parameter: Timepoint (hr) Value: 1
  misc_feature: MA Experiment 20000171 PARAMETER Experiment Name: At_42deg_Heat_P Parameter: Tissue Value: Aerial
  misc_feature: MA Experiment ID: 20000173 Result: Up-regulated in Transcription
  misc_feature: MA Experiment 20000173 PARAMETER Experiment Name: At_42deg_Heat_P Parameter: Age (day) Value: 14
  misc_feature: MA Experiment 20000173 PARAMETER Experiment Name: At_42deg_Heat_P Parameter: Organism Value: A. thaliana
  misc_feature: MA Experiment 20000173 PARAMETER Experiment Name: At_42deg_Heat_P Parameter: Plant Line Value: WS
  misc_feature: MA Experiment 20000173 PARAMETER Experiment Name: At_42deg_Heat_P Parameter: Temperature (deg C) Value: 42 vs. 22
  misc_feature: MA Experiment 20000173 PARAMETER Experiment Name: At_42deg_Heat_P Parameter: Timepoint (hr) Value: 6
  misc_feature: MA Experiment 20000173 PARAMETER Experiment Name: At_42deg_Heat_P Parameter: Tissue Value: Aerial
  misc_feature: MA Experiment ID: 20000182 Result: Up-regulated in Transcription
  misc_feature: MA Experiment 20000182 PARAMETER Experiment Name: At_2mM_SA_P Parameter: Age (day) Value: 14
  misc_feature: MA Experiment 20000182 PARAMETER Experiment Name: At_2mM_SA_P Parameter: Organism Value: A. thaliana
  misc_feature: MA Experiment 20000182 PARAMETER Experiment Name: At_2mM_SA_P Parameter: Plant Line Value: WS
  misc_feature: MA Experiment 20000182 PARAMETER Experiment Name: At_2mM_SA_P Parameter: Timepoint (hr) Value: 6
  misc_feature: MA Experiment 20000182 PARAMETER Experiment Name: At_2mM_SA_P Parameter: Tissue Value: Aerial
  misc_feature: MA Experiment 20000182 PARAMETER Experiment Name: At_2mM_SA_P Parameter: Treatment Value: 2mM SA vs. No Treatment
  misc_feature: MA Experiment ID: 20000184 Result: Down-regulated in Transcription
  misc_feature: MA Experiment 20000184 PARAMETER Experiment Name: At_Shoots__P Parameter: Age (day) Value: 7
  misc_feature: MA Experiment 20000184 PARAMETER Experiment Name: At_Shoots__P Parameter: Tissue Value: Shoots vs. Whole Plant
  misc_feature: MA Experiment ID: 20000234 Result: Down-regulated in Transcription
  misc_feature: MA Experiment 20000234 PARAMETER Experiment Name: At_Siliques_P Parameter: Age (day) Value: 21
  misc_feature: MA Experiment 20000234 PARAMETER Experiment Name: At_Siliques_P Parameter: Organism Value: A. thaliana
  misc_feature: MA Experiment 20000234 PARAMETER Experiment Name: At_Siliques_P Parameter: Plant Line Value: WS
  misc_feature: MA Experiment 20000234 PARAMETER Experiment Name: At_Siliques_P Parameter: Tissue Value: Less Than 5mm Siliques vs. Whole Plant
  misc_feature: MA Experiment ID: 20000265 Result: Down-regulated in Transcription
  misc_feature: MA Experiment 20000265 PARAMETER Experiment Name: At_Open_Flower_P Parameter: Age (day) Value: 21
  misc_feature: MA Experiment 20000265 PARAMETER Experiment Name: At_Open_Flower_P Parameter: Plant Line Value: WS
  misc_feature: MA Experiment 20000265 PARAMETER Experiment Name: At_Open_Flower_P Parameter: Tissue Value: Closed Flower vs. Whole Plant
  misc_feature: MA Experiment ID: 20000286 Result: Down-regulated in Transcription
  misc_feature: MA Experiment 20000286 PARAMETER Experiment Name: At_Open_Flower_P Parameter: Age (day) Value: 21
  misc_feature: MA Experiment 20000286 PARAMETER Experiment Name: At_Open_Flower_P Parameter: Plant Line Value: WS
  misc_feature: MA Experiment 20000286 PARAMETER Experiment Name: At_Open_Flower_P Parameter: Tissue Value: Half Open vs. Whole Plant
  misc_feature: MA Experiment ID: 20000436 Result: Up-regulated in Transcription
  misc_feature: MA Experiment 20000436 PARAMETER Experiment Name: At_Drought_P Parameter: Age (day) Value: 7
  misc_feature: MA Experiment 20000436 PARAMETER Experiment Name: At_Drought_P Parameter: Organism Value: A. thaliana
  misc_feature: MA Experiment 20000436 PARAMETER Experiment Name: At_Drought_P Parameter: Plant Line Value: WS
  misc_feature: MA Experiment 20000436 PARAMETER Experiment Name: At_Drought_P Parameter: Timepoint (hr) Value: 12
  misc_feature: MA Experiment 20000436 PARAMETER Experiment Name: At_Drought_P Parameter: Tissue Value: Whole Plant
  misc_feature: MA Experiment 20000436 PARAMETER Experiment Name: At_Drought_P Parameter: Treatment Value: Drought vs. No Drought
  misc_feature: MA Experiment ID: 20000437 Result: Up-regulated in Transcription
  misc_feature: MA Experiment 20000437 PARAMETER Experiment Name: At_Drought_P Parameter: Age (day) Value: 8
  misc_feature: MA Experiment 20000437 PARAMETER Experiment Name: At_Drought_P Parameter: Organism Value: A. thaliana
  misc_feature: MA Experiment 20000437 PARAMETER Experiment Name: At_Drought_P Parameter: Plant Line Value: WS
  misc_feature: MA Experiment 20000437 PARAMETER Experiment Name: At_Drought_P Parameter: Timepoint (hr) Value: 24
  misc_feature: MA Experiment 20000437 PARAMETER Experiment Name: At_Drought_P Parameter: Tissue Value: Whole Plant
  misc_feature: MA Experiment 20000437 PARAMETER Experiment Name: At_Drought_P Parameter: Treatment Value: Drought vs. No Drought
  misc_feature: MA Experiment ID: 20000438 Result: Down-regulated in Transcription
  misc_feature: MA Experiment 20000438 PARAMETER Experiment Name: At_Shoots__P Parameter: Age (day) Value: 14
  misc_feature: MA Experiment 20000438 PARAMETER Experiment Name: At_Shoots__P Parameter: Tissue Value: Shoots vs. Whole Plant
  misc_feature: MA Experiment ID: 20000495 Result: Down-regulated in Transcription
  misc_feature: MA Experiment 20000495 PARAMETER Experiment Name: At_Guard_Cells_P Parameter: Harvest Date Value: 8/2/2002
  misc_feature: MA Experiment 20000495 PARAMETER Experiment Name: At_Guard_Cells_P Parameter: Organism Value: A. thaliana
  misc_feature: MA Experiment 20000495 PARAMETER Experiment Name: At_Guard_Cells_P Parameter: Tissue Value: Guard Cells vs. Leaves
  misc_feature: MA Experiment ID: 20000794 Result: Up-regulated in Transcription
  misc_feature: MA Experiment 20000794 PARAMETER Experiment Name: At_Petals_P Parameter: Age (day) Value: 23-25 days
  misc_feature: MA Experiment 20000794 PARAMETER Experiment Name: At_Petals_P Parameter: Plant Line Value: WS
  misc_feature: MA Experiment 20000794 PARAMETER Experiment Name: At_Petals_P Parameter: Tissue Value: Petals vs. Whole plant
  misc_feature: MA Experiment ID: 20001554 Result: Up-regulated in Transcription
  misc_feature: MA Experiment 20001554 PARAMETER Experiment Name: At_Drought_Soil_Dry_P Parameter: Age (day) Value: 21
  misc_feature: MA Experiment 20001554 PARAMETER Experiment Name: At_Drought_Soil_Dry_P Parameter: Organism Value: A. thaliana
  misc_feature: MA Experiment 20001554 PARAMETER Experiment Name: At_Drought_Soil_Dry_P Parameter: Plant Line Value: WS
  misc_feature: MA Experiment 20001554 PARAMETER Experiment Name: At_Drought_Soil_Dry_P Parameter: Post Timepoint (hr) Value: None
  misc_feature: MA Experiment 20001554 PARAMETER Experiment Name: At_Drought_Soil_Dry_P Parameter: Post-Treatment Value: None
  misc_feature: MA Experiment 20001554 PARAMETER Experiment Name: At_Drought_Soil_Dry_P Parameter: Timepoint (day) Value: 7
  misc_feature: MA Experiment 20001554 PARAMETER Experiment Name: At_Drought_Soil_Dry_P Parameter: Treatment Value: Drought vs. No Drought
  misc_feature: MA Experiment ID: 20001555 Result: Up-regulated in Transcription
  misc_feature: MA Experiment 20001555 PARAMETER Experiment Name: At_Drought_Soil_Dry_P Parameter: Age (day) Value: 24
  misc_feature: MA Experiment 20001555 PARAMETER Experiment Name: At_Drought_Soil_Dry_P Parameter: Organism Value: A. thaliana
  misc_feature: MA Experiment 20001555 PARAMETER Experiment Name: At_Drought_Soil_Dry_P Parameter: Plant Line Value: WS
  misc_feature: MA Experiment 20001555 PARAMETER Experiment Name: At_Drought_Soil_Dry_P Parameter: Post Timepoint (hr) Value: None
  misc_feature: MA Experiment 20001555 PARAMETER Experiment Name: At_Drought_Soil_Dry_P Parameter: Post-Treatment Value: None
  misc_feature: MA Experiment 20001555 PARAMETER Experiment Name: At_Drought_Soil_Dry_P Parameter: Timepoint (day) Value: 10
  misc_feature: MA Experiment 20001555 PARAMETER Experiment Name: At_Drought_Soil_Dry_P Parameter: Treatment Value: Drought vs. No Drought
  misc_feature: MA Experiment ID: 20001904 Result: Up-regulated in Transcription
  misc_feature: MA Experiment 20001904 PARAMETER Experiment Name: At_Drought_Reproduction_P Parameter: Age (day) Value: 37
  misc_feature: MA Experiment 20001904 PARAMETER Experiment Name: At_Drought_Reproduction_P Parameter: Organism Value: A. thaliana
  misc_feature: MA Experiment 20001904 PARAMETER Experiment Name: At_Drought_Reproduction_P Parameter: Plant Line Value: WS
  misc_feature: MA Experiment 20001904 PARAMETER Experiment Name: At_Drought_Reproduction_P Parameter: Timepoint (day) Value: 7
  misc_feature: MA Experiment 20001904 PARAMETER Experiment Name: At_Drought_Reproduction_P Parameter: Tissue Value: Rosettes
  misc_feature: MA Experiment 20001904 PARAMETER Experiment Name: At_Drought_Reproduction_P Parameter: Treatment Value: Drought vs. No Drought
  misc_feature: MA Experiment ID: 20001905 Result: Up-regulated in Transcription
  misc_feature: MA Experiment 20001905 PARAMETER Experiment Name: At_Drought_Reproduction_P Parameter: Age (day) Value: 40
  misc_feature: MA Experiment 20001905 PARAMETER Experiment Name: At_Drought_Reproduction_P Parameter: Organism Value: A. thaliana
  misc_feature: MA Experiment 20001905 PARAMETER Experiment Name: At_Drought_Reproduction_P Parameter: Plant Line Value: WS
  misc_feature: MA Experiment 20001905 PARAMETER Experiment Name: At_Drought_Reproduction_P Parameter: Timepoint (day) Value: 10
  misc_feature: MA Experiment 20001905 PARAMETER Experiment Name: At_Drought_Reproduction_P Parameter: Tissue Value: Rosettes
  misc_feature: MA Experiment 20001905 PARAMETER Experiment Name: At_Drought_Reproduction_P Parameter: Treatment Value: Drought vs. No Drought
  misc_feature: MA Experiment ID: 20001906 Result: Up-regulated in Transcription
  misc_feature: MA Experiment 20001906 PARAMETER Experiment Name: At_Drought_Reproduction_P Parameter: Age (day) Value: 35
  misc_feature: MA Experiment 20001906 PARAMETER Experiment Name: At_Drought_Reproduction_P Parameter: Organism Value: A. thaliana
  misc_feature: MA Experiment 20001906 PARAMETER Experiment Name: At_Drought_Reproduction_P Parameter: Plant Line Value: WS
  misc_feature: MA Experiment 20001906 PARAMETER Experiment Name: At_Drought_Reproduction_P Parameter: Timepoint (day) Value: 5
  misc_feature: MA Experiment 20001906 PARAMETER Experiment Name: At_Drought_Reproduction_P Parameter: Tissue Value: Siliques
  misc_feature: MA Experiment 20001906 PARAMETER Experiment Name: At_Drought_Reproduction_P Parameter: Treatment Value: Drought vs. No Drought
  misc_feature: MA Experiment ID: 20001908 Result: Up-regulated in Transcription
  misc_feature: MA Experiment 20001908 PARAMETER Experiment Name: At_Drought_Reproduction_P Parameter: Age (day) Value: 40
  misc_feature: MA Experiment 20001908 PARAMETER Experiment Name: At_Drought_Reproduction_P Parameter: Organism Value: A. thaliana
  misc_feature: MA Experiment 20001908 PARAMETER Experiment Name: At_Drought_Reproduction_P Parameter: Plant Line Value: WS
  misc_feature: MA Experiment 20001908 PARAMETER Experiment Name: At_Drought_Reproduction_P Parameter: Timepoint (day) Value: 10
  misc_feature: MA Experiment 20001908 PARAMETER Experiment Name: At_Drought_Reproduction_P Parameter: Tissue Value: Siliques
  misc_feature: MA Experiment 20001908 PARAMETER Experiment Name: At_Drought_Reproduction_P Parameter: Treatment Value: Drought vs. No Drought
  misc_feature: MA Experiment ID: 20001911 Result: Up-regulated in Transcription
  misc_feature: MA Experiment 20001911 PARAMETER Experiment Name: At_Drought_Reproduction_P Parameter: Age (day) Value: 40
  misc_feature: MA Experiment 20001911 PARAMETER Experiment Name: At_Drought_Reproduction_P Parameter: Organism Value: A. thaliana
  misc_feature: MA Experiment 20001911 PARAMETER Experiment Name: At_Drought_Reproduction_P Parameter: Plant Line Value: WS
  misc_feature: MA Experiment 20001911 PARAMETER Experiment Name: At_Drought_Reproduction_P Parameter: Timepoint (day) Value: 10
  misc_feature: MA Experiment 20001911 PARAMETER Experiment Name: At_Drought_Reproduction_P Parameter: Tissue Value: Flowers
  misc_feature: MA Experiment 20001911 PARAMETER Experiment Name: At_Drought_Reproduction_P Parameter: Treatment Value: Drought vs. No Drought

SEQ ID NO: 34633 - protein, 383 aa, Arabidopsis thaliana; identical to SEQ ID NO: 31043
  peptide (1)..(383): Ceres Seq. ID no. 12322685
  misc_feature (76)..(341): Pfam Name: Protein phosphatase 2C Pfam Description: Protein phosphatase 2C
  misc_feature (50)..(383): Homolog of NCBI NO: 15224766 NR Description: protein phosphatase 2C (PP2C)
  misc_feature (71)..(383): Homolog of NCBI NO: 15226152 NR Description: protein phosphatase 2C (PP2C)
  misc_feature (72)..(382): Homolog of NCBI NO: 10140768 NR Description: putative protein phosphatase-2C [Oryza sativa]
  misc_feature (14)..(382): Homolog of NCBI NO: 37536524 NR Description: putative protein phosphatase-2C
  misc_feature (69)..(383): Homolog of NCBI NO: 30684431 NR Description: protein phosphatase 2C (PP2C) -related
  misc_feature (68)..(383): Homolog of NCBI NO: 15221047 NR Description: protein phosphatase-2C, putative; protein id:
  misc_feature (1)..(382): Homolog of NCBI NO: 34894410 NR Description: putative protein phosphatase
  misc_feature (24)..(383): Homolog of NCBI NO: 25352221 NR Description: phosphoprotein phosphatase (EC 3.1.3.16) 2C
  misc_feature (1)..(383): Homolog of NCBI NO: 30695577 NR Description: protein phosphatase 2C (PP2C), putative
  misc_feature (1)..(383): Homolog of NCBI NO: 15228717 NR Description: protein phosphatase 2C (PP2C)

SEQ ID NO: 34634 - protein, 294 aa, Arabidopsis thaliana; identical to SEQ ID NO: 31044
  peptide (1)..(294): Ceres Seq. ID no. 12322686
  misc_feature (1)..(252): Pfam Name: Protein phosphatase 2C Pfam Description: Protein phosphatase 2C
  misc_feature (1)..(294): Homolog of NCBI NO: 15224766 NR Description: protein phosphatase 2C (PP2C)
  misc_feature (1)..(294): Homolog of NCBI NO: 15226152 NR Description: protein phosphatase 2C (PP2C)
  misc_feature (1)..(293): Homolog of NCBI NO: 10140768 NR Description: putative protein phosphatase-2C [Oryza sativa]
  misc_feature (1)..(293): Homolog of NCBI NO: 37536524 NR Description: putative protein phosphatase-2C
  misc_feature (1)..(294): Homolog of NCBI NO: 30684431 NR Description: protein phosphatase 2C (PP2C) -related
  misc_feature (1)..(294): Homolog of NCBI NO: 15221047 NR Description: protein phosphatase-2C, putative; protein id:
  misc_feature (1)..(293): Homolog of NCBI NO: 34894410 NR Description: putative protein phosphatase
  misc_feature (1)..(294): Homolog of NCBI NO: 25352221 NR Description: phosphoprotein phosphatase (EC 3.1.3.16) 2C
  misc_feature (1)..(294): Homolog of NCBI NO: 30695577 NR Description: protein phosphatase 2C (PP2C), putative
  misc_feature (1)..(294): Homolog of NCBI NO: 15228717 NR Description: protein phosphatase 2C (PP2C)

SEQ ID NO: 34635 - DNA, 860 bp, Arabidopsis thaliana; identical to SEQ ID NO: 31045
  misc_feature (1)..(860): Ceres Seq. ID no. 13591956
  misc_feature: MA Experiment ID: 108561 Result: Down-regulated in Transcription
  misc_feature: MA Experiment 108561 PARAMETER Experiment Name: At_100uM_ABA_cDNA_P Parameter: Timepoint (hr) Value: 6
  misc_feature: MA Experiment 108561 PARAMETER Experiment Name: At_100uM_ABA_cDNA_P Parameter: Tissue Value: Aerial
  misc_feature: MA Experiment 108561 PARAMETER Experiment Name: At_100uM_ABA_cDNA_P Parameter: Treatment Value: 100uM ABA vs. No Treatment
  misc_feature: MA Experiment ID: 108572 Result: Down-regulated in Transcription
  misc_feature: MA Experiment 108572 PARAMETER Experiment Name: At_Drought_cDNA_P Parameter: Timepoint (hr) Value: 1
  misc_feature: MA Experiment 108572 PARAMETER Experiment Name: At_Drought_cDNA_P Parameter: Tissue Value: Aerial
  misc_feature: MA Experiment 108572 PARAMETER Experiment Name: At_Drought_cDNA_P Parameter: Treatment Value: Drought vs. No Drought
  misc_feature: MA Experiment ID: 108573 Result: Down-regulated in Transcription
  misc_feature: MA Experiment 108573 PARAMETER Experiment Name: At_Drought_cDNA_P Parameter: Timepoint (hr) Value: 6
  misc_feature: MA Experiment 108573 PARAMETER Experiment Name: At_Drought_cDNA_P Parameter: Tissue Value: Aerial
  misc_feature: MA Experiment 108573 PARAMETER Experiment Name: At_Drought_cDNA_P Parameter: Treatment Value: Drought vs. No Drought
  misc_feature: MA Experiment ID: 108577 Result: Down-regulated in Transcription
  misc_feature: MA Experiment 108577 PARAMETER Experiment Name: At_42deg_Heat_cDNA_P Parameter: Temperature (deg C) Value: 42 vs. 22
  misc_feature: MA Experiment 108577 PARAMETER Experiment Name: At_42deg_Heat_cDNA_P Parameter: Timepoint (hr) Value: 6
  misc_feature: MA Experiment 108577 PARAMETER Experiment Name: At_42deg_Heat_cDNA_P Parameter: Tissue Value: Aerial
  misc_feature: MA Experiment ID: 108595 Result: Down-regulated in Transcription
  misc_feature: MA Experiment 108595 PARAMETER Experiment Name: At_Ler-pi_Ovule_cDNA_P Parameter: Plant Line Value: null
  misc_feature: MA Experiment ID: 20000173 Result: Down-regulated in Transcription
  misc_feature: MA Experiment 20000173 PARAMETER Experiment Name: At_42deg_Heat_P Parameter: Age (day) Value: 14
  misc_feature: MA Experiment 20000173 PARAMETER Experiment Name: At_42deg_Heat_P Parameter: Organism Value: A. thaliana
  misc_feature: MA Experiment 20000173 PARAMETER Experiment Name: At_42deg_Heat_P Parameter: Plant Line Value: WS
  misc_feature: MA Experiment 20000173 PARAMETER Experiment Name: At_42deg_Heat_P Parameter: Temperature (deg C) Value: 42 vs. 22
  misc_feature: MA Experiment 20000173 PARAMETER Experiment Name: At_42deg_Heat_P Parameter: Timepoint (hr) Value: 6
  misc_feature: MA Experiment 20000173 PARAMETER Experiment Name: At_42deg_Heat_P Parameter: Tissue Value: Aerial
  misc_feature: MA Experiment ID: 20000179 Result: Down-regulated in Transcription
  misc_feature: MA Experiment 20000179 PARAMETER Experiment Name: At_Germinating_Seeds_P Parameter: Age (hr) Value: 6 vs. 0
  misc_feature: MA Experiment 20000179 PARAMETER Experiment Name: At_Germinating_Seeds_P Parameter: Tissue Value: Germinating Seeds
  misc_feature: MA Experiment ID: 20000185 Result: Down-regulated in Transcription
  misc_feature: MA Experiment 20000185 PARAMETER Experiment Name: At_Roots__P Parameter: Age (day) Value: 7 vs. 21
  misc_feature: MA Experiment 20000185 PARAMETER Experiment Name: At_Roots__P Parameter: Organism Value: A. thaliana
  misc_feature: MA Experiment 20000185 PARAMETER Experiment Name: At_Roots__P Parameter: Tissue Value: Roots vs. Whole Plant
  misc_feature: MA Experiment ID: 20000264 Result: Down-regulated in Transcription
  misc_feature: MA Experiment 20000264 PARAMETER Experiment Name: At_Open_Flower_P Parameter: Age (day) Value: 21
  misc_feature: MA Experiment 20000264 PARAMETER Experiment Name: At_Open_Flower_P Parameter: Plant Line Value: WS
  misc_feature: MA Experiment 20000264 PARAMETER Experiment Name: At_Open_Flower_P Parameter: Tissue Value: Open Flower vs. Whole Plant
  misc_feature: MA Experiment ID: 20000268 Result: Down-regulated in Transcription
  misc_feature: MA Experiment 20000268 PARAMETER Experiment Name: At_100mM_NaCl__P Parameter: Age (day) Value: 14
  misc_feature: MA Experiment 20000268 PARAMETER Experiment Name: At_100mM_NaCl__P Parameter: Organism Value: A. thaliana
  misc_feature: MA Experiment 20000268 PARAMETER Experiment Name: At_100mM_NaCl__P Parameter: Plant Line Value: WS
  misc_feature: MA Experiment 20000268 PARAMETER Experiment Name: At_100mM_NaCl__P Parameter: Timepoint (hr) Value: 6
  misc_feature: MA Experiment 20000268 PARAMETER Experiment Name: At_100mM_NaCl__P Parameter: Tissue Value: Whole Plant
  misc_feature: MA Experiment 20000268 PARAMETER Experiment Name: At_100mM_NaCl__P Parameter: Treatment Value: 100mM NaCl vs. No Treatment
  misc_feature: MA Experiment ID: 20000286 Result: Down-regulated in Transcription
  misc_feature: MA Experiment 20000286 PARAMETER Experiment Name: At_Open_Flower_P Parameter: Age (day) Value: 21
  misc_feature: MA Experiment 20000286 PARAMETER Experiment Name: At_Open_Flower_P Parameter: Plant Line Value: WS
  misc_feature: MA Experiment 20000286 PARAMETER Experiment Name: At_Open_Flower_P Parameter: Tissue Value: Half Open vs. Whole Plant
  misc_feature: MA Experiment ID: 20000436 Result: Down-regulated in Transcription
  misc_feature: MA Experiment 20000436 PARAMETER Experiment Name: At_Drought_P Parameter: Age (day) Value: 7
  misc_feature: MA Experiment 20000436 PARAMETER Experiment Name: At_Drought_P Parameter: Organism Value: A. thaliana
  misc_feature: MA Experiment 20000436 PARAMETER Experiment Name: At_Drought_P Parameter: Plant Line Value: WS
  misc_feature: MA Experiment 20000436 PARAMETER Experiment Name: At_Drought_P Parameter: Timepoint (hr) Value: 12
  misc_feature: MA Experiment 20000436 PARAMETER Experiment Name: At_Drought_P Parameter: Tissue Value: Whole Plant
  misc_feature: MA Experiment 20000436 PARAMETER Experiment Name: At_Drought_P Parameter: Treatment Value: Drought vs. No Drought
  misc_feature: MA Experiment ID: 20000437 Result: Down-regulated in Transcription
  misc_feature: MA Experiment 20000437 PARAMETER Experiment Name: At_Drought_P Parameter: Age (day) Value: 8
  misc_feature: MA Experiment 20000437 PARAMETER Experiment Name: At_Drought_P Parameter: Organism Value: A. thaliana
  misc_feature: MA Experiment 20000437 PARAMETER Experiment Name: At_Drought_P Parameter: Plant Line Value: WS
  misc_feature: MA Experiment 20000437 PARAMETER Experiment Name: At_Drought_P Parameter: Timepoint (hr) Value: 24
  misc_feature: MA Experiment 20000437 PARAMETER Experiment Name: At_Drought_P Parameter: Tissue Value: Whole Plant
  misc_feature: MA Experiment 20000437 PARAMETER Experiment Name: At_Drought_P Parameter: Treatment Value: Drought vs. No Drought
  misc_feature: MA Experiment ID: 20000439 Result: Down-regulated in Transcription
  misc_feature: MA Experiment 20000439 PARAMETER Experiment Name: At_Roots__P Parameter: Age (day) Value: 14 vs. 21
  misc_feature: MA Experiment 20000439 PARAMETER Experiment Name: At_Roots__P Parameter: Organism Value: A. thaliana
  misc_feature: MA Experiment 20000439 PARAMETER Experiment Name: At_Roots__P Parameter: Tissue Value: Roots vs. Whole Plant
  misc_feature: MA Experiment ID: 20000794 Result: Down-regulated in Transcription
  misc_feature: MA Experiment 20000794 PARAMETER Experiment Name: At_Petals_P Parameter: Age (day) Value: 23-25 days
  misc_feature: MA Experiment 20000794 PARAMETER Experiment Name: At_Petals_P Parameter: Plant Line Value: WS
  misc_feature: MA Experiment 20000794 PARAMETER Experiment Name: At_Petals_P Parameter: Tissue Value: Petals vs. Whole plant
  misc_feature: MA Experiment ID: 20001554 Result: Down-regulated in Transcription
  misc_feature: MA Experiment 20001554 PARAMETER Experiment Name: At_Drought_Soil_Dry_P Parameter: Age (day) Value: 21
  misc_feature: MA Experiment 20001554 PARAMETER Experiment Name: At_Drought_Soil_Dry_P Parameter: Organism Value: A. thaliana
  misc_feature: MA Experiment 20001554 PARAMETER Experiment Name: At_Drought_Soil_Dry_P Parameter: Plant Line Value: WS
  misc_feature: MA Experiment 20001554 PARAMETER Experiment Name: At_Drought_Soil_Dry_P Parameter: Post Timepoint (hr) Value: None
  misc_feature: MA Experiment 20001554 PARAMETER Experiment Name: At_Drought_Soil_Dry_P Parameter: Post-Treatment Value: None
  misc_feature: MA Experiment 20001554 PARAMETER Experiment Name: At_Drought_Soil_Dry_P Parameter: Timepoint (day) Value: 7
  misc_feature: MA Experiment 20001554 PARAMETER Experiment Name: At_Drought_Soil_Dry_P Parameter: Treatment Value: Drought vs. No Drought
  misc_feature: MA Experiment ID: 20001555 Result: Down-regulated in Transcription
  misc_feature: MA Experiment 20001555 PARAMETER Experiment Name: At_Drought_Soil_Dry_P Parameter: Age (day) Value: 24
  misc_feature: MA Experiment 20001555 PARAMETER Experiment Name: At_Drought_Soil_Dry_P Parameter: Organism Value: A. thaliana
  misc_feature: MA Experiment 20001555 PARAMETER Experiment Name: At_Drought_Soil_Dry_P Parameter: Plant Line Value: WS
  misc_feature: MA Experiment 20001555 PARAMETER Experiment Name: At_Drought_Soil_Dry_P Parameter: Post Timepoint (hr) Value: None
  misc_feature: MA Experiment 20001555 PARAMETER Experiment Name: At_Drought_Soil_Dry_P Parameter: Post-Treatment Value: None
  misc_feature: MA Experiment 20001555 PARAMETER Experiment Name: At_Drought_Soil_Dry_P Parameter: Timepoint (day) Value: 10
  misc_feature: MA Experiment 20001555 PARAMETER Experiment Name: At_Drought_Soil_Dry_P Parameter: Treatment Value: Drought vs. No Drought
  misc_feature: MA Experiment ID: 20001556 Result: Down-regulated in Transcription
  misc_feature: MA Experiment 20001556 PARAMETER Experiment Name: At_Drought_Soil_Dry_P Parameter: Age (day) Value: 26
  misc_feature: MA Experiment 20001556 PARAMETER Experiment Name: At_Drought_Soil_Dry_P Parameter: Organism Value: A. thaliana
  misc_feature: MA Experiment 20001556 PARAMETER Experiment Name: At_Drought_Soil_Dry_P Parameter: Plant Line Value: WS
  misc_feature: MA Experiment 20001556 PARAMETER Experiment Name: At_Drought_Soil_Dry_P Parameter: Post Timepoint (hr) Value: None
  misc_feature: MA Experiment 20001556 PARAMETER Experiment Name: At_Drought_Soil_Dry_P Parameter: Post-Treatment Value: None
  misc_feature: MA Experiment 20001556 PARAMETER Experiment Name: At_Drought_Soil_Dry_P Parameter: Timepoint (day) Value: 12
  misc_feature: MA Experiment 20001556 PARAMETER Experiment Name: At_Drought_Soil_Dry_P Parameter: Treatment Value: Drought vs. No Drought
  misc_feature: MA Experiment ID: 20001557 Result: Up-regulated in Transcription
  misc_feature: MA Experiment 20001557 PARAMETER Experiment Name: At_Drought_Soil_Dry_P Parameter: Age (day) Value: 27
  misc_feature: MA Experiment 20001557 PARAMETER Experiment Name: At_Drought_Soil_Dry_P Parameter: Organism Value: A. thaliana
  misc_feature: MA Experiment 20001557 PARAMETER Experiment Name: At_Drought_Soil_Dry_P Parameter: Plant Line Value: WS
  misc_feature: MA Experiment 20001557 PARAMETER Experiment Name: At_Drought_Soil_Dry_P Parameter: Post Timepoint (hr) Value: 3
  misc_feature: MA Experiment 20001557 PARAMETER Experiment Name: At_Drought_Soil_Dry_P Parameter: Post-Treatment Value: Re-Water vs. No Drought
  misc_feature: MA Experiment 20001557 PARAMETER Experiment Name: At_Drought_Soil_Dry_P Parameter: Timepoint (day) Value: 13
  misc_feature: MA Experiment 20001557 PARAMETER Experiment Name: At_Drought_Soil_Dry_P Parameter: Treatment Value: Drought vs. No Drought
  misc_feature: MA Experiment ID: 20001756 Result: Up-regulated in Transcription
  misc_feature: MA Experiment 20001756 PARAMETER Experiment Name: At_50mM_NH4NO3_L-to-H_P Parameter: Timepoint (hr) Value: 4
  misc_feature: MA Experiment 20001756 PARAMETER Experiment Name: At_50mM_NH4NO3_L-to-H_P Parameter: Tissue Value: Leaf
  misc_feature: MA Experiment 20001756 PARAMETER Experiment Name: At_50mM_NH4NO3_L-to-H_P Parameter: Treatment Value: 50mM NH4NO3 vs 100mM Mannitol
  misc_feature: MA Experiment ID: 20001757 Result: Up-regulated in Transcription
  misc_feature: MA Experiment 20001757 PARAMETER Experiment Name: At_50mM_NH4NO3_L-to-H_P Parameter: Timepoint (hr) Value: 6
  misc_feature: MA Experiment 20001757 PARAMETER Experiment Name: At_50mM_NH4NO3_L-to-H_P Parameter: Tissue Value: Leaf
  misc_feature: MA Experiment 20001757 PARAMETER Experiment Name: At_50mM_NH4NO3_L-to-H_P Parameter: Treatment Value: 50mM NH4NO3 vs 100mM Mannitol
  misc_feature: MA Experiment ID: 20001904 Result: Down-regulated in Transcription
  misc_feature: MA Experiment 20001904 PARAMETER Experiment Name: At_Drought_Reproduction_P Parameter: Age (day) Value: 37
  misc_feature: MA Experiment 20001904 PARAMETER Experiment Name: At_Drought_Reproduction_P Parameter: Organism Value: A. thaliana
  misc_feature: MA Experiment 20001904 PARAMETER Experiment Name: At_Drought_Reproduction_P Parameter: Plant Line Value: WS
  misc_feature: MA Experiment 20001904 PARAMETER Experiment Name: At_Drought_Reproduction_P Parameter: Timepoint (day) Value: 7
  misc_feature: MA Experiment 20001904 PARAMETER Experiment Name: At_Drought_Reproduction_P Parameter: Tissue Value: Rosettes
  misc_feature: MA Experiment 20001904 PARAMETER Experiment Name: At_Drought_Reproduction_P Parameter: Treatment Value: Drought vs. No Drought
  misc_feature: MA Experiment ID: 20001906 Result: Down-regulated in Transcription
  misc_feature: MA Experiment 20001906 PARAMETER Experiment Name: At_Drought_Reproduction_P Parameter: Age (day) Value: 35
  misc_feature: MA Experiment 20001906 PARAMETER Experiment Name: At_Drought_Reproduction_P Parameter: Organism Value: A. thaliana
  misc_feature: MA Experiment 20001906 PARAMETER Experiment Name: At_Drought_Reproduction_P Parameter: Plant Line Value: WS
  misc_feature: MA Experiment 20001906 PARAMETER Experiment Name: At_Drought_Reproduction_P Parameter: Timepoint (day) Value: 5
  misc_feature: MA Experiment 20001906 PARAMETER Experiment Name: At_Drought_Reproduction_P Parameter: Tissue Value: Siliques
  misc_feature: MA Experiment 20001906 PARAMETER Experiment Name: At_Drought_Reproduction_P Parameter: Treatment Value: Drought vs. No Drought

SEQ ID NO: 34636 - protein, 208 aa, Arabidopsis thaliana; identical to SEQ ID NO: 23207
  peptide (1)..(208): Ceres Seq. ID no. 13591957
  misc_feature (52)..(198): Pfam Name: Cupin Pfam Description: Cupin
  misc_feature (52)..(198): Pfam Name: Cupin Pfam Description: Cupin
  misc_feature (52)..(198): Pfam Name: Cupin Pfam Description: Cupin
  misc_feature (52)..(198): Pfam Name: Cupin Pfam Description: Cupin
  misc_feature (6)..(207): Homolog of NCBI NO: 18201941 NR Description: Auxin-binding protein ABP19b precursor
  misc_feature (1)..(207): Homolog of NCBI NO: 15242028 NR Description: germin-like protein (AtGER3) [Arabidopsis
  misc_feature (6)..(207): Homolog of NCBI NO: 18203684 NR Description: Auxin-binding protein ABP19a precursor
  misc_feature (5)..(207): Homolog of NCBI NO: 18201940 NR Description: Auxin-binding protein ABP20 precursor
  misc_feature (1)..(208): Homolog of NCBI NO: 13277342 NR Description: Germin-like protein [Pisum sativum]
  misc_feature (6)..(207): Homolog of NCBI NO: 18201941 NR Description: Auxin-binding protein ABP19b precursor
  misc_feature (6)..(207): Homolog of NCBI NO: 18203684 NR Description: Auxin-binding protein ABP19a precursor
  misc_feature (1)..(208): Homolog of NCBI NO: 13277342 NR Description: Germin-like protein [Pisum sativum]
  misc_feature (5)..(207): Homolog of NCBI NO: 18201940 NR Description: Auxin-binding protein ABP20 precursor
  misc_feature (6)..(207): Homolog of NCBI NO: 18203684 NR Description: Auxin-binding protein ABP19a precursor
  misc_feature (1)..(207): Homolog of NCBI NO: 15242028 NR Description: germin-like protein (AtGER3) [Arabidopsis
  misc_feature (6)..(207): Homolog of NCBI NO: 18201941 NR Description: Auxin-binding protein ABP19b precursor
  misc_feature (1)..(208): Homolog of NCBI NO: 15218535 NR Description: germin-like protein (AtGER1) [Arabidopsis
  misc_feature (1)..(208): Homolog of NCBI NO: 17473703 NR Description: germin-like protein [Arabidopsis thaliana]
  misc_feature (1)..(208): Homolog of NCBI NO: 1592672 NR Description: germin1 [Arabidopsis thaliana]
  misc_feature (5)..(208): Homolog of NCBI NO: 1934726 NR Description: germin-like protein [Arabidopsis thaliana]
  misc_feature (1)..(208): Homolog of NCBI NO: 1169941 NR Description: Germin-like protein 1 precursor
  misc_feature (1)..(208): Homolog of NCBI NO: 15218535 NR Description: germin-like protein (AtGER1) [Arabidopsis
  misc_feature (1)..(208): Homolog of NCBI NO: 17473703 NR Description: germin-like protein [Arabidopsis thaliana]
  misc_feature (1)..(208): Homolog of NCBI NO: 1592672 NR Description: germin1 [Arabidopsis thaliana]
  misc_feature (5)..(208): Homolog of NCBI NO: 1934726 NR Description: germin-like protein [Arabidopsis thaliana]
  misc_feature (1)..(208): Homolog of NCBI NO: 1169941 NR Description: Germin-like protein 1 precursor
  misc_feature (1)..(208): Homolog of NCBI NO: 13277342 NR Description: Germin-like protein [Pisum sativum]
  misc_feature (5)..(207): Homolog of NCBI NO: 18201940 NR Description: Auxin-binding protein ABP20 precursor
  misc_feature (6)..(207): Homolog of NCBI NO: 18203684 NR Description: Auxin-binding protein ABP19a precursor
  misc_feature (1)..(207): Homolog of NCBI NO: 15242028 NR Description: germin-like protein (AtGER3) [Arabidopsis
  misc_feature (6)..(207): Homolog of NCBI NO: 18201941 NR Description: Auxin-binding protein ABP19b precursor
  misc_feature (1)..(208): Homolog of NCBI NO: 15218535 NR Description: germin-like protein (AtGER1) [Arabidopsis
  misc_feature (1)..(208): Homolog of NCBI NO: 17473703 NR Description: germin-like protein [Arabidopsis thaliana]
  misc_feature (1)..(208): Homolog of NCBI NO: 1592672 NR Description: germin1 [Arabidopsis thaliana]
  misc_feature (5)..(208): Homolog of NCBI NO: 1934726 NR Description: germin-like protein [Arabidopsis thaliana]
  misc_feature (1)..(208): Homolog of NCBI NO: 1169941 NR Description: Germin-like protein 1 precursor
  misc_feature (1)..(208): Homolog of NCBI NO: 13277342 NR Description: Germin-like protein [Pisum sativum]
  misc_feature (5)..(207): Homolog of NCBI NO: 18201940 NR Description: Auxin-binding protein ABP20 precursor
  misc_feature (1)..(207): Homolog of NCBI NO: 15242028 NR Description: germin-like protein (AtGER3) [Arabidopsis
  misc_feature (1)..(208): Homolog of NCBI NO: 1169941 NR Description: Germin-like protein 1 precursor
  misc_feature (5)..(208): Homolog of NCBI NO: 1934726 NR Description: germin-like protein [Arabidopsis thaliana]
  misc_feature (1)..(208): Homolog of NCBI NO: 1592672 NR Description: germin1 [Arabidopsis thaliana]
  misc_feature (1)..(208): Homolog of NCBI NO: 17473703 NR Description: germin-like protein [Arabidopsis thaliana]
  misc_feature (1)..(208): Homolog of NCBI NO: 15218535 NR Description: germin-like protein (AtGER1) [Arabidopsis

SEQ ID NO: 34637 - protein, 110 aa, Arabidopsis thaliana; identical to SEQ ID NO: 31047
  peptide (1)..(110): Ceres Seq. ID no. 13591958
  misc_feature (1)..(100): Pfam Name: Cupin Pfam Description: Cupin
  misc_feature (1)..(100): Pfam Name: Cupin Pfam Description: Cupin
  misc_feature (1)..(100): Pfam Name: Cupin Pfam Description: Cupin
  misc_feature (1)..(100): Pfam Name: Cupin Pfam Description: Cupin
  misc_feature (1)..(109): Homolog of NCBI NO: 18201941 NR Description: Auxin-binding protein ABP19b precursor
  misc_feature (1)..(109): Homolog of NCBI NO: 15242028 NR Description: germin-like protein (AtGER3) [Arabidopsis
  misc_feature (1)..(109): Homolog of NCBI NO: 18203684 NR Description: Auxin-binding protein ABP19a precursor
  misc_feature (1)..(109): Homolog of NCBI NO: 18201940 NR Description: Auxin-binding protein ABP20 precursor
  misc_feature (1)..(110): Homolog of NCBI NO: 13277342 NR Description: Germin-like protein [Pisum sativum]
  misc_feature (1)..(109): Homolog of NCBI NO: 18201941 NR Description: Auxin-binding protein ABP19b precursor
  misc_feature (1)..(109): Homolog of NCBI NO: 18203684 NR Description: Auxin-binding protein ABP19a precursor
  misc_feature (1)..(110): Homolog of NCBI NO: 13277342 NR Description: Germin-like protein [Pisum sativum]
  misc_feature (1)..(109): Homolog of NCBI NO: 18201940 NR Description: Auxin-binding protein ABP20 precursor
  misc_feature (1)..(109): Homolog of NCBI NO: 18203684 NR Description: Auxin-binding protein ABP19a precursor
  misc_feature (1)..(109): Homolog of NCBI NO: 15242028 NR Description: germin-like protein (AtGER3) [Arabidopsis
  misc_feature (1)..(109): Homolog of NCBI NO: 18201941 NR Description: Auxin-binding protein ABP19b precursor
  misc_feature (1)..(110): Homolog of NCBI NO: 15218535 NR Description: germin-like protein (AtGER1) [Arabidopsis
  misc_feature (1)..(110): Homolog of NCBI NO: 17473703 NR Description: germin-like protein [Arabidopsis thaliana]
  misc_feature (1)..(110): Homolog of NCBI NO: 1592672 NR Description: germin1 [Arabidopsis thaliana]
  misc_feature (1)..(110): Homolog of NCBI NO: 1934726 NR Description: germin-like protein [Arabidopsis thaliana]
  misc_feature (1)..(110): Homolog of NCBI NO: 1169941 NR Description: Germin-like protein 1 precursor
  misc_feature (1)..(110): Homolog of NCBI NO: 15218535 NR Description: germin-like protein (AtGER1) [Arabidopsis
  misc_feature (1)..(110): Homolog of NCBI NO: 17473703 NR Description: germin-like protein [Arabidopsis thaliana]
  misc_feature (1)..(110): Homolog of NCBI NO: 1592672 NR Description: germin1 [Arabidopsis thaliana]
  misc_feature (1)..(110): Homolog of NCBI NO: 1934726 NR Description: germin-like protein [Arabidopsis thaliana]
  misc_feature (1)..(110): Homolog of NCBI NO: 1169941 NR Description: Germin-like protein 1 precursor
  misc_feature (1)..(110): Homolog of NCBI NO: 13277342 NR Description: Germin-like protein [Pisum sativum]
  misc_feature (1)..(109): Homolog of NCBI NO: 18201940 NR Description: Auxin-binding protein ABP20 precursor
  misc_feature (1)..(109): Homolog of NCBI NO: 18203684 NR Description: Auxin-binding protein ABP19a precursor
  misc_feature (1)..(109): Homolog of NCBI NO: 15242028 NR Description: germin-like protein (AtGER3) [Arabidopsis
  misc_feature (1)..(109): Homolog of NCBI NO: 18201941 NR Description: Auxin-binding protein ABP19b precursor
  misc_feature (1)..(110): Homolog of NCBI NO: 15218535 NR Description: germin-like protein (AtGER1) [Arabidopsis
  misc_feature (1)..(110): Homolog of NCBI NO: 17473703 NR Description: germin-like protein [Arabidopsis thaliana]
  misc_feature (1)..(110): Homolog of NCBI NO: 1592672 NR Description: germin1 [Arabidopsis thaliana]
  misc_feature (1)..(110): Homolog of NCBI NO: 1934726 NR Description: germin-like protein [Arabidopsis thaliana]
  misc_feature (1)..(110): Homolog of NCBI NO: 1169941 NR Description: Germin-like protein 1 precursor
  misc_feature (1)..(110): Homolog of NCBI NO: 13277342 NR Description: Germin-like protein [Pisum sativum]
  misc_feature (1)..(109): Homolog of NCBI NO: 18201940 NR Description: Auxin-binding protein ABP20 precursor
  misc_feature (1)..(109): Homolog of NCBI NO: 15242028 NR Description: germin-like protein (AtGER3) [Arabidopsis
  misc_feature (1)..(110): Homolog of NCBI NO: 1169941 NR Description: Germin-like protein 1 precursor
  misc_feature (1)..(110): Homolog of NCBI NO: 1934726 NR Description: germin-like protein [Arabidopsis thaliana]
  misc_feature (1)..(110): Homolog of NCBI NO: 1592672 NR Description: germin1 [Arabidopsis thaliana]
  misc_feature (1)..(110): Homolog of NCBI NO: 17473703 NR Description: germin-like protein [Arabidopsis thaliana]
  misc_feature (1)..(110): Homolog of NCBI NO: 15218535 NR Description: germin-like protein (AtGER1) [Arabidopsis

SEQ ID NO: 34638 - DNA, 1720 bp, Arabidopsis thaliana; identical to SEQ ID NO: 31048
  misc_feature (1)..(1720): Ceres Seq. ID no. 12579466
  misc_feature: MA Experiment ID: 108434 Result: Down-regulated in Transcription
  misc_feature: MA Experiment 108434 PARAMETER Experiment Name: At_Root_Tips_cDNA_P Parameter: Tissue Value: Root Tips
  misc_feature: MA Experiment ID: 108435 Result: Down-regulated in Transcription
  misc_feature: MA Experiment 108435 PARAMETER Experiment Name: At_stm_Mutants_cDNA_P Parameter: Plant Line Value: wt Landsburg vs stm
  misc_feature: MA Experiment 108435 PARAMETER Experiment Name: At_stm_Mutants_cDNA_P Parameter: Tissue Value: Shoot Apical Meristem Region
  misc_feature: MA Experiment ID: 108461 Result: Up-regulated in Transcription
  misc_feature: MA Experiment 108461 PARAMETER Experiment Name: At_Germinating_Seeds_cDNA_P Parameter: Age (day) Value: 1 vs. 0
  misc_feature: MA Experiment 108461 PARAMETER Experiment Name: At_Germinating_Seeds_cDNA_P Parameter: Tissue Value: Germinating Seeds
  misc_feature: MA Experiment ID: 108462 Result: Up-regulated in Transcription
  misc_feature: MA Experiment 108462 PARAMETER Experiment Name: At_Germinating_Seeds_cDNA_P Parameter: Age (day) Value: 2 vs. 0
  misc_feature: MA Experiment 108462 PARAMETER Experiment Name: At_Germinating_Seeds_cDNA_P Parameter: Tissue Value: Germinating Seeds
  misc_feature: MA Experiment ID: 108464 Result: Up-regulated in Transcription
  misc_feature: MA Experiment 108464 PARAMETER Experiment Name: At_Germinating_Seeds_cDNA_P Parameter: Age (day) Value: 4 vs. 0
  misc_feature: MA Experiment 108464 PARAMETER Experiment Name: At_Germinating_Seeds_cDNA_P Parameter: Tissue Value: Germinating Seeds
  misc_feature: MA Experiment ID: 108488 Result: Up-regulated in Transcription
  misc_feature: MA Experiment ID: 108595 Result: Down-regulated in Transcription
  misc_feature: MA Experiment 108595 PARAMETER Experiment Name: At_Ler-pi_Ovule_cDNA_P Parameter: Plant Line Value: null
  misc_feature: MA Experiment ID: 20000087 Result: Down-regulated in Transcription
  misc_feature: MA Experiment 20000087 PARAMETER Experiment Name: At_100uM_ABA_Mutants_cDNA_P Parameter: Plant Line Value: WS
  misc_feature: MA Experiment 20000087 PARAMETER Experiment Name: At_100uM_ABA_Mutants_cDNA_P Parameter: Timepoint (hr) Value: 6
  misc_feature: MA Experiment 20000087 PARAMETER Experiment Name: At_100uM_ABA_Mutants_cDNA_P Parameter: Tissue Value: Aerial
  misc_feature: MA Experiment 20000087 PARAMETER Experiment Name: At_100uM_ABA_Mutants_cDNA_P Parameter: Treatment Value: 100uM ABA vs. No Treatment
  misc_feature: MA Experiment ID: 20000184 Result: Up-regulated in Transcription
  misc_feature: MA Experiment 20000184 PARAMETER Experiment Name: At_Shoots__P Parameter: Age (day) Value: 7
  misc_feature: MA Experiment 20000184 PARAMETER Experiment Name: At_Shoots__P Parameter: Tissue Value: Shoots vs. Whole Plant
  misc_feature: MA Experiment ID: 20000185 Result: Down-regulated in Transcription
  misc_feature: MA Experiment 20000185 PARAMETER Experiment Name: At_Roots__P Parameter: Age (day) Value: 7 vs. 21
  misc_feature: MA Experiment 20000185 PARAMETER Experiment Name: At_Roots__P Parameter: Organism Value: A. thaliana
  misc_feature: MA Experiment 20000185 PARAMETER Experiment Name: At_Roots__P Parameter: Tissue Value: Roots vs. Whole Plant
  misc_feature: MA Experiment ID: 20000286 Result: Down-regulated in Transcription
  misc_feature: MA Experiment 20000286 PARAMETER Experiment Name: At_Open_Flower_P Parameter: Age (day) Value: 21
  misc_feature: MA Experiment 20000286 PARAMETER Experiment Name: At_Open_Flower_P Parameter: Plant Line Value: WS
  misc_feature: MA Experiment 20000286 PARAMETER Experiment Name: At_Open_Flower_P Parameter: Tissue Value: Half Open vs. Whole Plant
  misc_feature: MA Experiment ID: 20000437 Result: Down-regulated in Transcription
  misc_feature: MA Experiment 20000437 PARAMETER Experiment Name: At_Drought_P Parameter: Age (day) Value: 8
  misc_feature: MA Experiment 20000437 PARAMETER Experiment Name: At_Drought_P Parameter: Organism Value: A. thaliana
  misc_feature: MA Experiment 20000437 PARAMETER Experiment Name: At_Drought_P Parameter: Plant Line Value: WS
  misc_feature: MA Experiment 20000437 PARAMETER Experiment Name: At_Drought_P Parameter: Timepoint (hr) Value: 24
  misc_feature: MA Experiment 20000437 PARAMETER Experiment Name: At_Drought_P Parameter: Tissue Value: Whole Plant
  misc_feature: MA Experiment 20000437 PARAMETER Experiment Name: At_Drought_P Parameter: Treatment Value: Drought vs. No Drought
  misc_feature: MA Experiment ID: 20000439 Result: Down-regulated in Transcription
  misc_feature: MA Experiment 20000439 PARAMETER Experiment Name: At_Roots__P Parameter: Age (day) Value: 14 vs. 21
  misc_feature: MA Experiment 20000439 PARAMETER Experiment Name: At_Roots__P Parameter: Organism Value: A. thaliana
  misc_feature: MA Experiment 20000439 PARAMETER Experiment Name: At_Roots__P Parameter: Tissue Value: Roots vs. Whole Plant
  misc_feature: MA Experiment ID: 20000794 Result: Down-regulated in Transcription
  misc_feature: MA Experiment 20000794 PARAMETER Experiment Name: At_Petals_P Parameter: Age (day) Value: 23-25 days
  misc_feature: MA Experiment 20000794 PARAMETER Experiment Name: At_Petals_P Parameter: Plant Line Value: WS
  misc_feature: MA Experiment 20000794 PARAMETER Experiment Name: At_Petals_P Parameter: Tissue Value: Petals vs. Whole plant
  misc_feature: MA Experiment ID: 20001560 Result: Up-regulated in Transcription
  misc_feature: MA Experiment 20001560 PARAMETER Experiment Name: At_Drought_Soil_Dry_P Parameter: Age (day) Value: 28
  misc_feature: MA Experiment 20001560 PARAMETER Experiment Name: At_Drought_Soil_Dry_P Parameter: Organism Value: A. thaliana
  misc_feature: MA Experiment 20001560 PARAMETER Experiment Name: At_Drought_Soil_Dry_P Parameter: Plant Line Value: WS
  misc_feature: MA Experiment 20001560 PARAMETER Experiment Name: At_Drought_Soil_Dry_P Parameter: Post Timepoint (hr) Value: None
  misc_feature: MA Experiment 20001560 PARAMETER Experiment Name: At_Drought_Soil_Dry_P Parameter: Post-Treatment Value: None
  misc_feature: MA Experiment 20001560 PARAMETER Experiment Name: At_Drought_Soil_Dry_P Parameter: Timepoint (day) Value: 14
  misc_feature: MA Experiment 20001560 PARAMETER Experiment Name: At_Drought_Soil_Dry_P Parameter: Treatment Value: Drought vs. No Drought
  misc_feature: MA Experiment ID: 20001757 Result: Up-regulated in Transcription
  misc_feature: MA Experiment 20001757 PARAMETER Experiment Name: At_50mM_NH4NO3_L-to-H_P Parameter: Timepoint (hr) Value: 6
  misc_feature: MA Experiment 20001757 PARAMETER Experiment Name: At_50mM_NH4NO3_L-to-H_P Parameter: Tissue Value: Leaf
  misc_feature: MA Experiment 20001757 PARAMETER Experiment Name: At_50mM_NH4NO3_L-to-H_P Parameter: Treatment Value: 50mM NH4NO3 vs 100mM Mannitol
  misc_feature: MA Experiment ID: 20001905 Result: Down-regulated in Transcription
  misc_feature: MA Experiment 20001905 PARAMETER Experiment Name: At_Drought_Reproduction_P Parameter: Age (day) Value: 40
  misc_feature: MA Experiment 20001905 PARAMETER Experiment Name: At_Drought_Reproduction_P Parameter: Organism Value: A. thaliana
  misc_feature: MA Experiment 20001905 PARAMETER Experiment Name: At_Drought_Reproduction_P Parameter: Plant Line Value: WS
  misc_feature: MA Experiment 20001905 PARAMETER Experiment Name: At_Drought_Reproduction_P Parameter: Timepoint (day) Value: 10
  misc_feature: MA Experiment 20001905 PARAMETER Experiment Name: At_Drought_Reproduction_P Parameter: Tissue Value: Rosettes
  misc_feature: MA Experiment 20001905 PARAMETER Experiment Name: At_Drought_Reproduction_P Parameter: Treatment Value: Drought vs. No Drought

SEQ ID NO: 34639 - protein, 478 aa, Arabidopsis thaliana; identical to SEQ ID NO: 31049
  peptide (1)..(478): Ceres Seq. ID no. 12579467
  misc_feature (98)..(298): Pfam Name: PsbP Pfam Description: PsbP
  misc_feature (39)..(287): Homolog of NCBI NO: 266856 NR Description: Oxygen-evolving enhancer protein 2, chloroplast (OEE2) (23 kDa subunit of oxygen evolving system of photosystem
  misc_feature (38)..(287): Homolog of NCBI NO: 417604 NR Description: 23 kDa polypeptide of water-oxidizing complex of
  misc_feature (45)..(287): Homolog of NCBI NO: 19898 NR Description: photosystem II 23 kDa polypeptide [Nicotiana
  misc_feature (43)..(287): Homolog of NCBI NO: 1345550 NR Description: 23-kDa ploypeptide of photosystem II
  misc_feature (38)..(287): Homolog of NCBI NO: 7443216 NR Description: photosystem II oxygen-evolving complex protein 2
  misc_feature (38)..(287): Homolog of NCBI NO: 15224572 NR Description: photosystem II oxygen-evolving complex 23 (OEC23)
  misc_feature (50)..(286): Homolog of NCBI NO: 81723 NR Description: photosystem II oxygen-evolving complex protein 2
  misc_feature (38)..(287): Homolog of NCBI NO: 11133887 NR Description: OXYGEN-EVOLVING ENHANCER PROTEIN 2-2, CHLOROPLAST (OEE2) (23 KDA SUBUNIT OF OXYGEN EVOLVING SYSTEM OF PHOTOSYSTEM
  misc_feature (38)..(286): Homolog of NCBI NO: 131391 NR Description: Oxygen-evolving enhancer protein 2, chloroplast (OEE2) (23 kDa subunit of oxygen evolving system of photosystem
  misc_feature (38)..(298): Homolog of NCBI NO: 15222166 NR Description: photosystem II oxygen-evolving complex 23 (OEC23)

SEQ ID NO: 34640 - protein, 466 aa, Arabidopsis thaliana; identical to SEQ ID NO: 31050
  peptide (1)..(466): Ceres Seq. ID no. 12579468
  misc_feature (86)..(286): Pfam Name: PsbP Pfam Description: PsbP
  misc_feature (27)..(275): Homolog of NCBI NO: 266856 NR Description: Oxygen-evolving enhancer protein 2, chloroplast (OEE2) (23 kDa subunit of oxygen evolving system of photosystem
  misc_feature (26)..(275): Homolog of NCBI NO: 417604 NR Description: 23 kDa polypeptide of water-oxidizing complex of
  misc_feature (33)..(275): Homolog of NCBI NO: 19898 NR Description: photosystem II 23 kDa polypeptide [Nicotiana
  misc_feature (31)..(275): Homolog of NCBI NO: 1345550 NR Description: 23-kDa ploypeptide of photosystem II
  misc_feature (26)..(275): Homolog of NCBI NO: 7443216 NR Description: photosystem II oxygen-evolving complex protein 2
  misc_feature (26)..(275): Homolog of NCBI NO: 15224572 NR Description: photosystem II oxygen-evolving complex 23 (OEC23)
  misc_feature (38)..(274): Homolog of NCBI NO: 81723 NR Description: photosystem II oxygen-evolving complex protein 2
  misc_feature (26)..(275): Homolog of NCBI NO: 11133887 NR Description: OXYGEN-EVOLVING ENHANCER PROTEIN 2-2, CHLOROPLAST (OEE2) (23 KDA SUBUNIT OF OXYGEN EVOLVING SYSTEM OF PHOTOSYSTEM
  misc_feature (26)..(274): Homolog of NCBI NO: 131391 NR Description: Oxygen-evolving enhancer protein 2, chloroplast (OEE2) (23 kDa subunit of oxygen evolving system of photosystem
  misc_feature (26)..(286): Homolog of NCBI NO: 15222166 NR Description: photosystem II oxygen-evolving complex 23 (OEC23)

SEQ ID NO: 34641 - protein, 441 aa, Arabidopsis thaliana; identical to SEQ ID NO: 31051
  peptide (1)..(441): Ceres Seq. ID no. 12579469
  misc_feature (61)..(261): Pfam Name: PsbP Pfam Description: PsbP
  misc_feature (2)..(250): Homolog of NCBI NO: 266856 NR Description: Oxygen-evolving enhancer protein 2, chloroplast (OEE2) (23 kDa subunit of oxygen evolving system of photosystem
  misc_feature (1)..(250): Homolog of NCBI NO: 417604 NR Description: 23 kDa polypeptide of water-oxidizing complex of
  misc_feature (8)..(250): Homolog of NCBI NO: 19898 NR Description: photosystem II 23 kDa polypeptide [Nicotiana
  misc_feature (6)..(250): Homolog of NCBI NO: 1345550 NR Description: 23-kDa ploypeptide of photosystem II
  misc_feature (1)..(250): Homolog of NCBI NO: 7443216 NR Description: photosystem II oxygen-evolving complex protein 2
  misc_feature (1)..(250): Homolog of NCBI NO: 15224572 NR Description: photosystem II oxygen-evolving complex 23 (OEC23)
  misc_feature (13)..(249): Homolog of NCBI NO: 81723 NR Description: photosystem II oxygen-evolving complex protein 2
  misc_feature (1)..(250): Homolog of NCBI NO: 11133887 NR Description: OXYGEN-EVOLVING ENHANCER PROTEIN 2-2, CHLOROPLAST (OEE2) (23 KDA SUBUNIT OF OXYGEN EVOLVING SYSTEM OF PHOTOSYSTEM
  misc_feature (1)..(249): Homolog of NCBI NO: 131391 NR Description: Oxygen-evolving enhancer protein 2, chloroplast (OEE2) (23 kDa subunit of oxygen evolving system of photosystem
  misc_feature (1)..(261): Homolog of NCBI NO: 15222166 NR Description: photosystem II oxygen-evolving complex 23 (OEC23)

SEQ ID NO: 34642 - DNA, 689 bp, Arabidopsis thaliana; identical to SEQ ID NO: 31052
  misc_feature (1)..(689): Ceres Seq. ID no. 12322670
  misc_feature: MA Experiment ID: 108461 Result: Up-regulated in Transcription
  misc_feature: MA Experiment 108461 PARAMETER Experiment Name: At_Germinating_Seeds_cDNA_P Parameter: Age (day) Value: 1 vs. 0
  misc_feature: MA Experiment 108461 PARAMETER Experiment Name: At_Germinating_Seeds_cDNA_P Parameter: Tissue Value: Germinating Seeds
  misc_feature: MA Experiment ID: 108561 Result: Down-regulated in Transcription
  misc_feature: MA Experiment 108561 PARAMETER Experiment Name: At_100uM_ABA_cDNA_P Parameter: Timepoint (hr) Value: 6
  misc_feature: MA Experiment 108561 PARAMETER Experiment Name: At_100uM_ABA_cDNA_P Parameter: Tissue Value: Aerial
  misc_feature: MA Experiment 108561 PARAMETER Experiment Name: At_100uM_ABA_cDNA_P Parameter: Treatment Value: 100uM ABA vs. No Treatment
  misc_feature: MA Experiment ID: 108573 Result: Down-regulated in Transcription
  misc_feature: MA Experiment 108573 PARAMETER Experiment Name: At_Drought_cDNA_P Parameter: Timepoint (hr) Value: 6
  misc_feature: MA Experiment 108573 PARAMETER Experiment Name: At_Drought_cDNA_P Parameter: Tissue Value: Aerial
  misc_feature: MA Experiment 108573 PARAMETER Experiment Name: At_Drought_cDNA_P Parameter: Treatment Value: Drought vs. No Drought
  misc_feature: MA Experiment ID: 108577 Result: Down-regulated in Transcription
  misc_feature: MA Experiment 108577 PARAMETER Experiment Name: At_42deg_Heat_cDNA_P Parameter: Temperature (deg C) Value: 42 vs. 22
  misc_feature: MA Experiment 108577 PARAMETER Experiment Name: At_42deg_Heat_cDNA_P Parameter: Timepoint (hr) Value: 6
  misc_feature: MA Experiment 108577 PARAMETER Experiment Name: At_42deg_Heat_cDNA_P Parameter: Tissue Value: Aerial
  misc_feature: MA Experiment ID: 108579 Result: Up-regulated in Transcription
  misc_feature: MA Experiment 108579 PARAMETER Experiment Name: At_4deg_Cold_cDNA_P Parameter: Temperature (deg C) Value: 4 vs. 22
  misc_feature: MA Experiment 108579 PARAMETER Experiment Name: At_4deg_Cold_cDNA_P Parameter: Timepoint (hr) Value: 6
  misc_feature: MA Experiment 108579 PARAMETER Experiment Name: At_4deg_Cold_cDNA_P Parameter: Tissue Value: Aerial
  misc_feature: MA Experiment ID: 108595 Result: Down-regulated in Transcription
  misc_feature: MA Experiment 108595 PARAMETER Experiment Name: At_Ler-pi_Ovule_cDNA_P Parameter: Plant Line Value: null
  misc_feature: MA Experiment ID: 20000072 Result: Down-regulated in Transcription
  misc_feature: MA Experiment 20000072 PARAMETER Experiment Name: At_100uM_ABA_Mutants_cDNA_P Parameter: Plant Line Value: CS8105
  misc_feature: MA Experiment 20000072 PARAMETER Experiment Name: At_100uM_ABA_Mutants_cDNA_P Parameter: Timepoint (hr) Value: 6
  misc_feature: MA Experiment 20000072 PARAMETER Experiment Name: At_100uM_ABA_Mutants_cDNA_P Parameter: Tissue Value: Aerial
  misc_feature: MA Experiment 20000072 PARAMETER Experiment Name: At_100uM_ABA_Mutants_cDNA_P Parameter: Treatment Value: 100uM ABA vs. No Treatment
  misc_feature: MA Experiment ID: 20000117 Result: Down-regulated in Transcription
  misc_feature: MA Experiment 20000117 PARAMETER Experiment Name: At_100uM_ABA_Mutants_cDNA_P Parameter: Plant Line Value: Columbia
  misc_feature: MA Experiment 20000117 PARAMETER Experiment Name: At_100uM_ABA_Mutants_cDNA_P Parameter: Timepoint (hr) Value: 6
  misc_feature: MA Experiment 20000117 PARAMETER Experiment Name: At_100uM_ABA_Mutants_cDNA_P Parameter: Tissue Value: Aerial
  misc_feature: MA Experiment 20000117 PARAMETER Experiment Name: At_100uM_ABA_Mutants_cDNA_P Parameter: Treatment Value: 100uM ABA vs. No Treatment
  misc_feature: MA Experiment ID: 20000184 Result: Up-regulated in Transcription
  misc_feature: MA Experiment 20000184 PARAMETER Experiment Name: At_Shoots__P Parameter: Age (day) Value: 7
  misc_feature: MA Experiment 20000184 PARAMETER Experiment Name: At_Shoots__P Parameter: Tissue Value: Shoots vs. Whole Plant
  misc_feature: MA Experiment ID: 20000185 Result: Down-regulated in Transcription
  misc_feature: MA Experiment 20000185 PARAMETER Experiment Name: At_Roots__P Parameter: Age (day) Value: 7 vs. 21
  misc_feature: MA Experiment 20000185 PARAMETER Experiment Name: At_Roots__P Parameter: Organism Value: A. thaliana
  misc_feature: MA Experiment 20000185 PARAMETER Experiment Name: At_Roots__P Parameter: Tissue Value: Roots vs. Whole Plant
  misc_feature: MA Experiment ID: 20000234 Result: Up-regulated in Transcription
  misc_feature: MA Experiment 20000234 PARAMETER Experiment Name: At_Siliques_P Parameter: Age (day) Value: 21
  misc_feature: MA Experiment 20000234 PARAMETER Experiment Name: At_Siliques_P Parameter: Organism Value: A. thaliana
  misc_feature: MA Experiment 20000234 PARAMETER Experiment Name: At_Siliques_P Parameter: Plant Line Value: WS
  misc_feature: MA Experiment 20000234 PARAMETER Experiment Name: At_Siliques_P Parameter: Tissue Value: Less Than 5mm Siliques vs. Whole Plant
  misc_feature: MA Experiment ID: 20000436 Result: Down-regulated in Transcription
  misc_feature: MA Experiment 20000436 PARAMETER Experiment Name: At_Drought_P Parameter: Age (day) Value: 7
  misc_feature: MA Experiment 20000436 PARAMETER Experiment Name: At_Drought_P Parameter: Organism Value: A. thaliana
  misc_feature: MA Experiment 20000436 PARAMETER Experiment Name: At_Drought_P Parameter: Plant Line Value: WS
  misc_feature: MA Experiment 20000436 PARAMETER Experiment Name: At_Drought_P Parameter: Timepoint (hr) Value: 12
  misc_feature: MA Experiment 20000436 PARAMETER Experiment Name: At_Drought_P Parameter: Tissue Value: Whole Plant
  misc_feature: MA Experiment 20000436 PARAMETER Experiment Name: At_Drought_P Parameter: Treatment Value: Drought vs. No Drought
  misc_feature: MA Experiment ID: 20000437 Result: Down-regulated in Transcription
  misc_feature: MA Experiment 20000437 PARAMETER Experiment Name: At_Drought_P Parameter: Age (day) Value: 8
  misc_feature: MA Experiment 20000437 PARAMETER Experiment Name: At_Drought_P Parameter: Organism Value: A. thaliana
  misc_feature: MA Experiment 20000437 PARAMETER Experiment Name: At_Drought_P Parameter: Plant Line Value: WS
  misc_feature: MA Experiment 20000437 PARAMETER Experiment Name: At_Drought_P Parameter: Timepoint (hr) Value: 24
  misc_feature: MA Experiment 20000437 PARAMETER Experiment Name: At_Drought_P Parameter: Tissue Value: Whole Plant
  misc_feature: MA Experiment 20000437 PARAMETER Experiment Name: At_Drought_P Parameter: Treatment Value: Drought vs. No Drought
  misc_feature: MA Experiment ID: 20000438 Result: Up-regulated in Transcription
  misc_feature: MA Experiment 20000438 PARAMETER Experiment Name: At_Shoots__P Parameter: Age (day) Value: 14
  misc_feature: MA Experiment 20000438 PARAMETER Experiment Name: At_Shoots__P Parameter: Tissue Value: Shoots vs. Whole Plant
  misc_feature: MA Experiment ID: 20000439 Result: Down-regulated in Transcription
  misc_feature: MA Experiment 20000439 PARAMETER Experiment Name: At_Roots__P Parameter: Age (day) Value: 14 vs. 21
  misc_feature: MA Experiment 20000439 PARAMETER Experiment Name: At_Roots__P Parameter: Organism Value: A. thaliana
  misc_feature: MA Experiment 20000439 PARAMETER Experiment Name: At_Roots__P Parameter: Tissue Value: Roots vs. Whole Plant
  misc_feature: MA Experiment ID: 20000453 Result: Down-regulated in Transcription
  misc_feature: MA Experiment 20000453 PARAMETER Experiment Name: At_100uM_ABA_P Parameter: Age (day) Value: 15
  misc_feature: MA Experiment 20000453 PARAMETER Experiment Name: At_100uM_ABA_P Parameter: Organism Value: A. thaliana
  misc_feature: MA Experiment 20000453 PARAMETER Experiment Name: At_100uM_ABA_P Parameter: Plant Line Value: WS
  misc_feature: MA Experiment 20000453 PARAMETER Experiment Name: At_100uM_ABA_P Parameter: Timepoint (hr) Value: 24
  misc_feature: MA Experiment 20000453 PARAMETER Experiment Name: At_100uM_ABA_P Parameter: Tissue Value: Aerial
  misc_feature: MA Experiment 20000453 PARAMETER Experiment Name: At_100uM_ABA_P Parameter: Treatment Value: 100uM ABA vs. No Treatment
  misc_feature: MA Experiment ID: 20001248 Result: Down-regulated in Transcription
  misc_feature: MA Experiment 20001248 PARAMETER Experiment Name: At_Far-red-induction_P Parameter: Age (day) Value: 7
  misc_feature: MA Experiment 20001248 PARAMETER Experiment Name: At_Far-red-induction_P Parameter: Light Value: Far-red vs. White
  misc_feature: MA Experiment 20001248 PARAMETER Experiment Name: At_Far-red-induction_P Parameter: Organism Value: A. thaliana
  misc_feature: MA Experiment 20001248 PARAMETER Experiment Name: At_Far-red-induction_P Parameter: Plant Line Value: Columbia
  misc_feature: MA Experiment 20001248 PARAMETER Experiment Name: At_Far-red-induction_P Parameter: Timepoint (hr) Value: 4
  misc_feature: MA Experiment 20001248 PARAMETER Experiment Name: At_Far-red-induction_P Parameter: Tissue Value: Whole Plant
  misc_feature: MA Experiment ID: 20001450 Result: Down-regulated in Transcription
  misc_feature: MA Experiment 20001450 PARAMETER Experiment Name: At_Far-red-induction_P Parameter: Age (day) Value: 7
  misc_feature: MA Experiment 20001450 PARAMETER Experiment Name: At_Far-red-induction_P Parameter: Light Value: Far-red vs. White
  misc_feature: MA Experiment 20001450 PARAMETER Experiment Name: At_Far-red-induction_P Parameter: Organism Value: A. thaliana
  misc_feature: MA Experiment 20001450 PARAMETER Experiment Name: At_Far-red-induction_P Parameter: Plant Line Value: Columbia
  misc_feature: MA Experiment 20001450 PARAMETER Experiment Name: At_Far-red-induction_P Parameter: Timepoint (hr) Value: 8
  misc_feature: MA Experiment 20001450 PARAMETER Experiment Name: At_Far-red-induction_P Parameter: Tissue Value: Whole Plant
  misc_feature: MA Experiment ID: 20001757 Result: Up-regulated in Transcription
  misc_feature: MA Experiment 20001757 PARAMETER Experiment Name: At_50mM_NH4NO3_L-to-H_P Parameter: Timepoint (hr) Value: 6
  misc_feature: MA Experiment 20001757 PARAMETER Experiment Name: At_50mM_NH4NO3_L-to-H_P Parameter: Tissue Value: Leaf
  misc_feature: MA Experiment 20001757 PARAMETER Experiment Name: At_50mM_NH4NO3_L-to-H_P Parameter: Treatment Value: 50mM NH4NO3 vs 100mM Mannitol
  misc_feature: MA Experiment ID: 20001905 Result: Down-regulated in Transcription
  misc_feature: MA Experiment 20001905 PARAMETER Experiment Name: At_Drought_Reproduction_P Parameter: Age (day) Value: 40
  misc_feature: MA Experiment 20001905 PARAMETER Experiment Name: At_Drought_Reproduction_P Parameter: Organism Value: A. thaliana
  misc_feature: MA Experiment 20001905 PARAMETER Experiment Name: At_Drought_Reproduction_P Parameter: Plant Line Value: WS
  misc_feature: MA Experiment 20001905 PARAMETER Experiment Name: At_Drought_Reproduction_P Parameter: Timepoint (day) Value: 10
  misc_feature: MA Experiment 20001905 PARAMETER Experiment Name: At_Drought_Reproduction_P Parameter: Tissue Value: Rosettes
  misc_feature: MA Experiment 20001905 PARAMETER Experiment Name: At_Drought_Reproduction_P Parameter: Treatment Value: Drought vs. No Drought

SEQ ID NO: 34643 - protein, 167 aa, Arabidopsis thaliana; identical to SEQ ID NO: 31053
  peptide (1)..(167): Ceres Seq. ID no. 12322671
  misc_feature (1)..(167): Homolog of NCBI NO: 21554083 NR Description: unknown [Arabidopsis thaliana]
  misc_feature (1)..(167): Homolog of NCBI NO: 18400342 NR Description: expressed protein

SEQ ID NO: 34644 - protein, 98 aa, Arabidopsis thaliana; identical to SEQ ID NO: 31054
  peptide (1)..(98): Ceres Seq. ID no. 12322672
  misc_feature (1)..(98): Homolog of NCBI NO: 21554083 NR Description: unknown [Arabidopsis thaliana]
  misc_feature (1)..(98): Homolog of NCBI NO: 18400342 NR Description: expressed protein

SEQ ID NO: 34645 - DNA, 701 bp, Arabidopsis thaliana; identical to SEQ ID NO: 31055
  misc_feature (1)..(701): Ceres Seq. ID no. 13592829
  misc_feature: MA Experiment ID: 20000180 Result: Up-regulated in Transcription
  misc_feature: MA Experiment 20000180 PARAMETER Experiment Name: At_Germinating_Seeds_P Parameter: Age (hr) Value: 24 vs. 0
  misc_feature: MA Experiment 20000180 PARAMETER Experiment Name: At_Germinating_Seeds_P Parameter: Tissue Value: Germinating Seeds
  misc_feature: MA Experiment ID: 20000184 Result: Up-regulated in Transcription
  misc_feature: MA Experiment 20000184 PARAMETER Experiment Name: At_Shoots__P Parameter: Age (day) Value: 7
  misc_feature: MA Experiment 20000184 PARAMETER Experiment Name: At_Shoots__P Parameter: Tissue Value: Shoots vs. Whole Plant
  misc_feature: MA Experiment ID: 20000185 Result: Down-regulated in Transcription
  misc_feature: MA Experiment 20000185 PARAMETER Experiment Name: At_Roots__P Parameter: Age (day) Value: 7 vs. 21
  misc_feature: MA Experiment 20000185 PARAMETER Experiment Name: At_Roots__P Parameter: Organism Value: A. thaliana
  misc_feature: MA Experiment 20000185 PARAMETER Experiment Name: At_Roots__P Parameter: Tissue Value: Roots vs. Whole Plant
  misc_feature: MA Experiment ID: 20000437 Result: Down-regulated in Transcription
  misc_feature: MA Experiment 20000437 PARAMETER Experiment Name: At_Drought_P Parameter: Age (day) Value: 8
  misc_feature: MA Experiment 20000437 PARAMETER Experiment Name: At_Drought_P Parameter: Organism Value: A. thaliana
  misc_feature: MA Experiment 20000437 PARAMETER Experiment Name: At_Drought_P Parameter: Plant Line Value: WS
  misc_feature: MA Experiment 20000437 PARAMETER Experiment Name: At_Drought_P Parameter: Timepoint (hr) Value: 24
  misc_feature: MA Experiment 20000437 PARAMETER Experiment Name: At_Drought_P Parameter: Tissue Value: Whole Plant
  misc_feature: MA Experiment 20000437 PARAMETER Experiment Name: At_Drought_P Parameter: Treatment Value: Drought vs. No Drought
  misc_feature: MA Experiment ID: 20000438 Result: Up-regulated in Transcription
  misc_feature: MA Experiment 20000438 PARAMETER Experiment Name: At_Shoots__P Parameter: Age (day) Value: 14
  misc_feature: MA Experiment 20000438 PARAMETER Experiment Name: At_Shoots__P Parameter: Tissue Value: Shoots vs. Whole Plant
  misc_feature: MA Experiment ID: 20000439 Result: Down-regulated in Transcription
  misc_feature: MA Experiment 20000439 PARAMETER Experiment Name: At_Roots__P Parameter: Age (day) Value: 14 vs. 21
  misc_feature: MA Experiment 20000439 PARAMETER Experiment Name: At_Roots__P Parameter: Organism Value: A. thaliana
  misc_feature: MA Experiment 20000439 PARAMETER Experiment Name: At_Roots__P Parameter: Tissue Value: Roots vs. Whole Plant
  misc_feature: MA Experiment ID: 20000453 Result: Down-regulated in Transcription
  misc_feature: MA Experiment 20000453 PARAMETER Experiment Name: At_100uM_ABA_P Parameter: Age (day) Value: 15
  misc_feature: MA Experiment 20000453 PARAMETER Experiment Name: At_100uM_ABA_P Parameter: Organism Value: A. thaliana
  misc_feature: MA Experiment 20000453 PARAMETER Experiment Name: At_100uM_ABA_P Parameter: Plant Line Value: WS
  misc_feature: MA Experiment 20000453 PARAMETER Experiment Name: At_100uM_ABA_P Parameter: Timepoint (hr) Value: 24
  misc_feature: MA Experiment 20000453 PARAMETER Experiment Name: At_100uM_ABA_P Parameter: Tissue Value: Aerial
  misc_feature: MA Experiment 20000453 PARAMETER Experiment Name: At_100uM_ABA_P Parameter: Treatment Value: 100uM ABA vs. No Treatment
  misc_feature: MA Experiment ID: 20000495 Result: Down-regulated in Transcription
  misc_feature: MA Experiment 20000495 PARAMETER Experiment Name: At_Guard_Cells_P Parameter: Harvest Date Value: 8/2/2002
  misc_feature: MA Experiment 20000495 PARAMETER Experiment Name: At_Guard_Cells_P Parameter: Organism Value: A. thaliana
  misc_feature: MA Experiment 20000495 PARAMETER Experiment Name: At_Guard_Cells_P Parameter: Tissue Value: Guard Cells vs. Leaves
  misc_feature: MA Experiment ID: 20001248 Result: Down-regulated in Transcription
  misc_feature: MA Experiment 20001248 PARAMETER Experiment Name: At_Far-red-induction_P Parameter: Age (day) Value: 7
  misc_feature: MA Experiment 20001248 PARAMETER Experiment Name: At_Far-red-induction_P Parameter: Light Value: Far-red vs. White
  misc_feature: MA Experiment 20001248 PARAMETER Experiment Name: At_Far-red-induction_P Parameter: Organism Value: A. thaliana
  misc_feature: MA Experiment 20001248 PARAMETER Experiment Name: At_Far-red-induction_P Parameter: Plant Line Value: Columbia
  misc_feature: MA Experiment 20001248 PARAMETER Experiment Name: At_Far-red-induction_P Parameter: Timepoint (hr) Value: 4
  misc_feature: MA Experiment 20001248 PARAMETER Experiment Name: At_Far-red-induction_P Parameter: Tissue Value: Whole Plant
  misc_feature: MA Experiment ID: 20001450 Result: Down-regulated in Transcription
  misc_feature: MA Experiment 20001450 PARAMETER Experiment Name: At_Far-red-induction_P Parameter: Age (day) Value: 7
  misc_feature: MA Experiment 20001450 PARAMETER Experiment Name: At_Far-red-induction_P Parameter: Light Value: Far-red vs. White
  misc_feature: MA Experiment 20001450 PARAMETER Experiment Name: At_Far-red-induction_P Parameter: Organism Value: A. thaliana
  misc_feature: MA Experiment 20001450 PARAMETER Experiment Name: At_Far-red-induction_P Parameter: Plant Line Value: Columbia
  misc_feature: MA Experiment 20001450 PARAMETER Experiment Name: At_Far-red-induction_P Parameter: Timepoint (hr) Value: 8
  misc_feature: MA Experiment 20001450 PARAMETER Experiment Name: At_Far-red-induction_P Parameter: Tissue Value: Whole Plant
  misc_feature: MA Experiment ID: 20001757 Result: Up-regulated in Transcription
  misc_feature: MA Experiment 20001757 PARAMETER Experiment Name: At_50mM_NH4NO3_L-to-H_P Parameter: Timepoint (hr) Value: 6
  misc_feature: MA Experiment 20001757 PARAMETER Experiment Name: At_50mM_NH4NO3_L-to-H_P Parameter: Tissue Value: Leaf
  misc_feature: MA Experiment 20001757 PARAMETER Experiment Name: At_50mM_NH4NO3_L-to-H_P Parameter: Treatment Value: 50mM NH4NO3 vs 100mM Mannitol
  misc_feature: MA Experiment ID: 20001905 Result: Down-regulated in Transcription
  misc_feature: MA Experiment 20001905 PARAMETER Experiment Name: At_Drought_Reproduction_P Parameter: Age (day) Value: 40
  misc_feature: MA Experiment 20001905 PARAMETER Experiment Name: At_Drought_Reproduction_P Parameter: Organism Value: A. thaliana
  misc_feature: MA Experiment 20001905 PARAMETER Experiment Name: At_Drought_Reproduction_P Parameter: Plant Line Value: WS
  misc_feature: MA Experiment 20001905 PARAMETER Experiment Name: At_Drought_Reproduction_P Parameter: Timepoint (day) Value: 10
  misc_feature: MA Experiment 20001905 PARAMETER Experiment Name: At_Drought_Reproduction_P Parameter: Tissue Value: Rosettes
  misc_feature: MA Experiment 20001905 PARAMETER Experiment Name: At_Drought_Reproduction_P Parameter: Treatment Value: Drought vs. No Drought
  misc_feature: Pfam Name: DUF1118 Pfam Description: Protein of unknown function (DUF1118)

SEQ ID NO: 34646 - protein, 158 aa, Arabidopsis thaliana; identical to SEQ ID NO: 31056
  peptide (1)..(158): Ceres Seq. ID no. 15221171
  misc_feature: Pfam Name: DUF1118 Pfam Description: Protein of unknown function (DUF1118)
  misc_feature (40)..(158): Homolog of NCBI NO: 25406370 NR Description: hypothetical protein F25A4.30 [imported] -
  misc_feature (40)..(158): Homolog of NCBI NO: 18410681 NR Description: expressed protein [Arabidopsis thaliana]
  misc_feature (39)..(158): Homolog of NCBI NO: 34912136 NR Description: OSJNBb0024F06.20 [Oryza sativa (japonica
  misc_feature (1)..(158): Homolog of NCBI NO: 17978981 NR Description: AT5g08050/F13G24_250 [Arabidopsis thaliana]
  misc_feature (1)..(158): Homolog of NCBI NO: 15241507 NR Description: expressed protein [Arabidopsis thaliana]

SEQ ID NO: 34647 - protein, 144 aa, Arabidopsis thaliana; identical to SEQ ID NO: 31057
  peptide (1)..(144): Ceres Seq. ID no. 15221172
  misc_feature: Pfam Name: DUF1118 Pfam Description: Protein of unknown function (DUF1118)
  misc_feature (26)..(144): Homolog of NCBI NO: 25406370 NR Description: hypothetical protein F25A4.30 [imported] -
  misc_feature (26)..(144): Homolog of NCBI NO: 18410681 NR Description: expressed protein [Arabidopsis thaliana]
  misc_feature (25)..(144): Homolog of NCBI NO: 34912136 NR Description: OSJNBb0024F06.20 [Oryza sativa (japonica
  misc_feature (1)..(144): Homolog of NCBI NO: 17978981 NR Description: AT5g08050/F13G24_250 [Arabidopsis thaliana]
  misc_feature (1)..(144): Homolog of NCBI NO: 15241507 NR Description: expressed protein [Arabidopsis thaliana]

SEQ ID NO: 34648 - DNA, 960 bp, Arabidopsis thaliana; identical to SEQ ID NO: 31058
  misc_feature (1)..(960): Ceres Seq. ID no. 12339034
  misc_feature: MA Experiment ID: 108461 Result: Up-regulated in Transcription
  misc_feature: MA Experiment 108461 PARAMETER Experiment Name: At_Germinating_Seeds_cDNA_P Parameter: Age (day) Value: 1 vs. 0
  misc_feature: MA Experiment 108461 PARAMETER Experiment Name: At_Germinating_Seeds_cDNA_P Parameter: Tissue Value: Germinating Seeds
  misc_feature: MA Experiment ID: 108462 Result: Up-regulated in Transcription
  misc_feature: MA Experiment 108462 PARAMETER Experiment Name: At_Germinating_Seeds_cDNA_P Parameter: Age (day) Value: 2 vs. 0
  misc_feature: MA Experiment 108462 PARAMETER Experiment Name: At_Germinating_Seeds_cDNA_P Parameter: Tissue Value: Germinating Seeds
  misc_feature: MA Experiment ID: 108463 Result: Up-regulated in Transcription
  misc_feature: MA Experiment 108463 PARAMETER Experiment Name: At_Germinating_Seeds_cDNA_P Parameter: Age (day) Value: 3 vs. 0
  misc_feature: MA Experiment 108463 PARAMETER Experiment Name: At_Germinating_Seeds_cDNA_P Parameter: Tissue Value: Germinating Seeds
  misc_feature: MA Experiment ID: 108464 Result: Up-regulated in Transcription
  misc_feature: MA Experiment 108464 PARAMETER Experiment Name: At_Germinating_Seeds_cDNA_P Parameter: Age (day) Value: 4 vs. 0
  misc_feature: MA Experiment 108464 PARAMETER Experiment Name: At_Germinating_Seeds_cDNA_P Parameter: Tissue Value: Germinating Seeds
  misc_feature: MA Experiment ID: 108585 Result: Down-regulated in Transcription
  misc_feature: MA Experiment 108585 PARAMETER Experiment Name: At_5mM_NaNP_cDNA_P Parameter: Timepoint (hr) Value: 6
  misc_feature: MA Experiment 108585 PARAMETER Experiment Name: At_5mM_NaNP_cDNA_P Parameter: Tissue Value: Aerial
  misc_feature: MA Experiment 108585 PARAMETER Experiment Name: At_5mM_NaNP_cDNA_P Parameter: Treatment Value: null
  misc_feature: MA Experiment ID: 108595 Result: Down-regulated in Transcription
  misc_feature: MA Experiment 108595 PARAMETER Experiment Name: At_Ler-pi_Ovule_cDNA_P Parameter: Plant Line Value: null
  misc_feature: MA Experiment ID: 20000112 Result: Down-regulated in Transcription
  misc_feature: MA Experiment 20000112 PARAMETER Experiment Name: At_42deg_Heat_cDNA_P Parameter: Temperature (deg C) Value: 42 vs. 22
  misc_feature: MA Experiment 20000112 PARAMETER Experiment Name: At_42deg_Heat_cDNA_P Parameter: Timepoint (hr) Value: 2
  misc_feature: MA Experiment 20000112 PARAMETER Experiment Name: At_42deg_Heat_cDNA_P Parameter: Tissue Value: Aerial
  misc_feature: MA Experiment ID: 20000113 Result: Down-regulated in Transcription
  misc_feature: MA Experiment 20000113 PARAMETER Experiment Name: At_42deg_Heat_cDNA_P Parameter: Temperature (deg C) Value: 42 vs. 22
  misc_feature: MA Experiment 20000113 PARAMETER Experiment Name: At_42deg_Heat_cDNA_P Parameter: Timepoint (hr) Value: 8
  misc_feature: MA Experiment 20000113 PARAMETER Experiment Name: At_42deg_Heat_cDNA_P Parameter: Tissue Value: Aerial
  misc_feature: MA Experiment ID: 20000173 Result: Down-regulated in Transcription
  misc_feature: MA Experiment 20000173 PARAMETER Experiment Name: At_42deg_Heat_P Parameter: Age (day) Value: 14
  misc_feature: MA Experiment 20000173 PARAMETER Experiment Name: At_42deg_Heat_P Parameter: Organism Value: A. thaliana
  misc_feature: MA Experiment 20000173 PARAMETER Experiment Name: At_42deg_Heat_P Parameter: Plant Line Value: WS
  misc_feature: MA Experiment 20000173 PARAMETER Experiment Name: At_42deg_Heat_P Parameter: Temperature (deg C) Value: 42 vs. 22
  misc_feature: MA Experiment 20000173 PARAMETER Experiment Name: At_42deg_Heat_P Parameter: Timepoint (hr) Value: 6
  misc_feature: MA Experiment 20000173 PARAMETER Experiment Name: At_42deg_Heat_P Parameter: Tissue Value: Aerial
  misc_feature: MA Experiment ID: 20000180 Result: Up-regulated in Transcription
  misc_feature: MA Experiment 20000180 PARAMETER Experiment Name: At_Germinating_Seeds_P Parameter: Age (hr) Value: 24 vs. 0
  misc_feature: MA Experiment 20000180 PARAMETER Experiment Name: At_Germinating_Seeds_P Parameter: Tissue Value: Germinating Seeds
  misc_feature: MA Experiment ID: 20000224 Result: Up-regulated in Transcription
  misc_feature: MA Experiment ID: 20000264 Result: Up-regulated in Transcription
  misc_feature: MA Experiment 20000264 PARAMETER Experiment Name: At_Open_Flower_P Parameter: Age (day) Value: 21
  misc_feature: MA Experiment 20000264 PARAMETER Experiment Name: At_Open_Flower_P Parameter: Plant Line Value: WS
  misc_feature: MA Experiment 20000264 PARAMETER Experiment Name: At_Open_Flower_P Parameter: Tissue Value: Open Flower vs. Whole Plant
  misc_feature: MA Experiment ID: 20000286 Result: Up-regulated in Transcription
  misc_feature: MA Experiment 20000286 PARAMETER Experiment Name: At_Open_Flower_P Parameter: Age (day) Value: 21
  misc_feature: MA Experiment 20000286 PARAMETER Experiment Name: At_Open_Flower_P Parameter: Plant Line Value: WS
  misc_feature: MA Experiment 20000286 PARAMETER Experiment Name: At_Open_Flower_P Parameter: Tissue Value: Half Open vs. Whole Plant
  misc_feature: MA Experiment ID: 20000307 Result: Up-regulated in Transcription
  misc_feature: MA Experiment 20000307 PARAMETER Experiment Name: At_Germinating_Seeds_Sub_P Parameter: Age (hr) Value: 24 vs. 0
  misc_feature: MA Experiment 20000307 PARAMETER Experiment Name: At_Germinating_Seeds_Sub_P Parameter: Organism Value: A. thaliana
  misc_feature: MA Experiment 20000307 PARAMETER Experiment Name: At_Germinating_Seeds_Sub_P Parameter: Plant Line Value: WS
  misc_feature: MA Experiment 20000307 PARAMETER Experiment Name: At_Germinating_Seeds_Sub_P Parameter: Tissue Value: Germinating Seeds
  misc_feature: MA Experiment ID: 20000327 Result: Down-regulated in Transcription
  misc_feature: MA Experiment 20000327 PARAMETER Experiment Name: At_42deg_Heat_Sub_P Parameter: Age (day) Value: 14
  misc_feature: MA Experiment 20000327 PARAMETER Experiment Name: At_42deg_Heat_Sub_P Parameter: Organism Value: A. thaliana
  misc_feature: MA Experiment 20000327 PARAMETER Experiment Name: At_42deg_Heat_Sub_P Parameter: Plant Line Value: WS
  misc_feature: MA Experiment 20000327 PARAMETER Experiment Name: At_42deg_Heat_Sub_P Parameter: Temperature (deg C) Value: 42 vs. 22
  misc_feature: MA Experiment 20000327 PARAMETER Experiment Name: At_42deg_Heat_Sub_P Parameter: Timepoint (hr) Value: 1
  misc_feature: MA Experiment 20000327 PARAMETER Experiment Name: At_42deg_Heat_Sub_P Parameter: Tissue Value: Aerial
  misc_feature: MA Experiment ID: 20000328 Result: Down-regulated in Transcription
  misc_feature: MA Experiment 20000328 PARAMETER Experiment Name: At_42deg_Heat_Sub_P Parameter: Age (day) Value: 14
  misc_feature: MA Experiment 20000328 PARAMETER Experiment Name: At_42deg_Heat_Sub_P Parameter: Organism Value: A. thaliana
  misc_feature: MA Experiment 20000328 PARAMETER Experiment Name: At_42deg_Heat_Sub_P Parameter: Plant Line Value: WS
  misc_feature: MA Experiment 20000328 PARAMETER Experiment Name: At_42deg_Heat_Sub_P Parameter: Temperature (deg C) Value: 42 vs. 22
  misc_feature: MA Experiment 20000328 PARAMETER Experiment Name: At_42deg_Heat_Sub_P Parameter: Timepoint (hr) Value: 6
  misc_feature: MA Experiment 20000328 PARAMETER Experiment Name: At_42deg_Heat_Sub_P Parameter: Tissue Value: Aerial
  misc_feature: MA Experiment ID: 20000437 Result: Down-regulated in Transcription
  misc_feature: MA Experiment 20000437 PARAMETER Experiment Name: At_Drought_P Parameter: Age (day) Value: 8
  misc_feature: MA Experiment 20000437 PARAMETER Experiment Name: At_Drought_P Parameter: Organism Value: A. thaliana
  misc_feature: MA Experiment 20000437 PARAMETER Experiment Name: At_Drought_P Parameter: Plant Line Value: WS
  misc_feature: MA Experiment 20000437 PARAMETER Experiment Name: At_Drought_P Parameter: Timepoint (hr) Value: 24
  misc_feature: MA Experiment 20000437 PARAMETER Experiment Name: At_Drought_P Parameter: Tissue Value: Whole Plant
  misc_feature: MA Experiment 20000437 PARAMETER Experiment Name: At_Drought_P Parameter: Treatment Value: Drought vs. No Drought
  misc_feature: MA Experiment ID: 20000794 Result: Up-regulated in Transcription
  misc_feature: MA Experiment 20000794 PARAMETER Experiment Name: At_Petals_P Parameter: Age (day) Value: 23-25 days
  misc_feature: MA Experiment 20000794 PARAMETER Experiment Name: At_Petals_P Parameter: Plant Line Value: WS
  misc_feature: MA Experiment 20000794 PARAMETER Experiment Name: At_Petals_P Parameter: Tissue Value: Petals vs. Whole plant
  misc_feature: MA Experiment ID: 20001555 Result: Down-regulated in Transcription
  misc_feature: MA Experiment 20001555 PARAMETER Experiment Name: At_Drought_Soil_Dry_P Parameter: Age (day) Value: 24
  misc_feature: MA Experiment 20001555 PARAMETER Experiment Name: At_Drought_Soil_Dry_P Parameter: Organism Value: A. thaliana
  misc_feature: MA Experiment 20001555 PARAMETER Experiment Name: At_Drought_Soil_Dry_P Parameter: Plant Line Value: WS
  misc_feature: MA Experiment 20001555 PARAMETER Experiment Name: At_Drought_Soil_Dry_P Parameter: Post Timepoint (hr) Value: None
  misc_feature: MA Experiment 20001555 PARAMETER Experiment Name: At_Drought_Soil_Dry_P Parameter: Post-Treatment Value: None
  misc_feature: MA Experiment 20001555 PARAMETER Experiment Name: At_Drought_Soil_Dry_P Parameter: Timepoint (day) Value: 10
  misc_feature: MA Experiment 20001555 PARAMETER Experiment Name: At_Drought_Soil_Dry_P Parameter: Treatment Value: Drought vs. No Drought
  misc_feature: MA Experiment ID: 20001911 Result: Down-regulated in Transcription
  misc_feature: MA Experiment 20001911 PARAMETER Experiment Name: At_Drought_Reproduction_P Parameter: Age (day) Value: 40
  misc_feature: MA Experiment 20001911 PARAMETER Experiment Name: At_Drought_Reproduction_P Parameter: Organism Value: A. thaliana
  misc_feature: MA Experiment 20001911 PARAMETER Experiment Name: At_Drought_Reproduction_P Parameter: Plant Line Value: WS
  misc_feature: MA Experiment 20001911 PARAMETER Experiment Name: At_Drought_Reproduction_P Parameter: Timepoint (day) Value: 10
  misc_feature: MA Experiment 20001911 PARAMETER Experiment Name: At_Drought_Reproduction_P Parameter: Tissue Value: Flowers
  misc_feature: MA Experiment 20001911 PARAMETER Experiment Name: At_Drought_Reproduction_P Parameter: Treatment Value: Drought vs. No Drought

SEQ ID NO: 34649 - protein, 269 aa, Arabidopsis thaliana; identical to SEQ ID NO: 31059
  peptide (1)..(269): Ceres Seq. ID no. 12339035
  misc_feature (114)..(262): Pfam Name: CRAL/TRIO domain Pfam Description: CRAL/TRIO domain
  misc_feature (38)..(269): Homolog of NCBI NO: 17226662 NR Description: polyphosphoinositide binding protein [Gossypium
  misc_feature (78)..(269): Homolog of NCBI NO: 19347976 NR Description: putative polyphosphoinositide binding protein
  misc_feature (15)..(269): Homolog of NCBI NO: 15223439 NR Description: SEC14 cytosolic factor, putative

SEQ ID NO: 34650 - protein, 255 aa, Arabidopsis thaliana; identical to SEQ ID NO: 31060
  peptide (1)..(255): Ceres Seq. ID no. 12339037
  misc_feature (100)..(248): Pfam Name: CRAL/TRIO domain Pfam Description: CRAL/TRIO domain
  misc_feature (24)..(255): Homolog of NCBI NO: 17226662 NR Description: polyphosphoinositide binding protein [Gossypium
  misc_feature (64)..(255): Homolog of NCBI NO: 19347976 NR Description: putative polyphosphoinositide binding protein
  misc_feature (1)..(255): Homolog of NCBI NO: 15223439 NR Description: SEC14 cytosolic factor, putative

SEQ ID NO: 34651 - protein, 222 aa, Arabidopsis thaliana; identical to SEQ ID NO: 31061
  peptide (1)..(222): Ceres Seq. ID no. 12339038
  misc_feature (67)..(215): Pfam Name: CRAL/TRIO domain Pfam Description: CRAL/TRIO domain
  misc_feature (1)..(222): Homolog of NCBI NO: 17226662 NR Description: polyphosphoinositide binding protein [Gossypium
  misc_feature (31)..(222): Homolog of NCBI NO: 19347976 NR Description: putative polyphosphoinositide binding protein
  misc_feature (1)..(222): Homolog of NCBI NO: 15223439 NR Description: SEC14 cytosolic factor, putative

SEQ ID NO: 34652 - DNA, 800 bp, Arabidopsis thaliana; identical to SEQ ID NO: 31062
  misc_feature (1)..(800): Ceres Seq. ID no. 12321377
  misc_feature: MA Experiment ID: 108461 Result: Up-regulated in Transcription
  misc_feature: MA Experiment 108461 PARAMETER Experiment Name: At_Germinating_Seeds_cDNA_P Parameter: Age (day) Value: 1 vs. 0
  misc_feature: MA Experiment 108461 PARAMETER Experiment Name: At_Germinating_Seeds_cDNA_P Parameter: Tissue Value: Germinating Seeds
  misc_feature: MA Experiment ID: 108462 Result: Up-regulated in Transcription
  misc_feature: MA Experiment 108462 PARAMETER Experiment Name: At_Germinating_Seeds_cDNA_P Parameter: Age (day) Value: 2 vs. 0
  misc_feature: MA Experiment 108462 PARAMETER Experiment Name: At_Germinating_Seeds_cDNA_P Parameter: Tissue Value: Germinating Seeds
  misc_feature: MA Experiment ID: 108463 Result: Up-regulated in Transcription
  misc_feature: MA Experiment 108463 PARAMETER Experiment Name: At_Germinating_Seeds_cDNA_P Parameter: Age (day) Value: 3 vs. 0
  misc_feature: MA Experiment 108463 PARAMETER Experiment Name: At_Germinating_Seeds_cDNA_P Parameter: Tissue Value: Germinating Seeds
  misc_feature: MA Experiment ID: 108464 Result: Up-regulated in Transcription
  misc_feature: MA Experiment 108464 PARAMETER Experiment Name: At_Germinating_Seeds_cDNA_P Parameter: Age (day) Value: 4 vs. 0
  misc_feature: MA Experiment 108464 PARAMETER Experiment Name: At_Germinating_Seeds_cDNA_P Parameter: Tissue Value: Germinating Seeds
  misc_feature: MA Experiment ID: 20000111 Result: Down-regulated in Transcription
  misc_feature: MA Experiment 20000111 PARAMETER Experiment Name: At_42deg_Heat_cDNA_P Parameter: Temperature (deg C) Value: 42 vs. 22
  misc_feature: MA Experiment 20000111 PARAMETER Experiment Name: At_42deg_Heat_cDNA_P Parameter: Timepoint (hr) Value: 6
  misc_feature: MA Experiment 20000111 PARAMETER Experiment Name: At_42deg_Heat_cDNA_P Parameter: Tissue Value: Aerial
  misc_feature: MA Experiment ID: 20000113 Result: Down-regulated in Transcription
  misc_feature: MA Experiment 20000113 PARAMETER Experiment Name: At_42deg_Heat_cDNA_P Parameter: Temperature (deg C) Value: 42 vs. 22
  misc_feature: MA Experiment 20000113 PARAMETER Experiment Name: At_42deg_Heat_cDNA_P Parameter: Timepoint (hr) Value: 8
  misc_feature: MA Experiment 20000113 PARAMETER Experiment Name: At_42deg_Heat_cDNA_P Parameter: Tissue Value: Aerial
  misc_feature: MA Experiment ID: 20000179 Result: Up-regulated in Transcription
  misc_feature: MA Experiment 20000179 PARAMETER Experiment Name: At_Germinating_Seeds_P Parameter: Age (hr) Value: 6 vs. 0
  misc_feature: MA Experiment 20000179 PARAMETER Experiment Name: At_Germinating_Seeds_P Parameter: Tissue Value: Germinating Seeds
  misc_feature: MA Experiment ID: 20000180 Result: Up-regulated in Transcription
  misc_feature: MA Experiment 20000180 PARAMETER Experiment Name: At_Germinating_Seeds_P Parameter: Age (hr) Value: 24 vs. 0
  misc_feature: MA Experiment 20000180 PARAMETER Experiment Name: At_Germinating_Seeds_P Parameter: Tissue Value: Germinating Seeds
  misc_feature: MA Experiment ID: 20001911 Result: Down-regulated in Transcription
  misc_feature: MA Experiment 20001911 PARAMETER Experiment Name: At_Drought_Reproduction_P Parameter: Age (day) Value: 40
  misc_feature: MA Experiment 20001911 PARAMETER Experiment Name: At_Drought_Reproduction_P Parameter: Organism Value: A. thaliana
  misc_feature: MA Experiment 20001911 PARAMETER Experiment Name: At_Drought_Reproduction_P Parameter: Plant Line Value: WS
  misc_feature: MA Experiment 20001911 PARAMETER Experiment Name: At_Drought_Reproduction_P Parameter: Timepoint (day) Value: 10
  misc_feature: MA Experiment 20001911 PARAMETER Experiment Name: At_Drought_Reproduction_P Parameter: Tissue Value: Flowers
  misc_feature: MA Experiment 20001911 PARAMETER Experiment Name: At_Drought_Reproduction_P Parameter: Treatment Value: Drought vs. No Drought

SEQ ID NO: 34653 - protein, 170 aa, Arabidopsis thaliana; identical to SEQ ID NO: 31063
  peptide (1)..(170): Ceres Seq. ID no. 12321378
  misc_feature (32)..(170): Pfam Name: Protein of unknown function, DUF538 Pfam Description: Protein of unknown function, DUF538
  misc_feature (56)..(167): Homolog of NCBI NO: 18397959 NR Description: expressed protein
  misc_feature (56)..(167): Homolog of NCBI NO: 6041854 NR Description: unknown protein [Arabidopsis thaliana]
  misc_feature (7)..(167): Homolog of NCBI NO: 21553803 NR Description: unknown [Arabidopsis thaliana]
  misc_feature (7)..(167): Homolog of NCBI NO: 18395537 NR Description: expressed protein
  misc_feature (1)..(170): Homolog of NCBI NO: 34914210 NR Description: OSJNBb0049O23.18 [Oryza sativa (japonica
  misc_feature (1)..(170): Homolog of NCBI NO: 40642817 NR Description: cp protein [Celosia cristata]
  misc_feature (1)..(170): Homolog of NCBI NO: 28466909 NR Description: At5g01610 [Arabidopsis thaliana]
  misc_feature (1)..(170): Homolog of NCBI NO: 15241019 NR Description: putative protein
  misc_feature (1)..(170): Homolog of NCBI NO: 15240103 NR Description: putative protein; protein id: At5g37070.1
  misc_feature (1)..(170): Homolog of NCBI NO: 18398279 NR Description: expressed protein

SEQ ID NO: 34654 - protein, 121 aa, Arabidopsis thaliana; identical to SEQ ID NO: 31064
  peptide (1)..(121): Ceres Seq. ID no. 12321379
  misc_feature (1)..(121): Pfam Name: Protein of unknown function, DUF538 Pfam Description: Protein of unknown function, DUF538
  misc_feature (7)..(118): Homolog of NCBI NO: 18397959 NR Description: expressed protein
  misc_feature (7)..(118): Homolog of NCBI NO: 6041854 NR Description: unknown protein [Arabidopsis thaliana]
  misc_feature (1)..(118): Homolog of NCBI NO: 21553803 NR Description: unknown [Arabidopsis thaliana]
  misc_feature (1)..(118): Homolog of NCBI NO: 18395537 NR Description: expressed protein
  misc_feature (1)..(121): Homolog of NCBI NO: 34914210 NR Description: OSJNBb0049O23.18 [Oryza sativa (japonica
  misc_feature (1)..(121): Homolog of NCBI NO: 40642817 NR Description: cp protein [Celosia cristata]
  misc_feature (1)..(121): Homolog of NCBI NO: 28466909 NR Description: At5g01610 [Arabidopsis thaliana]
  misc_feature (1)..(121): Homolog of NCBI NO: 15241019 NR Description: putative protein
  misc_feature (1)..(121): Homolog of NCBI NO: 15240103 NR Description: putative protein; protein id: At5g37070.1
  misc_feature (1)..(121): Homolog of NCBI NO: 18398279 NR Description: expressed protein

SEQ ID NO: 34655 - DNA, 999 bp, Arabidopsis thaliana; identical to SEQ ID NO: 31065
  misc_feature (1)..(999): Ceres Seq. ID no. 12321788
  misc_feature: MA Experiment ID: 108434 Result: Up-regulated in Transcription
  misc_feature: MA Experiment 108434 PARAMETER Experiment Name: At_Root_Tips_cDNA_P Parameter: Tissue Value: Root Tips
  misc_feature: MA Experiment ID: 108461 Result: Down-regulated in Transcription
  misc_feature: MA Experiment 108461 PARAMETER Experiment Name: At_Germinating_Seeds_cDNA_P Parameter: Age (day) Value: 1 vs. 0
  misc_feature: MA Experiment 108461 PARAMETER Experiment Name: At_Germinating_Seeds_cDNA_P Parameter: Tissue Value: Germinating Seeds
  misc_feature: MA Experiment ID: 108462 Result: Down-regulated in Transcription
  misc_feature: MA Experiment 108462 PARAMETER Experiment Name: At_Germinating_Seeds_cDNA_P Parameter: Age (day) Value: 2 vs. 0
  misc_feature: MA Experiment 108462 PARAMETER Experiment Name: At_Germinating_Seeds_cDNA_P Parameter: Tissue Value: Germinating Seeds
  misc_feature: MA Experiment ID: 108464 Result: Down-regulated in Transcription
  misc_feature: MA Experiment 108464 PARAMETER Experiment Name: At_Germinating_Seeds_cDNA_P Parameter: Age (day) Value: 4 vs. 0
  misc_feature: MA Experiment 108464 PARAMETER Experiment Name: At_Germinating_Seeds_cDNA_P Parameter: Tissue Value: Germinating Seeds
  misc_feature: MA Experiment ID: 20000227 Result: Up-regulated in Transcription
  misc_feature: MA Experiment 20000227 PARAMETER Experiment Name: At_Root-Tips-vs-Tops_P Parameter: Tissue Value: Root Tips vs. Root Tops
  misc_feature: MA Experiment ID: 20000264 Result: Up-regulated in Transcription
  misc_feature: MA Experiment 20000264 PARAMETER Experiment Name: At_Open_Flower_P Parameter: Age (day) Value: 21
  misc_feature: MA Experiment 20000264 PARAMETER Experiment Name: At_Open_Flower_P Parameter: Plant Line Value: WS
  misc_feature: MA Experiment 20000264 PARAMETER Experiment Name: At_Open_Flower_P Parameter: Tissue Value: Open Flower vs. Whole Plant

SEQ ID NO: 34656 - protein, 201 aa, Arabidopsis thaliana; identical to SEQ ID NO: 31066
  peptide (1)..(201): Ceres Seq. ID no. 12321789
  misc_feature (136)..(193): Pfam Name: Collagen triple helix repeat (20 copies) Pfam Description: Collagen triple helix repeat (20 copies)
  misc_feature (5)..(162): Homolog of NCBI NO: 23482571 NR Description: 34 kDa phosphoprotein [Plasmodium yoelii yoelii]
  misc_feature (5)..(136): Homolog of NCBI NO: 32398747 NR Description: p23 co-chaperone, probable [Cryptosporidium
  misc_feature (1)..(124): Homolog of NCBI NO: 22330824 NR Description: similar to p23 {Brassica napus}; protein id:
  misc_feature (1)..(127): Homolog of NCBI NO: 12231292 NR Description: ripening regulated protein DDTFR8 [Lycopersicon
  misc_feature (1)..(133): Homolog of NCBI NO: 11934654 NR Description: p23 [Brassica napus]
  misc_feature (1)..(131): Homolog of NCBI NO: 40882701 NR Description: putative ripening regulated protein
  misc_feature (1)..(169): Homolog of NCBI NO: 38637531 NR Description: putative p23 co-chaperone
  misc_feature (1)..(190): Homolog of NCBI NO: 11229591 NR Description: p23 co-chaperone [Arabidopsis thaliana]
  misc_feature (1)..(193): Homolog of NCBI NO: 30679149 NR Description: glycine-rich protein [Arabidopsis thaliana]
  misc_feature (3)..(157): Homolog of NCBI NO: 7487014 NR Description: hypothetical protein T14P8.5 - Arabidopsis

SEQ ID NO: 34657 - protein, 146 aa, Arabidopsis thaliana; identical to SEQ ID NO: 31067
  peptide (1)..(146): Ceres Seq. ID no. 12321790
  misc_feature (42)..(99): Pfam Name: Keratin Pfam Description: Keratin
  misc_feature (25)..(101): Homolog of NCBI NO: 11229591 NR Description: p23 co-chaperone [Arabidopsis thaliana]
  misc_feature (36)..(146): Homolog of NCBI NO: 14495563 NR Description: 34 kDa phosphoprotein [Plasmodium berghei]
  misc_feature (23)..(101): Homolog of NCBI NO: 23482571 NR Description: 34 kDa phosphoprotein [Plasmodium yoelii yoelii]
  misc_feature (36)..(146): Homolog of NCBI NO: 23482571 NR Description: 34 kDa phosphoprotein [Plasmodium yoelii yoelii]
  misc_feature (25)..(137): Homolog of NCBI NO: 38637531 NR Description: putative p23 co-chaperone
  misc_feature (20)..(144): Homolog of NCBI NO: 30679149 NR Description: glycine-rich protein [Arabidopsis thaliana]
  misc_feature (87)..(133): Homolog of NCBI NO: 40882701 NR Description: putative ripening regulated protein
  misc_feature (39)..(146): Homolog of NCBI NO: 11229591 NR Description: p23 co-chaperone [Arabidopsis thaliana]
  misc_feature (39)..(146): Homolog of NCBI NO: 30679149 NR Description: glycine-rich protein [Arabidopsis thaliana]
  misc_feature (39)..(146): Homolog of NCBI NO: 7487014 NR Description: hypothetical protein T14P8.5 - Arabidopsis

SEQ ID NO: 34658 - protein, 136 aa, Arabidopsis thaliana; identical to SEQ ID NO: 31068
  peptide (1)..(136): Ceres Seq. ID no. 12321791
  misc_feature (32)..(89): Pfam Name: Keratin Pfam Description: Keratin
  misc_feature (15)..(91): Homolog of NCBI NO: 11229591 NR Description: p23 co-chaperone [Arabidopsis thaliana]
  misc_feature (26)..(136): Homolog of NCBI NO: 14495563 NR Description: 34 kDa phosphoprotein [Plasmodium berghei]
  misc_feature (13)..(91): Homolog of NCBI NO: 23482571 NR Description: 34 kDa phosphoprotein [Plasmodium yoelii yoelii]
  misc_feature (26)..(136): Homolog of NCBI NO: 23482571 NR Description: 34 kDa phosphoprotein [Plasmodium yoelii yoelii]
  misc_feature (15)..(127): Homolog of NCBI NO: 38637531 NR Description: putative p23 co-chaperone
  misc_feature (10)..(134): Homolog of NCBI NO: 30679149 NR Description: glycine-rich protein [Arabidopsis thaliana]
  misc_feature (77)..(123): Homolog of NCBI NO: 40882701 NR Description: putative ripening regulated protein
  misc_feature (29)..(136): Homolog of NCBI NO: 11229591 NR Description: p23 co-chaperone [Arabidopsis thaliana]
  misc_feature (29)..(136): Homolog of NCBI NO: 30679149 NR Description: glycine-rich protein [Arabidopsis thaliana]
  misc_feature (29)..(136): Homolog of NCBI NO: 7487014 NR Description: hypothetical protein T14P8.5 - Arabidopsis

SEQ ID NO: 34659 - DNA, 736 bp, Arabidopsis thaliana; identical to SEQ ID NO: 31069
  misc_feature (1)..(736): Ceres Seq. ID no. 13650656
  misc_feature: MA Experiment ID: 108434 Result: Down-regulated in Transcription
  misc_feature: MA Experiment 108434 PARAMETER Experiment Name: At_Root_Tips_cDNA_P Parameter: Tissue Value: Root Tips
  misc_feature: MA Experiment ID: 108461 Result: Up-regulated in Transcription
  misc_feature: MA Experiment 108461 PARAMETER Experiment Name: At_Germinating_Seeds_cDNA_P Parameter: Age (day) Value: 1 vs. 0
  misc_feature: MA Experiment 108461 PARAMETER Experiment Name: At_Germinating_Seeds_cDNA_P Parameter: Tissue Value: Germinating Seeds
  misc_feature: MA Experiment ID: 108462 Result: Up-regulated in Transcription
  misc_feature: MA Experiment 108462 PARAMETER Experiment Name: At_Germinating_Seeds_cDNA_P Parameter: Age (day) Value: 2 vs. 0
  misc_feature: MA Experiment 108462 PARAMETER Experiment Name: At_Germinating_Seeds_cDNA_P Parameter: Tissue Value: Germinating Seeds
  misc_feature: MA Experiment ID: 108463 Result: Up-regulated in Transcription
  misc_feature: MA Experiment 108463 PARAMETER Experiment Name: At_Germinating_Seeds_cDNA_P Parameter: Age (day) Value: 3 vs. 0
  misc_feature: MA Experiment 108463 PARAMETER Experiment Name: At_Germinating_Seeds_cDNA_P Parameter: Tissue Value: Germinating Seeds
  misc_feature: MA Experiment ID: 108595 Result: Up-regulated in Transcription
  misc_feature: MA Experiment 108595 PARAMETER Experiment Name: At_Ler-pi_Ovule_cDNA_P Parameter: Plant Line Value: null
  misc_feature: MA Experiment ID: 20000069 Result: Up-regulated in Transcription
  misc_feature: MA Experiment 20000069 PARAMETER Experiment Name: At_100uM_ABA_Mutants_cDNA_P Parameter: Plant Line Value: CS23
  misc_feature: MA Experiment 20000069 PARAMETER Experiment Name: At_100uM_ABA_Mutants_cDNA_P Parameter: Timepoint (hr) Value: 6
  misc_feature: MA Experiment 20000069 PARAMETER Experiment Name: At_100uM_ABA_Mutants_cDNA_P Parameter: Tissue Value: Aerial
  misc_feature: MA Experiment 20000069 PARAMETER Experiment Name: At_100uM_ABA_Mutants_cDNA_P Parameter: Treatment Value: 100uM ABA vs. No Treatment
  misc_feature: MA Experiment ID: 20000089 Result: Up-regulated in Transcription
  misc_feature: MA Experiment ID: 20000090 Result: Up-regulated in Transcription
  misc_feature: MA Experiment ID: 20000111 Result: Down-regulated in Transcription
  misc_feature: MA Experiment 20000111 PARAMETER Experiment Name: At_42deg_Heat_cDNA_P Parameter: Temperature (deg C) Value: 42 vs. 22
  misc_feature: MA Experiment 20000111 PARAMETER Experiment Name: At_42deg_Heat_cDNA_P Parameter: Timepoint (hr) Value: 6
  misc_feature: MA Experiment 20000111 PARAMETER Experiment Name: At_42deg_Heat_cDNA_P Parameter: Tissue Value: Aerial
  misc_feature: MA Experiment ID: 20000113 Result: Down-regulated in Transcription
  misc_feature: MA Experiment 20000113 PARAMETER Experiment Name: At_42deg_Heat_cDNA_P Parameter: Temperature (deg C) Value: 42 vs. 22
  misc_feature: MA Experiment 20000113 PARAMETER Experiment Name: At_42deg_Heat_cDNA_P Parameter: Timepoint (hr) Value: 8
  misc_feature: MA Experiment 20000113 PARAMETER Experiment Name: At_42deg_Heat_cDNA_P Parameter: Tissue Value: Aerial
  misc_feature: MA Experiment ID: 20000307 Result: Up-regulated in Transcription
  misc_feature: MA Experiment 20000307 PARAMETER Experiment Name: At_Germinating_Seeds_Sub_P Parameter: Age (hr) Value: 24 vs. 0
  misc_feature: MA Experiment 20000307 PARAMETER Experiment Name: At_Germinating_Seeds_Sub_P Parameter: Organism Value: A. thaliana
  misc_feature: MA Experiment 20000307 PARAMETER Experiment Name: At_Germinating_Seeds_Sub_P Parameter: Plant Line Value: WS
  misc_feature: MA Experiment 20000307 PARAMETER Experiment Name: At_Germinating_Seeds_Sub_P Parameter: Tissue Value: Germinating Seeds
  misc_feature: MA Experiment ID: 20000315 Result: Down-regulated in Transcription
  misc_feature: MA Experiment 20000315 PARAMETER Experiment Name: At_14day_Shoots-Roots_Sub_P Parameter: Age (day) Value: 14
  misc_feature: MA Experiment 20000315 PARAMETER Experiment Name: At_14day_Shoots-Roots_Sub_P Parameter: Organism Value: A. thaliana
  misc_feature: MA Experiment 20000315 PARAMETER Experiment Name: At_14day_Shoots-Roots_Sub_P Parameter: Plant Line Value: WS
  misc_feature: MA Experiment 20000315 PARAMETER Experiment Name: At_14day_Shoots-Roots_Sub_P Parameter: Tissue Value: Shoots vs. Whole Plant
  misc_feature: MA Experiment ID: 20000328 Result: Down-regulated in Transcription
  misc_feature: MA Experiment 20000328 PARAMETER Experiment Name: At_42deg_Heat_Sub_P Parameter: Age (day) Value: 14
  misc_feature: MA Experiment 20000328 PARAMETER Experiment Name: At_42deg_Heat_Sub_P Parameter: Organism Value: A. thaliana
  misc_feature: MA Experiment 20000328 PARAMETER Experiment Name: At_42deg_Heat_Sub_P Parameter: Plant Line Value: WS
  misc_feature: MA Experiment 20000328 PARAMETER Experiment Name: At_42deg_Heat_Sub_P Parameter: Temperature (deg C) Value: 42 vs. 22
  misc_feature: MA Experiment 20000328 PARAMETER Experiment Name: At_42deg_Heat_Sub_P Parameter: Timepoint (hr) Value: 6
  misc_feature: MA Experiment 20000328 PARAMETER Experiment Name: At_42deg_Heat_Sub_P Parameter: Tissue Value: Aerial
  misc_feature: MA Experiment ID: 20000347 Result: Up-regulated in Transcription
  misc_feature: MA Experiment 20000347 PARAMETER Experiment Name: At_2mM_SA_Sub_P Parameter: Age (day) Value: 14
  misc_feature: MA Experiment 20000347 PARAMETER Experiment Name: At_2mM_SA_Sub_P Parameter: Organism Value: A. thaliana
  misc_feature: MA Experiment 20000347 PARAMETER Experiment Name: At_2mM_SA_Sub_P Parameter: Plant Line Value: WS
  misc_feature: MA Experiment 20000347 PARAMETER Experiment Name: At_2mM_SA_Sub_P Parameter: Timepoint (hr) Value: 6
  misc_feature: MA Experiment 20000347 PARAMETER Experiment Name: At_2mM_SA_Sub_P Parameter: Tissue Value: Aerial
  misc_feature: MA Experiment 20000347 PARAMETER Experiment Name: At_2mM_SA_Sub_P Parameter: Treatment Value: 2mM SA vs. No Treatment

SEQ ID NO: 34660 - protein, 166 aa, Arabidopsis thaliana; identical to SEQ ID NO: 29350
  peptide (1)..(166): Ceres Seq. ID no. 13650657
  misc_feature (2)..(159): Pfam Name: Demethylmenaquinone methyltransferase Pfam Description: Demethylmenaquinone methyltransferase
  misc_feature (6)..(166): Homolog of NCBI NO: 23468849 NR Description: hypothetical protein [Pseudomonas syringae pv.
  misc_feature (1)..(160): Homolog of NCBI NO: 34497095 NR Description: S-adenosylmethionine:2-demethylmenaquinone
  misc_feature (4)..(164): Homolog of NCBI NO: 17546073 NR Description: PROBABLE
  misc_feature (1)..(164): Homolog of NCBI NO: 22978085 NR Description: hypothetical protein [Ralstonia metallidurans]
  misc_feature (1)..(164): Homolog of NCBI NO: 22982141 NR Description: hypothetical protein [Burkholderia fungorum]
  misc_feature (1)..(166): Homolog of NCBI NO: 15241161 NR Description: dimethylmenaquinone methyltransferase family
  misc_feature (4)..(166): Homolog of NCBI NO: 34910724 NR Description: S-adenosylmethionine:2-demethylmenaquinone
  misc_feature (1)..(166): Homolog of NCBI NO: 15232963 NR Description: dimethylmenaquinone methyltransferase family
  misc_feature (1)..(166): Homolog of NCBI NO: 21537415 NR Description: S-adenosylmethionine:2-demethylmenaquinone
  misc_feature (1)..(166): Homolog of NCBI NO: 15237348 NR Description: dimethylmenaquinone methyltransferase family

SEQ ID NO: 34661 - DNA, 750 bp, Arabidopsis thaliana; identical to SEQ ID NO: 31071
  misc_feature (1)..(750): Ceres Seq. ID no. 13500273
  misc_feature: MA Experiment ID: 108434 Result: Up-regulated in Transcription
  misc_feature: MA Experiment 108434 PARAMETER Experiment Name: At_Root_Tips_cDNA_P Parameter: Tissue Value: Root Tips
  misc_feature: MA Experiment ID: 108462 Result: Down-regulated in Transcription
  misc_feature: MA Experiment 108462 PARAMETER Experiment Name: At_Germinating_Seeds_cDNA_P Parameter: Age (day) Value: 2 vs. 0
  misc_feature: MA Experiment 108462 PARAMETER Experiment Name: At_Germinating_Seeds_cDNA_P Parameter: Tissue Value: Germinating Seeds
  misc_feature: MA Experiment ID: 108463 Result: Down-regulated in Transcription
  misc_feature: MA Experiment 108463 PARAMETER Experiment Name: At_Germinating_Seeds_cDNA_P Parameter: Age (day) Value: 3 vs. 0
  misc_feature: MA Experiment 108463 PARAMETER Experiment Name: At_Germinating_Seeds_cDNA_P Parameter: Tissue Value: Germinating Seeds
  misc_feature: MA Experiment ID: 108577 Result: Down-regulated in Transcription
  misc_feature: MA Experiment 108577 PARAMETER Experiment Name: At_42deg_Heat_cDNA_P Parameter: Temperature (deg C) Value: 42 vs. 22
  misc_feature: MA Experiment 108577 PARAMETER Experiment Name: At_42deg_Heat_cDNA_P Parameter: Timepoint (hr) Value: 6
  misc_feature: MA Experiment 108577 PARAMETER Experiment Name: At_42deg_Heat_cDNA_P Parameter: Tissue Value: Aerial
  misc_feature: MA Experiment ID: 20000112 Result: Down-regulated in Transcription
  misc_feature: MA Experiment 20000112 PARAMETER Experiment Name: At_42deg_Heat_cDNA_P Parameter: Temperature (deg C) Value: 42 vs. 22
  misc_feature: MA Experiment 20000112 PARAMETER Experiment Name: At_42deg_Heat_cDNA_P Parameter: Timepoint (hr) Value: 2
  misc_feature: MA Experiment 20000112 PARAMETER Experiment Name: At_42deg_Heat_cDNA_P Parameter: Tissue Value: Aerial

SEQ ID NO: 34662 - protein, 170 aa, Arabidopsis thaliana; identical to SEQ ID NO: 31072
  peptide (1)..(170): Ceres Seq. ID no. 13500274
  misc_feature (1)..(170): Homolog of NCBI NO: 37535924 NR Description: unknown protein [Oryza sativa (japonica
  misc_feature (1)..(170): Homolog of NCBI NO: 18423288 NR Description: expressed protein [Arabidopsis thaliana]

SEQ ID NO: 34663 - protein, 148 aa, Arabidopsis thaliana; identical to SEQ ID NO: 31073
  peptide (1)..(148): Ceres Seq. ID no. 13500275
  misc_feature (1)..(148): Homolog of NCBI NO: 37535924 NR Description: unknown protein [Oryza sativa (japonica
  misc_feature (1)..(148): Homolog of NCBI NO: 18423288 NR Description: expressed protein [Arabidopsis thaliana]

SEQ ID NO: 34664 - DNA, 1112 bp, Arabidopsis thaliana; identical to SEQ ID NO: 31074
  misc_feature (1)..(1112): Ceres Seq. ID no. 12396985
  misc_feature: MA Experiment ID: 108434 Result: Down-regulated in Transcription
  misc_feature: MA Experiment 108434 PARAMETER Experiment Name: At_Root_Tips_cDNA_P Parameter: Tissue Value: Root Tips
  misc_feature: MA Experiment ID: 108435 Result: Down-regulated in Transcription
  misc_feature: MA Experiment 108435 PARAMETER Experiment Name: At_stm_Mutants_cDNA_P Parameter: Plant Line Value: wt Landsburg vs stm
  misc_feature: MA Experiment 108435 PARAMETER Experiment Name: At_stm_Mutants_cDNA_P Parameter: Tissue Value: Shoot Apical Meristem Region
  misc_feature: MA Experiment ID: 108461 Result: Up-regulated in Transcription
  misc_feature: MA Experiment 108461 PARAMETER Experiment Name: At_Germinating_Seeds_cDNA_P Parameter: Age (day) Value: 1 vs. 0
  misc_feature: MA Experiment 108461 PARAMETER Experiment Name: At_Germinating_Seeds_cDNA_P Parameter: Tissue Value: Germinating Seeds
  misc_feature: MA Experiment ID: 108462 Result: Up-regulated in Transcription
  misc_feature: MA Experiment 108462 PARAMETER Experiment Name: At_Germinating_Seeds_cDNA_P Parameter: Age (day) Value: 2 vs. 0
  misc_feature: MA Experiment 108462 PARAMETER Experiment Name: At_Germinating_Seeds_cDNA_P Parameter: Tissue Value: Germinating Seeds
  misc_feature: MA Experiment ID: 108463 Result: Up-regulated in Transcription
  misc_feature: MA Experiment 108463 PARAMETER Experiment Name: At_Germinating_Seeds_cDNA_P Parameter: Age (day) Value: 3 vs. 0
  misc_feature: MA Experiment 108463 PARAMETER Experiment Name: At_Germinating_Seeds_cDNA_P Parameter: Tissue Value: Germinating Seeds
  misc_feature: MA Experiment ID: 108464 Result: Up-regulated in Transcription
  misc_feature: MA Experiment 108464 PARAMETER Experiment Name: At_Germinating_Seeds_cDNA_P Parameter: Age (day) Value: 4 vs. 0
  misc_feature: MA Experiment 108464 PARAMETER Experiment Name: At_Germinating_Seeds_cDNA_P Parameter: Tissue Value: Germinating Seeds
  misc_feature: MA Experiment ID: 108576 Result: Up-regulated in Transcription
  misc_feature: MA Experiment 108576 PARAMETER Experiment Name: At_42deg_Heat_cDNA_P Parameter: Temperature (deg C) Value: 42 vs. 22
  misc_feature: MA Experiment 108576 PARAMETER Experiment Name: At_42deg_Heat_cDNA_P Parameter: Timepoint (hr) Value: 1
  misc_feature: MA Experiment 108576 PARAMETER Experiment Name: At_42deg_Heat_cDNA_P Parameter: Tissue Value: Aerial
  misc_feature: MA Experiment ID: 108577 Result: Up-regulated in Transcription
  misc_feature: MA Experiment 108577 PARAMETER Experiment Name: At_42deg_Heat_cDNA_P Parameter: Temperature (deg C) Value: 42 vs. 22
  misc_feature: MA Experiment 108577 PARAMETER Experiment Name: At_42deg_Heat_cDNA_P Parameter: Timepoint (hr) Value: 6
  misc_feature: MA Experiment 108577 PARAMETER Experiment Name: At_42deg_Heat_cDNA_P Parameter: Tissue Value: Aerial
  misc_feature: MA Experiment ID: 108579 Result: Up-regulated in Transcription
  misc_feature: MA Experiment 108579 PARAMETER Experiment Name: At_4deg_Cold_cDNA_P Parameter: Temperature (deg C) Value: 4 vs. 22
  misc_feature: MA Experiment 108579 PARAMETER Experiment Name: At_4deg_Cold_cDNA_P Parameter: Timepoint (hr) Value: 6
  misc_feature: MA Experiment 108579 PARAMETER Experiment Name: At_4deg_Cold_cDNA_P Parameter: Tissue Value: Aerial
  misc_feature: MA Experiment ID: 108595 Result: Down-regulated in Transcription
  misc_feature: MA Experiment 108595 PARAMETER Experiment Name: At_Ler-pi_Ovule_cDNA_P Parameter: Plant Line Value: null
  misc_feature: MA Experiment ID: 20000093 Result: Up-regulated in Transcription
  misc_feature: MA Experiment 20000093 PARAMETER Experiment Name: At_42deg_Heat_cDNA_P Parameter: Temperature (deg C) Value: 42 vs. 22
  misc_feature: MA Experiment 20000093 PARAMETER Experiment Name: At_42deg_Heat_cDNA_P Parameter: Timepoint (hr) Value: 0.5
  misc_feature: MA Experiment 20000093 PARAMETER Experiment Name: At_42deg_Heat_cDNA_P Parameter: Tissue Value: Aerial
  misc_feature: MA Experiment ID: 20000111 Result: Up-regulated in Transcription
  misc_feature: MA Experiment 20000111 PARAMETER Experiment Name: At_42deg_Heat_cDNA_P Parameter: Temperature (deg C) Value: 42 vs. 22
  misc_feature: MA Experiment 20000111 PARAMETER Experiment Name: At_42deg_Heat_cDNA_P Parameter: Timepoint (hr) Value: 6
  misc_feature: MA Experiment 20000111 PARAMETER Experiment Name: At_42deg_Heat_cDNA_P Parameter: Tissue Value: Aerial
  misc_feature: MA Experiment ID: 20000112 Result: Up-regulated in Transcription
  misc_feature: MA Experiment 20000112 PARAMETER Experiment Name: At_42deg_Heat_cDNA_P Parameter: Temperature (deg C) Value: 42 vs. 22
  misc_feature: MA Experiment 20000112 PARAMETER Experiment Name: At_42deg_Heat_cDNA_P Parameter: Timepoint (hr) Value: 2
  misc_feature: MA Experiment 20000112 PARAMETER Experiment Name: At_42deg_Heat_cDNA_P Parameter: Tissue Value: Aerial
  misc_feature: MA Experiment ID: 20000113 Result: Up-regulated in Transcription
  misc_feature: MA Experiment 20000113 PARAMETER Experiment Name: At_42deg_Heat_cDNA_P Parameter: Temperature (deg C) Value: 42 vs. 22
  misc_feature: MA Experiment 20000113 PARAMETER Experiment Name: At_42deg_Heat_cDNA_P Parameter: Timepoint (hr) Value: 8
  misc_feature: MA Experiment 20000113 PARAMETER Experiment Name: At_42deg_Heat_cDNA_P Parameter: Tissue Value: Aerial
  misc_feature: MA Experiment ID: 20000173 Result: Up-regulated in Transcription
  misc_feature: MA Experiment 20000173 PARAMETER Experiment Name: At_42deg_Heat_P Parameter: Age (day) Value: 14
  misc_feature: MA Experiment 20000173 PARAMETER Experiment Name: At_42deg_Heat_P Parameter: Organism Value: A. thaliana
  misc_feature: MA Experiment 20000173 PARAMETER Experiment Name: At_42deg_Heat_P Parameter: Plant Line Value: WS
  misc_feature: MA Experiment 20000173 PARAMETER Experiment Name: At_42deg_Heat_P Parameter: Temperature (deg C) Value: 42 vs. 22
  misc_feature: MA Experiment 20000173 PARAMETER Experiment Name: At_42deg_Heat_P Parameter: Timepoint (hr) Value: 6
  misc_feature: MA Experiment 20000173 PARAMETER Experiment Name: At_42deg_Heat_P Parameter: Tissue Value: Aerial
  misc_feature: MA Experiment ID: 20000179 Result: Up-regulated in Transcription
  misc_feature: MA Experiment 20000179 PARAMETER Experiment Name: At_Germinating_Seeds_P Parameter: Age (hr) Value: 6 vs. 0
  misc_feature: MA Experiment 20000179 PARAMETER Experiment Name: At_Germinating_Seeds_P Parameter: Tissue Value: Germinating Seeds
  misc_feature: MA Experiment ID: 20000180 Result: Up-regulated in Transcription
  misc_feature: MA Experiment 20000180 PARAMETER Experiment Name: At_Germinating_Seeds_P Parameter: Age (hr) Value: 24 vs. 0
  misc_feature: MA Experiment 20000180 PARAMETER Experiment Name: At_Germinating_Seeds_P Parameter: Tissue Value: Germinating Seeds
  misc_feature: MA Experiment ID: 20000184 Result: Up-regulated in Transcription
  misc_feature: MA Experiment 20000184 PARAMETER Experiment Name: At_Shoots__P Parameter: Age (day) Value: 7
  misc_feature: MA Experiment 20000184 PARAMETER Experiment Name: At_Shoots__P Parameter: Tissue Value: Shoots vs. Whole Plant
  misc_feature: MA Experiment ID: 20000185 Result: Down-regulated in Transcription
  misc_feature: MA Experiment 20000185 PARAMETER Experiment Name: At_Roots__P Parameter: Age (day) Value: 7 vs. 21
  misc_feature: MA Experiment 20000185 PARAMETER Experiment Name: At_Roots__P Parameter: Organism Value: A. thaliana
  misc_feature: MA Experiment 20000185 PARAMETER Experiment Name: At_Roots__P Parameter: Tissue Value: Roots vs. Whole Plant
  misc_feature: MA Experiment ID: 20000224 Result: Up-regulated in Transcription
  misc_feature: MA Experiment ID: 20000235 Result: Up-regulated in Transcription
  misc_feature: MA Experiment 20000235 PARAMETER Experiment Name: At_Siliques_P Parameter: Age (day) Value: 21
  misc_feature: MA Experiment 20000235 PARAMETER Experiment Name: At_Siliques_P Parameter: Organism Value: A. thaliana
  misc_feature: MA Experiment 20000235 PARAMETER Experiment Name: At_Siliques_P Parameter: Plant Line Value: WS
  misc_feature: MA Experiment 20000235 PARAMETER Experiment Name: At_Siliques_P Parameter: Tissue Value: 5-10mm Siliques vs. Whole Plant
  misc_feature: MA Experiment ID: 20000437 Result: Down-regulated in Transcription
  misc_feature: MA Experiment 20000437 PARAMETER Experiment Name: At_Drought_P Parameter: Age (day) Value: 8
  misc_feature: MA Experiment 20000437 PARAMETER Experiment Name: At_Drought_P Parameter: Organism Value: A. thaliana
  misc_feature: MA Experiment 20000437 PARAMETER Experiment Name: At_Drought_P Parameter: Plant Line Value: WS
  misc_feature: MA Experiment 20000437 PARAMETER Experiment Name: At_Drought_P Parameter: Timepoint (hr) Value: 24
  misc_feature: MA Experiment 20000437 PARAMETER Experiment Name: At_Drought_P Parameter: Tissue Value: Whole Plant
  misc_feature: MA Experiment 20000437 PARAMETER Experiment Name: At_Drought_P Parameter: Treatment Value: Drought vs. No Drought
  misc_feature: MA Experiment ID: 20000438 Result: Up-regulated in Transcription
  misc_feature: MA Experiment 20000438 PARAMETER Experiment Name: At_Shoots__P Parameter: Age (day) Value: 14
  misc_feature: MA Experiment 20000438 PARAMETER Experiment Name: At_Shoots__P Parameter: Tissue Value: Shoots vs. Whole Plant
  misc_feature: MA Experiment ID: 20000439 Result: Down-regulated in Transcription
  misc_feature: MA Experiment 20000439 PARAMETER Experiment Name: At_Roots__P Parameter: Age (day) Value: 14 vs. 21
  misc_feature: MA Experiment 20000439 PARAMETER Experiment Name: At_Roots__P Parameter: Organism Value: A. thaliana
  misc_feature: MA Experiment 20000439 PARAMETER Experiment Name: At_Roots__P Parameter: Tissue Value: Roots vs. Whole Plant
  misc_feature: MA Experiment ID: 20000441 Result: Up-regulated in Transcription
  misc_feature: MA Experiment 20000441 PARAMETER Experiment Name: At_1uM_BR-BRZ__P Parameter: Tissue Value: Shoot Apices
  misc_feature: MA Experiment 20000441 PARAMETER Experiment Name: At_1uM_BR-BRZ__P Parameter: Treatment Value: 1uM BR vs. No Treatment
  misc_feature: MA Experiment ID: 20000443 Result: Up-regulated in Transcription
  misc_feature: MA Experiment 20000443 PARAMETER Experiment Name: At_1uM_BR-BRZ__P Parameter: Tissue Value: Shoot Apices
  misc_feature: MA Experiment 20000443 PARAMETER Experiment Name: At_1uM_BR-BRZ__P Parameter: Treatment Value: 1uM BRZ vs. No Treatment
  misc_feature: MA Experiment ID: 20001248 Result: Down-regulated in Transcription
  misc_feature: MA Experiment 20001248 PARAMETER Experiment Name: At_Far-red-induction_P Parameter: Age (day) Value: 7
  misc_feature: MA Experiment 20001248 PARAMETER Experiment Name: At_Far-red-induction_P Parameter: Light Value: Far-red vs. White
  misc_feature: MA Experiment 20001248 PARAMETER Experiment Name: At_Far-red-induction_P Parameter: Organism Value: A. thaliana
  misc_feature: MA Experiment 20001248 PARAMETER Experiment Name: At_Far-red-induction_P Parameter: Plant Line Value: Columbia
  misc_feature: MA Experiment 20001248 PARAMETER Experiment Name: At_Far-red-induction_P Parameter: Timepoint (hr) Value: 4
  misc_feature: MA Experiment 20001248 PARAMETER Experiment Name: At_Far-red-induction_P Parameter: Tissue Value: Whole Plant
  misc_feature: MA Experiment ID: 20001450 Result: Down-regulated in Transcription
  misc_feature: MA Experiment 20001450 PARAMETER Experiment Name: At_Far-red-induction_P Parameter: Age (day) Value: 7
  misc_feature: MA Experiment 20001450 PARAMETER Experiment Name: At_Far-red-induction_P Parameter: Light Value: Far-red vs. White
  misc_feature: MA Experiment 20001450 PARAMETER Experiment Name: At_Far-red-induction_P Parameter: Organism Value: A. thaliana
  misc_feature: MA Experiment 20001450 PARAMETER Experiment Name: At_Far-red-induction_P Parameter: Plant Line Value: Columbia
  misc_feature: MA Experiment 20001450 PARAMETER Experiment Name: At_Far-red-induction_P Parameter: Timepoint (hr) Value: 8
  misc_feature: MA Experiment 20001450 PARAMETER Experiment Name: At_Far-red-induction_P Parameter: Tissue Value: Whole Plant
  misc_feature: MA Experiment ID: 20001906 Result: Down-regulated in Transcription
  misc_feature: MA Experiment 20001906 PARAMETER Experiment Name: At_Drought_Reproduction_P Parameter: Age (day) Value: 35
  misc_feature: MA Experiment 20001906 PARAMETER Experiment Name: At_Drought_Reproduction_P Parameter: Organism Value: A. thaliana
  misc_feature: MA Experiment 20001906 PARAMETER Experiment Name: At_Drought_Reproduction_P Parameter: Plant Line Value: WS
  misc_feature: MA Experiment 20001906 PARAMETER Experiment Name: At_Drought_Reproduction_P Parameter: Timepoint (day) Value: 5
  misc_feature: MA Experiment 20001906 PARAMETER Experiment Name: At_Drought_Reproduction_P Parameter: Tissue Value: Siliques
  misc_feature: MA Experiment 20001906 PARAMETER Experiment Name: At_Drought_Reproduction_P Parameter: Treatment Value: Drought vs. No Drought
  misc_feature: MA Experiment ID: 20001908 Result: Down-regulated in Transcription
  misc_feature: MA Experiment 20001908 PARAMETER Experiment Name: At_Drought_Reproduction_P Parameter: Age (day) Value: 40
  misc_feature: MA Experiment 20001908 PARAMETER Experiment Name: At_Drought_Reproduction_P Parameter: Organism Value: A. thaliana
  misc_feature: MA Experiment 20001908 PARAMETER Experiment Name: At_Drought_Reproduction_P Parameter: Plant Line Value: WS
  misc_feature: MA Experiment 20001908 PARAMETER Experiment Name: At_Drought_Reproduction_P Parameter: Timepoint (day) Value: 10
  misc_feature: MA Experiment 20001908 PARAMETER Experiment Name: At_Drought_Reproduction_P Parameter: Tissue Value: Siliques
  misc_feature: MA Experiment 20001908 PARAMETER Experiment Name: At_Drought_Reproduction_P Parameter: Treatment Value: Drought vs. No Drought
  misc_feature: MA Experiment ID: 20001911 Result: Down-regulated in Transcription
  misc_feature: MA Experiment 20001911 PARAMETER Experiment Name: At_Drought_Reproduction_P Parameter: Age (day) Value: 40
  misc_feature: MA Experiment 20001911 PARAMETER Experiment Name: At_Drought_Reproduction_P Parameter: Organism Value: A. thaliana
  misc_feature: MA Experiment 20001911 PARAMETER Experiment Name: At_Drought_Reproduction_P Parameter: Plant Line Value: WS
  misc_feature: MA Experiment 20001911 PARAMETER Experiment Name: At_Drought_Reproduction_P Parameter: Timepoint (day) Value: 10
  misc_feature: MA Experiment 20001911 PARAMETER Experiment Name: At_Drought_Reproduction_P Parameter: Tissue Value: Flowers
  misc_feature: MA Experiment 20001911 PARAMETER Experiment Name: At_Drought_Reproduction_P Parameter: Treatment Value: Drought vs. No Drought

SEQ ID NO: 34665 - protein, 302 aa, Arabidopsis thaliana; identical to SEQ ID NO: 31075
  peptide (1)..(302): Ceres Seq. ID no. 12396986
  misc_feature (186)..(292): Homolog of NCBI NO: 12082335 NR Description: thioredoxin h [Oryza sativa (japonica
  misc_feature (182)..(302): Homolog of NCBI NO: 9294492 NR Description: thioredoxin-like protein [Arabidopsis thaliana]
  misc_feature (189)..(301): Homolog of NCBI NO: 40287476 NR Description: thioredoxin [Capsicum annuum]
  misc_feature (200)..(298): Homolog of NCBI NO: 15223645 NR Description: thioredoxin; protein id: At1g19730.1, supported
  misc_feature (200)..(298): Homolog of NCBI NO: 2117426 NR Description: thioredoxin (clone GREN) - Arabidopsis thaliana
  misc_feature (187)..(298): Homolog of NCBI NO: 21617968 NR Description: thioredoxin [Arabidopsis thaliana]
  misc_feature (1)..(301): Homolog of NCBI NO: 34901636 NR Description: putative plastid thioredoxin
  misc_feature (1)..(302): Homolog of NCBI NO: 7489278 NR Description: thioredoxin-like protein CDSP32, chloroplast -
  misc_feature (1)..(302): Homolog of NCBI NO: 15222954 NR Description: chloroplast drought-induced stress protein,
  misc_feature (1)..(302): Homolog of NCBI NO: 21554102 NR Description: chloroplast drought-induced stress protein,

SEQ ID NO: 34666 - protein, 188 aa, Arabidopsis thaliana; identical to SEQ ID NO: 31076
  peptide (1)..(188): Ceres Seq. ID no. 12396987
  misc_feature (72)..(178): Homolog of NCBI NO: 12082335 NR Description: thioredoxin h [Oryza sativa (japonica
  misc_feature (68)..(188): Homolog of NCBI NO: 9294492 NR Description: thioredoxin-like protein [Arabidopsis thaliana]
  misc_feature (75)..(187): Homolog of NCBI NO: 40287476 NR Description: thioredoxin [Capsicum annuum]
  misc_feature (86)..(184): Homolog of NCBI NO: 15223645 NR Description: thioredoxin; protein id: At1g19730.1, supported
  misc_feature (86)..(184): Homolog of NCBI NO: 2117426 NR Description: thioredoxin (clone GREN) - Arabidopsis thaliana
  misc_feature (73)..(184): Homolog of NCBI NO: 21617968 NR Description: thioredoxin [Arabidopsis thaliana]
  misc_feature (1)..(187): Homolog of NCBI NO: 34901636 NR Description: putative plastid thioredoxin
  misc_feature (1)..(188): Homolog of NCBI NO: 7489278 NR Description: thioredoxin-like protein CDSP32, chloroplast -
  misc_feature (1)..(188): Homolog of NCBI NO: 15222954 NR Description: chloroplast drought-induced stress protein,
  misc_feature (1)..(188): Homolog of NCBI NO: 21554102 NR Description: chloroplast drought-induced stress protein,

SEQ ID NO: 34667 - protein, 172 aa, Arabidopsis thaliana; identical to SEQ ID NO: 31077
  peptide (1)..(172): Ceres Seq. ID no. 12396988
  misc_feature (56)..(162): Homolog of NCBI NO: 12082335 NR Description: thioredoxin h [Oryza sativa (japonica
  misc_feature (52)..(172): Homolog of NCBI NO: 9294492 NR Description: thioredoxin-like protein [Arabidopsis thaliana]
  misc_feature (59)..(171): Homolog of NCBI NO: 40287476 NR Description: thioredoxin [Capsicum annuum]
  misc_feature (70)..(168): Homolog of NCBI NO: 15223645 NR Description: thioredoxin; protein id: At1g19730.1, supported
  misc_feature (70)..(168): Homolog of NCBI NO: 2117426 NR Description: thioredoxin (clone GREN) - Arabidopsis thaliana
  misc_feature (57)..(168): Homolog of NCBI NO: 21617968 NR Description: thioredoxin [Arabidopsis thaliana]
  misc_feature (1)..(171): Homolog of NCBI NO: 34901636 NR Description: putative plastid thioredoxin
  misc_feature (1)..(172): Homolog of NCBI NO: 7489278 NR Description: thioredoxin-like protein CDSP32, chloroplast -
  misc_feature (1)..(172): Homolog of NCBI NO: 15222954 NR Description: chloroplast drought-induced stress protein,
  misc_feature (1)..(172): Homolog of NCBI NO: 21554102 NR Description: chloroplast drought-induced stress protein,

SEQ ID NO: 34668 - DNA, 1838 bp, Arabidopsis thaliana; identical to SEQ ID NO: 31078
  misc_feature (1)..(1838): Ceres Seq. ID no. 12322952
  misc_feature: MA Experiment ID: 108576 Result: Up-regulated in Transcription
  misc_feature: MA Experiment 108576 PARAMETER Experiment Name: At_42deg_Heat_cDNA_P Parameter: Temperature (deg C) Value: 42 vs. 22
  misc_feature: MA Experiment 108576 PARAMETER Experiment Name: At_42deg_Heat_cDNA_P Parameter: Timepoint (hr) Value: 1
  misc_feature: MA Experiment 108576 PARAMETER Experiment Name: At_42deg_Heat_cDNA_P Parameter: Tissue Value: Aerial
  misc_feature: MA Experiment ID: 108577 Result: Up-regulated in Transcription
  misc_feature: MA Experiment 108577 PARAMETER Experiment Name: At_42deg_Heat_cDNA_P Parameter: Temperature (deg C) Value: 42 vs. 22
  misc_feature: MA Experiment 108577 PARAMETER Experiment Name: At_42deg_Heat_cDNA_P Parameter: Timepoint (hr) Value: 6
  misc_feature: MA Experiment 108577 PARAMETER Experiment Name: At_42deg_Heat_cDNA_P Parameter: Tissue Value: Aerial
  misc_feature: MA Experiment ID: 20000072 Result: Down-regulated in Transcription
  misc_feature: MA Experiment 20000072 PARAMETER Experiment Name: At_100uM_ABA_Mutants_cDNA_P Parameter: Plant Line Value: CS8105
  misc_feature: MA Experiment 20000072 PARAMETER Experiment Name: At_100uM_ABA_Mutants_cDNA_P Parameter: Timepoint (hr) Value: 6
  misc_feature: MA Experiment 20000072 PARAMETER Experiment Name: At_100uM_ABA_Mutants_cDNA_P Parameter: Tissue Value: Aerial
  misc_feature: MA Experiment 20000072 PARAMETER Experiment Name: At_100uM_ABA_Mutants_cDNA_P Parameter: Treatment Value: 100uM ABA vs. No Treatment
  misc_feature: MA Experiment ID: 20000090 Result: Down-regulated in Transcription
  misc_feature: MA Experiment ID: 20000093 Result: Up-regulated in Transcription
  misc_feature: MA Experiment 20000093 PARAMETER Experiment Name: At_42deg_Heat_cDNA_P Parameter: Temperature (deg C) Value: 42 vs. 22
  misc_feature: MA Experiment 20000093 PARAMETER Experiment Name: At_42deg_Heat_cDNA_P Parameter: Timepoint (hr) Value: 0.5
  misc_feature: MA Experiment 20000093 PARAMETER Experiment Name: At_42deg_Heat_cDNA_P Parameter: Tissue Value: Aerial
  misc_feature: MA Experiment ID: 20000111 Result: Up-regulated in Transcription
  misc_feature: MA Experiment 20000111 PARAMETER Experiment Name: At_42deg_Heat_cDNA_P Parameter: Temperature (deg C) Value: 42 vs. 22
  misc_feature: MA Experiment 20000111 PARAMETER Experiment Name: At_42deg_Heat_cDNA_P Parameter: Timepoint (hr) Value: 6
  misc_feature: MA Experiment 20000111 PARAMETER Experiment Name: At_42deg_Heat_cDNA_P Parameter: Tissue Value: Aerial
  misc_feature: MA Experiment ID: 20000112 Result: Up-regulated in Transcription
  misc_feature: MA Experiment 20000112 PARAMETER Experiment Name: At_42deg_Heat_cDNA_P Parameter: Temperature (deg C) Value: 42 vs. 22
  misc_feature: MA Experiment 20000112 PARAMETER Experiment Name: At_42deg_Heat_cDNA_P Parameter: Timepoint (hr) Value: 2
  misc_feature: MA Experiment 20000112 PARAMETER Experiment Name: At_42deg_Heat_cDNA_P Parameter: Tissue Value: Aerial
  misc_feature: MA Experiment ID: 20000171 Result: Up-regulated in Transcription
  misc_feature: MA Experiment 20000171 PARAMETER Experiment Name: At_42deg_Heat_P Parameter: Age (day) Value: 14
  misc_feature: MA Experiment 20000171 PARAMETER Experiment Name: At_42deg_Heat_P Parameter: Organism Value: A. thaliana
  misc_feature: MA Experiment 20000171 PARAMETER Experiment Name: At_42deg_Heat_P Parameter: Plant Line Value: WS
  misc_feature: MA Experiment 20000171 PARAMETER Experiment Name: At_42deg_Heat_P Parameter: Temperature (deg C) Value: 42 vs. 22
  misc_feature: MA Experiment 20000171 PARAMETER Experiment Name: At_42deg_Heat_P Parameter: Timepoint (hr) Value: 1
  misc_feature: MA Experiment 20000171 PARAMETER Experiment Name: At_42deg_Heat_P Parameter: Tissue Value: Aerial
  misc_feature: MA Experiment ID: 20000438 Result: Down-regulated in Transcription
  misc_feature: MA Experiment 20000438 PARAMETER Experiment Name: At_Shoots__P Parameter: Age (day) Value: 14
  misc_feature: MA Experiment 20000438 PARAMETER Experiment Name: At_Shoots__P Parameter: Tissue Value: Shoots vs. Whole Plant
  misc_feature: MA Experiment ID: 20001248 Result: Up-regulated in Transcription
  misc_feature: MA Experiment 20001248 PARAMETER Experiment Name: At_Far-red-induction_P Parameter: Age (day) Value: 7
  misc_feature: MA Experiment 20001248 PARAMETER Experiment Name: At_Far-red-induction_P Parameter: Light Value: Far-red vs. White
  misc_feature: MA Experiment 20001248 PARAMETER Experiment Name: At_Far-red-induction_P Parameter: Organism Value: A. thaliana
  misc_feature: MA Experiment 20001248 PARAMETER Experiment Name: At_Far-red-induction_P Parameter: Plant Line Value: Columbia
  misc_feature: MA Experiment 20001248 PARAMETER Experiment Name: At_Far-red-induction_P Parameter: Timepoint (hr) Value: 4
  misc_feature: MA Experiment 20001248 PARAMETER Experiment Name: At_Far-red-induction_P Parameter: Tissue Value: Whole Plant

SEQ ID NO: 34669 - protein, 377 aa, Arabidopsis thaliana; identical to SEQ ID NO: 31079
  peptide (1)..(377): Ceres Seq. ID no. 12322953
  misc_feature (103)..(212): Pfam Name: Arabidopsis protein of unknown function, DUF266 Pfam Description: Arabidopsis protein of unknown function, DUF266
  misc_feature (31)..(363): Homolog of NCBI NO: 26452247 NR Description: unknown protein [Arabidopsis thaliana]
  misc_feature (58)..(363): Homolog of NCBI NO: 38346557 NR Description: OSJNBa0035M09.18 [Oryza sativa (japonica
  misc_feature (58)..(364): Homolog of NCBI NO: 22327910 NR Description: putative protein
  misc_feature (58)..(364): Homolog of NCBI NO: 17065016 NR Description: Unknown protein [Arabidopsis thaliana]
  misc_feature (65)..(322): Homolog of NCBI NO: 34911442 NR Description: P0431H09.21 [Oryza sativa (japonica
  misc_feature (270)..(368): Homolog of NCBI NO: 25402693 NR Description: hypothetical protein [imported] - Arabidopsis
  misc_feature (17)..(238): Homolog of NCBI NO: 25402693 NR Description: hypothetical protein [imported] - Arabidopsis
  misc_feature (17)..(368): Homolog of NCBI NO: 30682534 NR Description: expressed protein [Arabidopsis thaliana]
  misc_feature (1)..(322): Homolog of NCBI NO: 30684956 NR Description: expressed protein [Arabidopsis thaliana]
  misc_feature (1)..(377): Homolog of NCBI NO: 15241437 NR Description: putative protein; protein id: At5g14550.1

SEQ ID NO: 34670 - protein, 355 aa, Arabidopsis thaliana; identical to SEQ ID NO: 31080
  peptide (1)..(355): Ceres Seq. ID no. 12322954
  misc_feature (81)..(190): Pfam Name: Arabidopsis protein of unknown function, DUF266 Pfam Description: Arabidopsis protein of unknown function, DUF266
  misc_feature (9)..(341): Homolog of NCBI NO: 26452247 NR Description: unknown protein [Arabidopsis thaliana]
  misc_feature (36)..(341): Homolog of NCBI NO: 38346557 NR Description: OSJNBa0035M09.18 [Oryza sativa (japonica
  misc_feature (36)..(342): Homolog of NCBI NO: 22327910 NR Description: putative protein
  misc_feature (36)..(342): Homolog of NCBI NO: 17065016 NR Description: Unknown protein [Arabidopsis thaliana]
  misc_feature (43)..(300): Homolog of NCBI NO: 34911442 NR Description: P0431H09.21 [Oryza sativa (japonica
  misc_feature (248)..(346): Homolog of NCBI NO: 25402693 NR Description: hypothetical protein [imported] - Arabidopsis
  misc_feature (1)..(216): Homolog of NCBI NO: 25402693 NR Description: hypothetical protein [imported] - Arabidopsis
  misc_feature (1)..(346): Homolog of NCBI NO: 30682534 NR Description: expressed protein [Arabidopsis thaliana]
  misc_feature (1)..(300): Homolog of NCBI NO: 30684956 NR Description: expressed protein [Arabidopsis thaliana]
  misc_feature (1)..(355): Homolog of NCBI NO: 15241437 NR Description: putative protein; protein id: At5g14550.1

SEQ ID NO: 34671 - protein, 245 aa, Arabidopsis thaliana; identical to SEQ ID NO: 31081
  peptide (1)..(245): Ceres Seq. ID no. 12322955
  misc_feature (1)..(80): Pfam Name: Arabidopsis protein of unknown function, DUF266 Pfam Description: Arabidopsis protein of unknown function, DUF266
  misc_feature (1)..(231): Homolog of NCBI NO: 26452247 NR Description: unknown protein [Arabidopsis thaliana]
  misc_feature (1)..(231): Homolog of NCBI NO: 38346557 NR Description: OSJNBa0035M09.18 [Oryza sativa (japonica
  misc_feature (1)..(232): Homolog of NCBI NO: 22327910 NR Description: putative protein
  misc_feature (1)..(232): Homolog of NCBI NO: 17065016 NR Description: Unknown protein [Arabidopsis thaliana]
  misc_feature (1)..(190): Homolog of NCBI NO: 34911442 NR Description: P0431H09.21 [Oryza sativa (japonica
  misc_feature (138)..(236): Homolog of NCBI NO: 25402693 NR Description: hypothetical protein [imported] - Arabidopsis
  misc_feature (1)..(106): Homolog of NCBI NO: 25402693 NR Description: hypothetical protein [imported] - Arabidopsis
  misc_feature (1)..(236): Homolog of NCBI NO: 30682534 NR Description: expressed protein [Arabidopsis thaliana]
  misc_feature (1)..(190): Homolog of NCBI NO: 30684956 NR Description: expressed protein [Arabidopsis thaliana]
  misc_feature (1)..(245): Homolog of NCBI NO: 15241437 NR Description: putative protein; protein id: At5g14550.1

SEQ ID NO: 34672 - DNA, 699 bp, Arabidopsis thaliana; identical to SEQ ID NO: 31082
  misc_feature (1)..(699): Ceres Seq. ID no. 12322132
  misc_feature: MA Experiment ID: 108434 Result: Down-regulated in Transcription
  misc_feature: MA Experiment 108434 PARAMETER Experiment Name: At_Root_Tips_cDNA_P Parameter: Tissue Value: Root Tips
  misc_feature: MA Experiment ID: 108573 Result: Up-regulated in Transcription
  misc_feature: MA Experiment 108573 PARAMETER Experiment Name: At_Drought_cDNA_P Parameter: Timepoint (hr) Value: 6
  misc_feature: MA Experiment 108573 PARAMETER Experiment Name: At_Drought_cDNA_P Parameter: Tissue Value: Aerial
  misc_feature: MA Experiment 108573 PARAMETER Experiment Name: At_Drought_cDNA_P Parameter: Treatment Value: Drought vs. No Drought
  misc_feature: MA Experiment ID: 108585 Result: Up-regulated in Transcription
  misc_feature: MA Experiment 108585 PARAMETER Experiment Name: At_5mM_NaNP_cDNA_P Parameter: Timepoint (hr) Value: 6
  misc_feature: MA Experiment 108585 PARAMETER Experiment Name: At_5mM_NaNP_cDNA_P Parameter: Tissue Value: Aerial
  misc_feature: MA Experiment 108585 PARAMETER Experiment Name: At_5mM_NaNP_cDNA_P Parameter: Treatment Value: null
  misc_feature: MA Experiment ID: 108595 Result: Up-regulated in Transcription
  misc_feature: MA Experiment 108595 PARAMETER Experiment Name: At_Ler-pi_Ovule_cDNA_P Parameter: Plant Line Value: null
  misc_feature: MA Experiment ID: 20000224 Result: Down-regulated in Transcription
  misc_feature: MA Experiment ID: 20000227 Result: Down-regulated in Transcription
  misc_feature: MA Experiment 20000227 PARAMETER Experiment Name: At_Root-Tips-vs-Tops_P Parameter: Tissue Value: Root Tips vs. Root Tops
  misc_feature: MA Experiment ID: 20000286 Result: Down-regulated in Transcription
  misc_feature: MA Experiment 20000286 PARAMETER Experiment Name: At_Open_Flower_P Parameter: Age (day) Value: 21
  misc_feature: MA Experiment 20000286 PARAMETER Experiment Name: At_Open_Flower_P Parameter: Plant Line Value: WS
  misc_feature: MA Experiment 20000286 PARAMETER Experiment Name: At_Open_Flower_P Parameter: Tissue Value: Half Open vs. Whole Plant
  misc_feature: MA Experiment ID: 20001905 Result: Up-regulated in Transcription
  misc_feature: MA Experiment 20001905 PARAMETER Experiment Name: At_Drought_Reproduction_P Parameter: Age (day) Value: 40
  misc_feature: MA Experiment 20001905 PARAMETER Experiment Name: At_Drought_Reproduction_P Parameter: Organism Value: A. thaliana
  misc_feature: MA Experiment 20001905 PARAMETER Experiment Name: At_Drought_Reproduction_P Parameter: Plant Line Value: WS
  misc_feature: MA Experiment 20001905 PARAMETER Experiment Name: At_Drought_Reproduction_P Parameter: Timepoint (day) Value: 10
  misc_feature: MA Experiment 20001905 PARAMETER Experiment Name: At_Drought_Reproduction_P Parameter: Tissue Value: Rosettes
  misc_feature: MA Experiment 20001905 PARAMETER Experiment Name: At_Drought_Reproduction_P Parameter: Treatment Value: Drought vs. No Drought

SEQ ID NO: 34673 - protein, 117 aa, Arabidopsis thaliana; identical to SEQ ID NO: 31083
  peptide (1)..(117): Ceres Seq. ID no. 12322133
  misc_feature (35)..(82): Pfam Name: Kazal-type serine protease inhibitor domain Pfam Description: Kazal-type serine protease inhibitor domain
  misc_feature (2)..(115): Homolog of NCBI NO: 34909170 NR Description: P0468B07.28 [Oryza sativa (japonica
  misc_feature (1)..(117): Homolog of NCBI NO: 21555759 NR Description: unknown [Arabidopsis thaliana]
  misc_feature (1)..(117): Homolog of NCBI NO: 18411677 NR Description: Expressed protein
  misc_feature (1)..(117): Homolog of NCBI NO: 21554106 NR Description: unknown [Arabidopsis thaliana]
  misc_feature (1)..(117): Homolog of NCBI NO: 18412211 NR Description: expressed protein

SEQ ID NO: 34674 - DNA, 687 bp, Arabidopsis thaliana; identical to SEQ ID NO: 31084
  misc_feature (1)..(687): Ceres Seq. ID no. 13499600
  misc_feature: MA Experiment ID: 108433 Result: Up-regulated in Transcription
  misc_feature: MA Experiment 108433 PARAMETER Experiment Name: At_rhl_Mutant2_cDNA_P Parameter: Age (day) Value: 7
  misc_feature: MA Experiment 108433 PARAMETER Experiment Name: At_rhl_Mutant2_cDNA_P Parameter: Organism Value: A. thaliana
  misc_feature: MA Experiment 108433 PARAMETER Experiment Name: At_rhl_Mutant2_cDNA_P Parameter: Plant Line Value: rhl Mutant vs. wt landsburg
  misc_feature: MA Experiment 108433 PARAMETER Experiment Name: At_rhl_Mutant2_cDNA_P Parameter: Tissue Value: Roots
  misc_feature: MA Experiment ID: 108434 Result: Down-regulated in Transcription
  misc_feature: MA Experiment 108434 PARAMETER Experiment Name: At_Root_Tips_cDNA_P Parameter: Tissue Value: Root Tips
  misc_feature: MA Experiment ID: 108464 Result: Up-regulated in Transcription
  misc_feature: MA Experiment 108464 PARAMETER Experiment Name: At_Germinating_Seeds_cDNA_P Parameter: Age (day) Value: 4 vs. 0
  misc_feature: MA Experiment 108464 PARAMETER Experiment Name: At_Germinating_Seeds_cDNA_P Parameter: Tissue Value: Germinating Seeds
  misc_feature: MA Experiment ID: 108561 Result: Down-regulated in Transcription
  misc_feature: MA Experiment 108561 PARAMETER Experiment Name: At_100uM_ABA_cDNA_P Parameter: Timepoint (hr) Value: 6
  misc_feature: MA Experiment 108561 PARAMETER Experiment Name: At_100uM_ABA_cDNA_P Parameter: Tissue Value: Aerial
  misc_feature: MA Experiment 108561 PARAMETER Experiment Name: At_100uM_ABA_cDNA_P Parameter: Treatment Value: 100uM ABA vs. No Treatment
  misc_feature: MA Experiment ID: 108577 Result: Up-regulated in Transcription
  misc_feature: MA Experiment 108577 PARAMETER Experiment Name: At_42deg_Heat_cDNA_P Parameter: Temperature (deg C) Value: 42 vs. 22
  misc_feature: MA Experiment 108577 PARAMETER Experiment Name: At_42deg_Heat_cDNA_P Parameter: Timepoint (hr) Value: 6
  misc_feature: MA Experiment 108577 PARAMETER Experiment Name: At_42deg_Heat_cDNA_P Parameter: Tissue Value: Aerial
  misc_feature: MA Experiment ID: 108594 Result: Down-regulated in Transcription
  misc_feature: MA Experiment 108594 PARAMETER Experiment Name: At_Ler-rhl_Root_cDNA_P Parameter: Plant Line Value: null
  misc_feature: MA Experiment ID: 20000113 Result: Up-regulated in Transcription
  misc_feature: MA Experiment 20000113 PARAMETER Experiment Name: At_42deg_Heat_cDNA_P Parameter: Temperature (deg C) Value: 42 vs. 22
  misc_feature: MA Experiment 20000113 PARAMETER Experiment Name: At_42deg_Heat_cDNA_P Parameter: Timepoint (hr) Value: 8
  misc_feature: MA Experiment 20000113 PARAMETER Experiment Name: At_42deg_Heat_cDNA_P Parameter: Tissue Value: Aerial
  misc_feature: MA Experiment ID: 20000184 Result: Up-regulated in Transcription
  misc_feature: MA Experiment 20000184 PARAMETER Experiment Name: At_Shoots__P Parameter: Age (day) Value: 7
  misc_feature: MA Experiment 20000184 PARAMETER Experiment Name: At_Shoots__P Parameter: Tissue Value: Shoots vs. Whole Plant
  misc_feature: MA Experiment ID: 20000185 Result: Up-regulated in Transcription
  misc_feature: MA Experiment 20000185 PARAMETER Experiment Name: At_Roots__P Parameter: Age (day) Value: 7 vs. 21
  misc_feature: MA Experiment 20000185 PARAMETER Experiment Name: At_Roots__P Parameter: Organism Value: A. thaliana
  misc_feature: MA Experiment 20000185 PARAMETER Experiment Name: At_Roots__P Parameter: Tissue Value: Roots vs. Whole Plant
  misc_feature: MA Experiment ID: 20000227 Result: Down-regulated in Transcription
  misc_feature: MA Experiment 20000227 PARAMETER Experiment Name: At_Root-Tips-vs-Tops_P Parameter: Tissue Value: Root Tips vs. Root Tops
  misc_feature: MA Experiment ID: 20000437 Result: Down-regulated in Transcription
  misc_feature: MA Experiment 20000437 PARAMETER Experiment Name: At_Drought_P Parameter: Age (day) Value: 8
  misc_feature: MA Experiment 20000437 PARAMETER Experiment Name: At_Drought_P Parameter: Organism Value: A. thaliana
  misc_feature: MA Experiment 20000437 PARAMETER Experiment Name: At_Drought_P Parameter: Plant Line Value: WS
  misc_feature: MA Experiment 20000437 PARAMETER Experiment Name: At_Drought_P Parameter: Timepoint (hr) Value: 24
  misc_feature: MA Experiment 20000437 PARAMETER Experiment Name: At_Drought_P Parameter: Tissue Value: Whole Plant
  misc_feature: MA Experiment 20000437 PARAMETER Experiment Name: At_Drought_P Parameter: Treatment Value: Drought vs. No Drought
  misc_feature: MA Experiment ID: 20000439 Result: Up-regulated in Transcription
  misc_feature: MA Experiment 20000439 PARAMETER Experiment Name: At_Roots__P Parameter: Age (day) Value: 14 vs. 21
  misc_feature: MA Experiment 20000439 PARAMETER Experiment Name: At_Roots__P Parameter: Organism Value: A. thaliana
  misc_feature: MA Experiment 20000439 PARAMETER Experiment Name: At_Roots__P Parameter: Tissue Value: Roots vs. Whole Plant
  misc_feature: MA Experiment ID: 20000460 Result: Down-regulated in Transcription
  misc_feature: MA Experiment 20000460 PARAMETER Experiment Name: At_10percent_PEG_P Parameter: Age (day) Value: 12
  misc_feature: MA Experiment 20000460 PARAMETER Experiment Name: At_10percent_PEG_P Parameter: Organism Value: A. thaliana
  misc_feature: MA Experiment 20000460 PARAMETER Experiment Name: At_10percent_PEG_P Parameter: Plant Line Value: WS
  misc_feature: MA Experiment 20000460 PARAMETER Experiment Name: At_10percent_PEG_P Parameter: Timepoint (day) Value: 12
  misc_feature: MA Experiment 20000460 PARAMETER Experiment Name: At_10percent_PEG_P Parameter: Tissue Value: Whole Plant
  misc_feature: MA Experiment 20000460 PARAMETER Experiment Name: At_10percent_PEG_P Parameter: Treatment Value: 10percent PEG vs. No Treatment
  misc_feature: MA Experiment ID: 20000574 Result: Down-regulated in Transcription
  misc_feature: MA Experiment 20000574 PARAMETER Experiment Name: At_100uM_ABA_Mutants__P Parameter: Organism Value: A. thaliana
  misc_feature: MA Experiment 20000574 PARAMETER Experiment Name: At_100uM_ABA_Mutants__P Parameter: Plant Line Value: CS23 vs. Ler wt
  misc_feature: MA Experiment 20000574 PARAMETER Experiment Name: At_100uM_ABA_Mutants__P Parameter: Timepoint (hr) Value: N/A
  misc_feature: MA Experiment 20000574 PARAMETER Experiment Name: At_100uM_ABA_Mutants__P Parameter: Tissue Value: Whole Plant
  misc_feature: MA Experiment 20000574 PARAMETER Experiment Name: At_100uM_ABA_Mutants__P Parameter: Treatment Value: None
  misc_feature: MA Experiment ID: 20000575 Result: Down-regulated in Transcription
  misc_feature: MA Experiment 20000575 PARAMETER Experiment Name: At_100uM_ABA_Mutants__P Parameter: Organism Value: A. thaliana
  misc_feature: MA Experiment 20000575 PARAMETER Experiment Name: At_100uM_ABA_Mutants__P Parameter: Plant Line Value: CS22
  misc_feature: MA Experiment 20000575 PARAMETER Experiment Name: At_100uM_ABA_Mutants__P Parameter: Timepoint (hr) Value: 6
  misc_feature: MA Experiment 20000575 PARAMETER Experiment Name: At_100uM_ABA_Mutants__P Parameter: Tissue Value: Whole Plant
  misc_feature: MA Experiment 20000575 PARAMETER Experiment Name: At_100uM_ABA_Mutants__P Parameter: Treatment Value: 1uM ABA vs. No Treatment
  misc_feature: MA Experiment ID: 20000576 Result: Down-regulated in Transcription
  misc_feature: MA Experiment 20000576 PARAMETER Experiment Name: At_100uM_ABA_Mutants__P Parameter: Organism Value: A. thaliana
  misc_feature: MA Experiment 20000576 PARAMETER Experiment Name: At_100uM_ABA_Mutants__P Parameter: Plant Line Value: CS23
  misc_feature: MA Experiment 20000576 PARAMETER Experiment Name: At_100uM_ABA_Mutants__P Parameter: Timepoint (hr) Value: 6
  misc_feature: MA Experiment 20000576 PARAMETER Experiment Name: At_100uM_ABA_Mutants__P Parameter: Tissue Value: Whole Plant
  misc_feature: MA Experiment 20000576 PARAMETER Experiment Name: At_100uM_ABA_Mutants__P Parameter: Treatment Value: 1uM ABA vs. No Treatment
  misc_feature: MA Experiment ID: 20001451 Result: Up-regulated in Transcription
  misc_feature: MA Experiment 20001451 PARAMETER Experiment Name: At_Far-red-induction_P Parameter: Age (day) Value: 7
  misc_feature: MA Experiment 20001451 PARAMETER Experiment Name: At_Far-red-induction_P Parameter: Light Value: Far-red vs. White
  misc_feature: MA Experiment 20001451 PARAMETER Experiment Name: At_Far-red-induction_P Parameter: Organism Value: A. thaliana
  misc_feature: MA Experiment 20001451 PARAMETER Experiment Name: At_Far-red-induction_P Parameter: Plant Line Value: Columbia
  misc_feature: MA Experiment 20001451 PARAMETER Experiment Name: At_Far-red-induction_P Parameter: Timepoint (hr) Value: 24
  misc_feature: MA Experiment 20001451 PARAMETER Experiment Name: At_Far-red-induction_P Parameter: Tissue Value: Whole Plant

SEQ ID NO: 34675 - protein, 111 aa, Arabidopsis thaliana; identical to SEQ ID NO: 31085
  peptide (1)..(111): Ceres Seq. ID no. 13499601
  misc_feature (28)..(110): Pfam Name: Protease inhibitor/seed storage/LTP family Pfam Description: Protease inhibitor/seed storage/LTP family
  misc_feature (22)..(110): Homolog of NCBI NO: 15221201 NR Description: protease inhibitor/seed storage/lipid transfer
  misc_feature (5)..(28): Homolog of NCBI NO: 15235390 NR Description: protease inhibitor/seed storage/lipid transfer
  misc_feature (21)..(111): Homolog of NCBI NO: 15235390 NR Description: protease inhibitor/seed storage/lipid transfer
  misc_feature (1)..(111): Homolog of NCBI NO: 30682157 NR Description: protease inhibitor/seed storage/lipid transfer
  misc_feature (4)..(111): Homolog of NCBI NO: 11357189 NR Description: auxin-induced protein AIR1
  misc_feature (1)..(111): Homolog of NCBI NO: 15235406 NR Description: protease inhibitor/seed storage/lipid transfer
  misc_feature (1)..(111): Homolog of NCBI NO: 21554111 NR Description: putative cell wall-plasma membrane disconnecting

SEQ ID NO: 34676 - DNA, 1390 bp, Arabidopsis thaliana; identical to SEQ ID NO: 31086
  misc_feature (1)..(1390): Ceres Seq. ID no. 12489610
  misc_feature: MA Experiment ID: 20000179 Result: Up-regulated in Transcription
  misc_feature: MA Experiment 20000179 PARAMETER Experiment Name: At_Germinating_Seeds_P Parameter: Age (hr) Value: 6 vs. 0
  misc_feature: MA Experiment 20000179 PARAMETER Experiment Name: At_Germinating_Seeds_P Parameter: Tissue Value: Germinating Seeds
  misc_feature: MA Experiment ID: 20000180 Result: Up-regulated in Transcription
  misc_feature: MA Experiment 20000180 PARAMETER Experiment Name: At_Germinating_Seeds_P Parameter: Age (hr) Value: 24 vs. 0
  misc_feature: MA Experiment 20000180 PARAMETER Experiment Name: At_Germinating_Seeds_P Parameter: Tissue Value: Germinating Seeds
  misc_feature: MA Experiment ID: 20000185 Result: Down-regulated in Transcription
  misc_feature: MA Experiment 20000185 PARAMETER Experiment Name: At_Roots__P Parameter: Age (day) Value: 7 vs. 21
  misc_feature: MA Experiment 20000185 PARAMETER Experiment Name: At_Roots__P Parameter: Organism Value: A. thaliana
  misc_feature: MA Experiment 20000185 PARAMETER Experiment Name: At_Roots__P Parameter: Tissue Value: Roots vs. Whole Plant
  misc_feature: MA Experiment ID: 20000439 Result: Down-regulated in Transcription
  misc_feature: MA Experiment 20000439 PARAMETER Experiment Name: At_Roots__P Parameter: Age (day) Value: 14 vs. 21
  misc_feature: MA Experiment 20000439 PARAMETER Experiment Name: At_Roots__P Parameter: Organism Value: A. thaliana
  misc_feature: MA Experiment 20000439 PARAMETER Experiment Name: At_Roots__P Parameter: Tissue Value: Roots vs. Whole Plant
  misc_feature: MA Experiment ID: 20000794 Result: Down-regulated in Transcription
  misc_feature: MA Experiment 20000794 PARAMETER Experiment Name: At_Petals_P Parameter: Age (day) Value: 23-25 days
  misc_feature: MA Experiment 20000794 PARAMETER Experiment Name: At_Petals_P Parameter: Plant Line Value: WS
  misc_feature: MA Experiment 20000794 PARAMETER Experiment Name: At_Petals_P Parameter: Tissue Value: Petals vs. Whole plant
  misc_feature: MA Experiment ID: 20001247 Result: Down-regulated in Transcription
  misc_feature: MA Experiment 20001247 PARAMETER Experiment Name: At_Far-red-induction_P Parameter: Age (day) Value: 7
  misc_feature: MA Experiment 20001247 PARAMETER Experiment Name: At_Far-red-induction_P Parameter: Light Value: Far-red vs. White
  misc_feature: MA Experiment 20001247 PARAMETER Experiment Name: At_Far-red-induction_P Parameter: Organism Value: A. thaliana
  misc_feature: MA Experiment 20001247 PARAMETER Experiment Name: At_Far-red-induction_P Parameter: Plant Line Value: Columbia
  misc_feature: MA Experiment 20001247 PARAMETER Experiment Name: At_Far-red-induction_P Parameter: Timepoint (hr) Value: 1
  misc_feature: MA Experiment 20001247 PARAMETER Experiment Name: At_Far-red-induction_P Parameter: Tissue Value: Whole Plant
  misc_feature: MA Experiment ID: 20001450 Result: Down-regulated in Transcription
  misc_feature: MA Experiment 20001450 PARAMETER Experiment Name: At_Far-red-induction_P Parameter: Age (day) Value: 7
  misc_feature: MA Experiment 20001450 PARAMETER Experiment Name: At_Far-red-induction_P Parameter: Light Value: Far-red vs. White
  misc_feature: MA Experiment 20001450 PARAMETER Experiment Name: At_Far-red-induction_P Parameter: Organism Value: A. thaliana
  misc_feature: MA Experiment 20001450 PARAMETER Experiment Name: At_Far-red-induction_P Parameter: Plant Line Value: Columbia
  misc_feature: MA Experiment 20001450 PARAMETER Experiment Name: At_Far-red-induction_P Parameter: Timepoint (hr) Value: 8
  misc_feature: MA Experiment 20001450 PARAMETER Experiment Name: At_Far-red-induction_P Parameter: Tissue Value: Whole Plant
  misc_feature: MA Experiment ID: 20001451 Result: Down-regulated in Transcription
  misc_feature: MA Experiment 20001451 PARAMETER Experiment Name: At_Far-red-induction_P Parameter: Age (day) Value: 7
  misc_feature: MA Experiment 20001451 PARAMETER Experiment Name: At_Far-red-induction_P Parameter: Light Value: Far-red vs. White
  misc_feature: MA Experiment 20001451 PARAMETER Experiment Name: At_Far-red-induction_P Parameter: Organism Value: A. thaliana
  misc_feature: MA Experiment 20001451 PARAMETER Experiment Name: At_Far-red-induction_P Parameter: Plant Line Value: Columbia
  misc_feature: MA Experiment 20001451 PARAMETER Experiment Name: At_Far-red-induction_P Parameter: Timepoint (hr) Value: 24
  misc_feature: MA Experiment 20001451 PARAMETER Experiment Name: At_Far-red-induction_P Parameter: Tissue Value: Whole Plant
  misc_feature: MA Experiment ID: 20001557 Result: Down-regulated in Transcription
  misc_feature: MA Experiment 20001557 PARAMETER Experiment Name: At_Drought_Soil_Dry_P Parameter: Age (day) Value: 27
  misc_feature: MA Experiment 20001557 PARAMETER Experiment Name: At_Drought_Soil_Dry_P Parameter: Organism Value: A. thaliana
  misc_feature: MA Experiment 20001557 PARAMETER Experiment Name: At_Drought_Soil_Dry_P Parameter: Plant Line Value: WS
  misc_feature: MA Experiment 20001557 PARAMETER Experiment Name: At_Drought_Soil_Dry_P Parameter: Post Timepoint (hr) Value: 3
  misc_feature: MA Experiment 20001557 PARAMETER Experiment Name: At_Drought_Soil_Dry_P Parameter: Post-Treatment Value: Re-Water vs. No Drought
  misc_feature: MA Experiment 20001557 PARAMETER Experiment Name: At_Drought_Soil_Dry_P Parameter: Timepoint (day) Value: 13
  misc_feature: MA Experiment 20001557 PARAMETER Experiment Name: At_Drought_Soil_Dry_P Parameter: Treatment Value: Drought vs. No Drought
  misc_feature: MA Experiment ID: 20001906 Result: Down-regulated in Transcription
  misc_feature: MA Experiment 20001906 PARAMETER Experiment Name: At_Drought_Reproduction_P Parameter: Age (day) Value: 35
  misc_feature: MA Experiment 20001906 PARAMETER Experiment Name: At_Drought_Reproduction_P Parameter: Organism Value: A. thaliana
  misc_feature: MA Experiment 20001906 PARAMETER Experiment Name: At_Drought_Reproduction_P Parameter: Plant Line Value: WS
  misc_feature: MA Experiment 20001906 PARAMETER Experiment Name: At_Drought_Reproduction_P Parameter: Timepoint (day) Value: 5
  misc_feature: MA Experiment 20001906 PARAMETER Experiment Name: At_Drought_Reproduction_P Parameter: Tissue Value: Siliques
  misc_feature: MA Experiment 20001906 PARAMETER Experiment Name: At_Drought_Reproduction_P Parameter: Treatment Value: Drought vs. No Drought
  misc_feature: MA Experiment ID: 20001908 Result: Down-regulated in Transcription
  misc_feature: MA Experiment 20001908 PARAMETER Experiment Name: At_Drought_Reproduction_P Parameter: Age (day) Value: 40
  misc_feature: MA Experiment 20001908 PARAMETER Experiment Name: At_Drought_Reproduction_P Parameter: Organism Value: A. thaliana
  misc_feature: MA Experiment 20001908 PARAMETER Experiment Name: At_Drought_Reproduction_P Parameter: Plant Line Value: WS
  misc_feature: MA Experiment 20001908 PARAMETER Experiment Name: At_Drought_Reproduction_P Parameter: Timepoint (day) Value: 10
  misc_feature: MA Experiment 20001908 PARAMETER Experiment Name: At_Drought_Reproduction_P Parameter: Tissue Value: Siliques
  misc_feature: MA Experiment 20001908 PARAMETER Experiment Name: At_Drought_Reproduction_P Parameter: Treatment Value: Drought vs. No Drought

SEQ ID NO: 34677 - protein, 369 aa, Arabidopsis thaliana; identical to SEQ ID NO: 31087
  peptide (1)..(369): Ceres Seq. ID no. 12489611
  misc_feature (217)..(339): Pfam Name: Oxidoreductase NAD-binding domain Pfam Description: Oxidoreductase NAD-binding domain
  misc_feature (1)..(369): Homolog of NCBI NO: 119906 NR Description: Ferredoxin--NADP reductase, chloroplast precursor
  misc_feature (1)..(369): Homolog of NCBI NO: 119905 NR Description: Ferredoxin--NADP reductase, leaf isozyme,
  misc_feature (1)..(369): Homolog of NCBI NO: 170111 NR Description: ferredoxin-NADP oxidoreductase
  misc_feature (1)..(369): Homolog of NCBI NO: 729479 NR Description: Ferredoxin--NADP reductase, chloroplast precursor
  misc_feature (1)..(369): Homolog of NCBI NO: 3913651 NR Description: Ferredoxin--NADP reductase, leaf-type isozyme,
  misc_feature (1)..(369): Homolog of NCBI NO: 729477 NR Description: Ferredoxin--NADP reductase, chloroplast precursor
  misc_feature (1)..(369): Homolog of NCBI NO: 6899972 NR Description: chloroplast ferredoxin-NADP+ oxidoreductase
  misc_feature (269)..(369): Homolog of NCBI NO: 25285862 NR Description: hypothetical protein T20H2.20 - Arabidopsis
  misc_feature (1)..(248): Homolog of NCBI NO: 25285862 NR Description: hypothetical protein T20H2.20 - Arabidopsis
  misc_feature (1)..(369): Homolog of NCBI NO: 15223753 NR Description: ferredoxin--NADP reductase precursor, putative

SEQ ID NO: 34678 - protein, 365 aa, Arabidopsis thaliana; identical to SEQ ID NO: 31088
  peptide (1)..(365): Ceres Seq. ID no. 12489612
  misc_feature (213)..(335): Pfam Name: Oxidoreductase NAD-binding domain Pfam Description: Oxidoreductase NAD-binding domain
  misc_feature (1)..(365): Homolog of NCBI NO: 119906 NR Description: Ferredoxin--NADP reductase, chloroplast precursor
  misc_feature (1)..(365): Homolog of NCBI NO: 119905 NR Description: Ferredoxin--NADP reductase, leaf isozyme,
  misc_feature (1)..(365): Homolog of NCBI NO: 170111 NR Description: ferredoxin-NADP oxidoreductase
  misc_feature (1)..(365): Homolog of NCBI NO: 729479 NR Description: Ferredoxin--NADP reductase, chloroplast precursor
  misc_feature (1)..(365): Homolog of NCBI NO: 3913651 NR Description: Ferredoxin--NADP reductase, leaf-type isozyme,
  misc_feature (1)..(365): Homolog of NCBI NO: 729477 NR Description: Ferredoxin--NADP reductase, chloroplast precursor
  misc_feature (1)..(365): Homolog of NCBI NO: 6899972 NR Description: chloroplast ferredoxin-NADP+ oxidoreductase
  misc_feature (265)..(365): Homolog of NCBI NO: 25285862 NR Description: hypothetical protein T20H2.20 - Arabidopsis
  misc_feature (1)..(244): Homolog of NCBI NO: 25285862 NR Description: hypothetical protein T20H2.20 - Arabidopsis
  misc_feature (1)..(365): Homolog of NCBI NO: 15223753 NR Description: ferredoxin--NADP reductase precursor, putative

SEQ ID NO: 34679 - protein, 255 aa, Arabidopsis thaliana; identical to SEQ ID NO: 31089
  peptide (1)..(255): Ceres Seq. ID no. 12489613
  misc_feature (103)..(225): Pfam Name: Oxidoreductase NAD-binding domain Pfam Description: Oxidoreductase NAD-binding domain
  misc_feature (1)..(255): Homolog of NCBI NO: 119906 NR Description: Ferredoxin--NADP reductase, chloroplast precursor
  misc_feature (1)..(255): Homolog of NCBI NO: 119905 NR Description: Ferredoxin--NADP reductase, leaf isozyme,
  misc_feature (1)..(255): Homolog of NCBI NO: 170111 NR Description: ferredoxin-NADP oxidoreductase
  misc_feature (1)..(255): Homolog of NCBI NO: 729479 NR Description: Ferredoxin--NADP reductase, chloroplast precursor
  misc_feature (1)..(255): Homolog of NCBI NO: 3913651 NR Description: Ferredoxin--NADP reductase, leaf-type isozyme,
  misc_feature (1)..(255): Homolog of NCBI NO: 729477 NR Description: Ferredoxin--NADP reductase, chloroplast precursor
  misc_feature (1)..(255): Homolog of NCBI NO: 6899972 NR Description: chloroplast ferredoxin-NADP+ oxidoreductase
  misc_feature (155)..(255): Homolog of NCBI NO: 25285862 NR Description: hypothetical protein T20H2.20 - Arabidopsis
  misc_feature (1)..(134): Homolog of NCBI NO: 25285862 NR Description: hypothetical protein T20H2.20 - Arabidopsis
  misc_feature (1)..(255): Homolog of NCBI NO: 15223753 NR Description: ferredoxin--NADP reductase precursor, putative

SEQ ID NO: 34680 - DNA, 1195 bp, Arabidopsis thaliana; identical to SEQ ID NO: 31090
  misc_feature (1)..(1195): Ceres Seq. ID no. 12333949
  misc_feature: MA Experiment ID: 108463 Result: Up-regulated in Transcription
  misc_feature: MA Experiment 108463 PARAMETER Experiment Name: At_Germinating_Seeds_cDNA_P Parameter: Age (day) Value: 3 vs. 0
  misc_feature: MA Experiment 108463 PARAMETER Experiment Name: At_Germinating_Seeds_cDNA_P Parameter: Tissue Value: Germinating Seeds
  misc_feature: MA Experiment ID: 108573 Result: Up-regulated in Transcription
  misc_feature: MA Experiment 108573 PARAMETER Experiment Name: At_Drought_cDNA_P Parameter: Timepoint (hr) Value: 6
  misc_feature: MA Experiment 108573 PARAMETER Experiment Name: At_Drought_cDNA_P Parameter: Tissue Value: Aerial
  misc_feature: MA Experiment 108573 PARAMETER Experiment Name: At_Drought_cDNA_P Parameter: Treatment Value: Drought vs. No Drought
  misc_feature: MA Experiment ID: 108579 Result: Down-regulated in Transcription
  misc_feature: MA Experiment 108579 PARAMETER Experiment Name: At_4deg_Cold_cDNA_P Parameter: Temperature (deg C) Value: 4 vs. 22
  misc_feature: MA Experiment 108579 PARAMETER Experiment Name: At_4deg_Cold_cDNA_P Parameter: Timepoint (hr) Value: 6
  misc_feature: MA Experiment 108579 PARAMETER Experiment Name: At_4deg_Cold_cDNA_P Parameter: Tissue Value: Aerial
  misc_feature: MA Experiment ID: 20000069 Result: Up-regulated in Transcription
  misc_feature: MA Experiment 20000069 PARAMETER Experiment Name: At_100uM_ABA_Mutants_cDNA_P Parameter: Plant Line Value: CS23
  misc_feature: MA Experiment 20000069 PARAMETER Experiment Name: At_100uM_ABA_Mutants_cDNA_P Parameter: Timepoint (hr) Value: 6
  misc_feature: MA Experiment 20000069 PARAMETER Experiment Name: At_100uM_ABA_Mutants_cDNA_P Parameter: Tissue Value: Aerial
  misc_feature: MA Experiment 20000069 PARAMETER Experiment Name: At_100uM_ABA_Mutants_cDNA_P Parameter: Treatment Value: 100uM ABA vs. No Treatment
  misc_feature: MA Experiment ID: 20000070 Result: Up-regulated in Transcription
  misc_feature: MA Experiment 20000070 PARAMETER Experiment Name: At_100uM_ABA_Mutants_cDNA_P Parameter: Plant Line Value: CS24
  misc_feature: MA Experiment 20000070 PARAMETER Experiment Name: At_100uM_ABA_Mutants_cDNA_P Parameter: Timepoint (hr) Value: 6
  misc_feature: MA Experiment 20000070 PARAMETER Experiment Name: At_100uM_ABA_Mutants_cDNA_P Parameter: Tissue Value: Aerial
  misc_feature: MA Experiment 20000070 PARAMETER Experiment Name: At_100uM_ABA_Mutants_cDNA_P Parameter: Treatment Value: 100uM ABA vs. No Treatment
  misc_feature: MA Experiment ID: 20000184 Result: Down-regulated in Transcription
  misc_feature: MA Experiment 20000184 PARAMETER Experiment Name: At_Shoots__P Parameter: Age (day) Value: 7
  misc_feature: MA Experiment 20000184 PARAMETER Experiment Name: At_Shoots__P Parameter: Tissue Value: Shoots vs. Whole Plant
  misc_feature: MA Experiment ID: 20000227 Result: Down-regulated in Transcription
  misc_feature: MA Experiment 20000227 PARAMETER Experiment Name: At_Root-Tips-vs-Tops_P Parameter: Tissue Value: Root Tips vs. Root Tops
  misc_feature: MA Experiment ID: 20000234 Result: Down-regulated in Transcription
  misc_feature: MA Experiment 20000234 PARAMETER Experiment Name: At_Siliques_P Parameter: Age (day) Value: 21
  misc_feature: MA Experiment 20000234 PARAMETER Experiment Name: At_Siliques_P Parameter: Organism Value: A. thaliana
  misc_feature: MA Experiment 20000234 PARAMETER Experiment Name: At_Siliques_P Parameter: Plant Line Value: WS
  misc_feature: MA Experiment 20000234 PARAMETER Experiment Name: At_Siliques_P Parameter: Tissue Value: Less Than 5mm Siliques vs. Whole Plant
  misc_feature: MA Experiment ID: 20000235 Result: Down-regulated in Transcription
  misc_feature: MA Experiment 20000235 PARAMETER Experiment Name: At_Siliques_P Parameter: Age (day) Value: 21
  misc_feature: MA Experiment 20000235 PARAMETER Experiment Name: At_Siliques_P Parameter: Organism Value: A. thaliana
  misc_feature: MA Experiment 20000235 PARAMETER Experiment Name: At_Siliques_P Parameter: Plant Line Value: WS
  misc_feature: MA Experiment 20000235 PARAMETER Experiment Name: At_Siliques_P Parameter: Tissue Value: 5-10mm Siliques vs. Whole Plant
  misc_feature: MA Experiment ID: 20000265 Result: Down-regulated in Transcription
  misc_feature: MA Experiment 20000265 PARAMETER Experiment Name: At_Open_Flower_P Parameter: Age (day) Value: 21
  misc_feature: MA Experiment 20000265 PARAMETER Experiment Name: At_Open_Flower_P Parameter: Plant Line Value: WS
  misc_feature: MA Experiment 20000265 PARAMETER Experiment Name: At_Open_Flower_P Parameter: Tissue Value: Closed Flower vs. Whole Plant
  misc_feature: MA Experiment ID: 20000436 Result: Up-regulated in Transcription
  misc_feature: MA Experiment 20000436 PARAMETER Experiment Name: At_Drought_P Parameter: Age (day) Value: 7
  misc_feature: MA Experiment 20000436 PARAMETER Experiment Name: At_Drought_P Parameter: Organism Value: A. thaliana
  misc_feature: MA Experiment 20000436 PARAMETER Experiment Name: At_Drought_P Parameter: Plant Line Value: WS
  misc_feature: MA Experiment 20000436 PARAMETER Experiment Name: At_Drought_P Parameter: Timepoint (hr) Value: 12
  misc_feature: MA Experiment 20000436 PARAMETER Experiment Name: At_Drought_P Parameter: Tissue Value: Whole Plant
  misc_feature: MA Experiment 20000436 PARAMETER Experiment Name: At_Drought_P Parameter: Treatment Value: Drought vs. No Drought
  misc_feature: MA Experiment ID: 20000437 Result: Up-regulated in Transcription
  misc_feature: MA Experiment 20000437 PARAMETER Experiment Name: At_Drought_P Parameter: Age (day) Value: 8
  misc_feature: MA Experiment 20000437 PARAMETER Experiment Name: At_Drought_P Parameter: Organism Value: A. thaliana
  misc_feature: MA Experiment 20000437 PARAMETER Experiment Name: At_Drought_P Parameter: Plant Line Value: WS
  misc_feature: MA Experiment 20000437 PARAMETER Experiment Name: At_Drought_P Parameter: Timepoint (hr) Value: 24
  misc_feature: MA Experiment 20000437 PARAMETER Experiment Name: At_Drought_P Parameter: Tissue Value: Whole Plant
  misc_feature: MA Experiment 20000437 PARAMETER Experiment Name: At_Drought_P Parameter: Treatment Value: Drought vs. No Drought
  misc_feature: MA Experiment ID: 20001248 Result: Up-regulated in Transcription
  misc_feature: MA Experiment 20001248 PARAMETER Experiment Name: At_Far-red-induction_P Parameter: Age (day) Value: 7
  misc_feature: MA Experiment 20001248 PARAMETER Experiment Name: At_Far-red-induction_P Parameter: Light Value: Far-red vs. White
  misc_feature: MA Experiment 20001248 PARAMETER Experiment Name: At_Far-red-induction_P Parameter: Organism Value: A. thaliana
  misc_feature: MA Experiment 20001248 PARAMETER Experiment Name: At_Far-red-induction_P Parameter: Plant Line Value: Columbia
  misc_feature: MA Experiment 20001248 PARAMETER Experiment Name: At_Far-red-induction_P Parameter: Timepoint (hr) Value: 4
  misc_feature: MA Experiment 20001248 PARAMETER Experiment Name: At_Far-red-induction_P Parameter: Tissue Value: Whole Plant
  misc_feature: MA Experiment ID: 20001558 Result: Down-regulated in Transcription
  misc_feature: MA Experiment 20001558 PARAMETER Experiment Name: At_Drought_Soil_Dry_P Parameter: Age (day) Value: 27
  misc_feature: MA Experiment 20001558 PARAMETER Experiment Name: At_Drought_Soil_Dry_P Parameter: Organism Value: A. thaliana
  misc_feature: MA Experiment 20001558 PARAMETER Experiment Name: At_Drought_Soil_Dry_P Parameter: Plant Line Value: WS
  misc_feature: MA Experiment 20001558 PARAMETER Experiment Name: At_Drought_Soil_Dry_P Parameter: Post Timepoint (hr) Value: 6
  misc_feature: MA Experiment 20001558 PARAMETER Experiment Name: At_Drought_Soil_Dry_P Parameter: Post-Treatment Value: Re-Water vs. No Drought
  misc_feature: MA Experiment 20001558 PARAMETER Experiment Name: At_Drought_Soil_Dry_P Parameter: Timepoint (day) Value: 13
  misc_feature: MA Experiment 20001558 PARAMETER Experiment Name: At_Drought_Soil_Dry_P Parameter: Treatment Value: Drought vs. No Drought
  misc_feature: MA Experiment ID: 20001560 Result: Down-regulated in Transcription
  misc_feature: MA Experiment 20001560 PARAMETER Experiment Name: At_Drought_Soil_Dry_P Parameter: Age (day) Value: 28
  misc_feature: MA Experiment 20001560 PARAMETER Experiment Name: At_Drought_Soil_Dry_P Parameter: Organism Value: A. thaliana
  misc_feature: MA Experiment 20001560 PARAMETER Experiment Name: At_Drought_Soil_Dry_P Parameter: Plant Line Value: WS
  misc_feature: MA Experiment 20001560 PARAMETER Experiment Name: At_Drought_Soil_Dry_P Parameter: Post Timepoint (hr) Value: None
  misc_feature: MA Experiment 20001560 PARAMETER Experiment Name: At_Drought_Soil_Dry_P Parameter: Post-Treatment Value: None
  misc_feature: MA Experiment 20001560 PARAMETER Experiment Name: At_Drought_Soil_Dry_P Parameter: Timepoint (day) Value: 14
  misc_feature: MA Experiment 20001560 PARAMETER Experiment Name: At_Drought_Soil_Dry_P Parameter: Treatment Value: Drought vs. No Drought

SEQ ID NO: 34681 - protein, 222 aa, Arabidopsis thaliana; identical to SEQ ID NO: 31091
  peptide (1)..(222): Ceres Seq. ID no. 12333950
  misc_feature (69)..(195): Pfam Name: NUDIX domain Pfam Description: NUDIX domain
  misc_feature (28)..(166): Homolog of NCBI NO: 7486820 NR Description: hypothetical protein M7J2.80 - Arabidopsis
  misc_feature (29)..(217): Homolog of NCBI NO: 17507315 NR Description: Cleavage polyadenylation specific factor 5
  misc_feature (29)..(217): Homolog of NCBI NO: 39595588 NR Description: Hypothetical protein CBG12500 [Caenorhabditis
  misc_feature (16)..(217): Homolog of NCBI NO: 24370468 NR Description: putative pre-mrna cleavage factor [Brugia malayi]
  misc_feature (29)..(217): Homolog of NCBI NO: 13386106 NR Description: cleavage and polyadenylation specific factor 5
  misc_feature (29)..(217): Homolog of NCBI NO: 5901926 NR Description: cleavage and polyadenylation specific factor 5,
  misc_feature (28)..(220): Homolog of NCBI NO: 30686923 NR Description: expressed protein [Arabidopsis thaliana]
  misc_feature (1)..(55): Homolog of NCBI NO: 7486231 NR Description: hypothetical protein F27B13.60 - Arabidopsis
  misc_feature (82)..(222): Homolog of NCBI NO: 7486231 NR Description: hypothetical protein F27B13.60 - Arabidopsis
  misc_feature (1)..(222): Homolog of NCBI NO: 18417474 NR Description: mRNA cleavage factor subunit - like protein

SEQ ID NO: 34682 - protein, 213 aa, Arabidopsis thaliana; identical to SEQ ID NO: 31092
  peptide (1)..(213): Ceres Seq. ID no. 12333951
  misc_feature (60)..(186): Pfam Name: NUDIX domain Pfam Description: NUDIX domain
  misc_feature (19)..(157): Homolog of NCBI NO: 7486820 NR Description: hypothetical protein M7J2.80 - Arabidopsis
  misc_feature (20)..(208): Homolog of NCBI NO: 17507315 NR Description: Cleavage polyadenylation specific factor 5
  misc_feature (20)..(208): Homolog of NCBI NO: 39595588 NR Description: Hypothetical protein CBG12500 [Caenorhabditis
  misc_feature (7)..(208): Homolog of NCBI NO: 24370468 NR Description: putative pre-mrna cleavage factor [Brugia malayi]
  misc_feature (20)..(208): Homolog of NCBI NO: 13386106 NR Description: cleavage and polyadenylation specific factor 5
  misc_feature (20)..(208): Homolog of NCBI NO: 5901926 NR Description: cleavage and polyadenylation specific factor 5,
  misc_feature (19)..(211): Homolog of NCBI NO: 30686923 NR Description: expressed protein [Arabidopsis thaliana]
  misc_feature (1)..(46): Homolog of NCBI NO: 7486231 NR Description: hypothetical protein F27B13.60 - Arabidopsis
  misc_feature (73)..(213): Homolog of NCBI NO: 7486231 NR Description: hypothetical protein F27B13.60 - Arabidopsis
  misc_feature (1)..(213): Homolog of NCBI NO: 18417474 NR Description: mRNA cleavage factor subunit - like protein

SEQ ID NO: 34683 - protein, 195 aa, Arabidopsis thaliana; identical to SEQ ID NO: 31093
  peptide (1)..(195): Ceres Seq. ID no. 12333952
  misc_feature (42)..(168): Pfam Name: NUDIX domain Pfam Description: NUDIX domain
  misc_feature (1)..(139): Homolog of NCBI NO: 7486820 NR Description: hypothetical protein M7J2.80 - Arabidopsis
  misc_feature (2)..(190): Homolog of NCBI NO: 17507315 NR Description: Cleavage polyadenylation specific factor 5
  misc_feature (2)..(190): Homolog of NCBI NO: 39595588 NR Description: Hypothetical protein CBG12500 [Caenorhabditis
  misc_feature (1)..(190): Homolog of NCBI NO: 24370468 NR Description: putative pre-mrna cleavage factor [Brugia malayi]
  misc_feature (2)..(190): Homolog of NCBI NO: 13386106 NR Description: cleavage and polyadenylation specific factor 5
  misc_feature (2)..(190): Homolog of NCBI NO: 5901926 NR Description: cleavage and polyadenylation specific factor 5,
  misc_feature (1)..(193): Homolog of NCBI NO: 30686923 NR Description: expressed protein [Arabidopsis thaliana]
  misc_feature (1)..(28): Homolog of NCBI NO: 7486231 NR Description: hypothetical protein F27B13.60 - Arabidopsis
  misc_feature (55)..(195): Homolog of NCBI NO: 7486231 NR Description: hypothetical protein F27B13.60 - Arabidopsis
  misc_feature (1)..(195): Homolog of NCBI NO: 18417474 NR Description: mRNA cleavage factor subunit - like protein

SEQ ID NO: 34684 - DNA, 761 bp, Arabidopsis thaliana; identical to SEQ ID NO: 31094
  misc_feature (1)..(761): Ceres Seq. ID no. 12397086
  misc_feature: MA Experiment ID: 20000227 Result: Up-regulated in Transcription
  misc_feature: MA Experiment 20000227 PARAMETER Experiment Name: At_Root-Tips-vs-Tops_P Parameter: Tissue Value: Root Tips vs. Root Tops
  misc_feature: MA Experiment ID: 20001560 Result: Up-regulated in Transcription
  misc_feature: MA Experiment 20001560 PARAMETER Experiment Name: At_Drought_Soil_Dry_P Parameter: Age (day) Value: 28
  misc_feature: MA Experiment 20001560 PARAMETER Experiment Name: At_Drought_Soil_Dry_P Parameter: Organism Value: A. thaliana
  misc_feature: MA Experiment 20001560 PARAMETER Experiment Name: At_Drought_Soil_Dry_P Parameter: Plant Line Value: WS
  misc_feature: MA Experiment 20001560 PARAMETER Experiment Name: At_Drought_Soil_Dry_P Parameter: Post Timepoint (hr) Value: None
  misc_feature: MA Experiment 20001560 PARAMETER Experiment Name: At_Drought_Soil_Dry_P Parameter: Post-Treatment Value: None
  misc_feature: MA Experiment 20001560 PARAMETER Experiment Name: At_Drought_Soil_Dry_P Parameter: Timepoint (day) Value: 14
  misc_feature: MA Experiment 20001560 PARAMETER Experiment Name: At_Drought_Soil_Dry_P Parameter: Treatment Value: Drought vs. No Drought

SEQ ID NO: 34685 - protein, 178 aa, Arabidopsis thaliana; identical to SEQ ID NO: 31095
  peptide (1)..(178): Ceres Seq. ID no. 12397087
  misc_feature (7)..(102): Pfam Name: Ribosomal protein L23 Pfam Description: Ribosomal protein L23
  misc_feature (37)..(88): Homolog of NCBI NO: 15896381 NR Description: Ribosomal protein L23 [Clostridium
  misc_feature (23)..(89): Homolog of NCBI NO: 16120549 NR Description: 50S ribosomal protein L23 [Yersinia pestis]
  misc_feature (23)..(89): Homolog of NCBI NO: 730543 NR Description: 50S RIBOSOMAL PROTEIN L23
  misc_feature (30)..(89): Homolog of NCBI NO: 15599457 NR Description: 50S ribosomal protein L23 [Pseudomonas aeruginosa
  misc_feature (1)..(174): Homolog of NCBI NO: 34394046 NR Description: unknown protein [Oryza sativa (japonica
  misc_feature (1)..(178): Homolog of NCBI NO: 21554117 NR Description: unknown [Arabidopsis thaliana]
  misc_feature (1)..(178): Homolog of NCBI NO: 15236061 NR Description: putative protein

SEQ ID NO: 34686 - protein, 158 aa, Arabidopsis thaliana; identical to SEQ ID NO: 31096
  peptide (1)..(158): Ceres Seq. ID no. 12397088
  misc_feature (1)..(82): Pfam Name: Ribosomal protein L23 Pfam Description: Ribosomal protein L23
  misc_feature (17)..(68): Homolog of NCBI NO: 15896381 NR Description: Ribosomal protein L23 [Clostridium
  misc_feature (3)..(69): Homolog of NCBI NO: 16120549 NR Description: 50S ribosomal protein L23 [Yersinia pestis]
  misc_feature (3)..(69): Homolog of NCBI NO: 730543 NR Description: 50S RIBOSOMAL PROTEIN L23
  misc_feature (10)..(69): Homolog of NCBI NO: 15599457 NR Description: 50S ribosomal protein L23 [Pseudomonas aeruginosa
  misc_feature (1)..(154): Homolog of NCBI NO: 34394046 NR Description: unknown protein [Oryza sativa (japonica
  misc_feature (1)..(158): Homolog of NCBI NO: 21554117 NR Description: unknown [Arabidopsis thaliana]
  misc_feature (1)..(158): Homolog of NCBI NO: 15236061 NR Description: putative protein

SEQ ID NO: 34687 - protein, 115 aa, Arabidopsis thaliana; identical to SEQ ID NO: 31097
  peptide (1)..(115): Ceres Seq. ID no. 12397089
  misc_feature (1)..(25): Homolog of NCBI NO: 15896381 NR Description: Ribosomal protein L23 [Clostridium
  misc_feature (1)..(26): Homolog of NCBI NO: 16120549 NR Description: 50S ribosomal protein L23 [Yersinia pestis]
  misc_feature (1)..(26): Homolog of NCBI NO: 730543 NR Description: 50S RIBOSOMAL PROTEIN L23
  misc_feature (1)..(26): Homolog of NCBI NO: 15599457 NR Description: 50S ribosomal protein L23 [Pseudomonas aeruginosa
  misc_feature (1)..(111): Homolog of NCBI NO: 34394046 NR Description: unknown protein [Oryza sativa (japonica
  misc_feature (1)..(115): Homolog of NCBI NO: 21554117 NR Description: unknown [Arabidopsis thaliana]
  misc_feature (1)..(115): Homolog of NCBI NO: 15236061 NR Description: putative protein

SEQ ID NO: 34688 - DNA, 1684 bp, Arabidopsis thaliana; identical to SEQ ID NO: 31098
  misc_feature (1)..(1684): Ceres Seq. ID no. 13497681
  misc_feature: MA Experiment ID: 108434 Result: Up-regulated in Transcription
  misc_feature: MA Experiment 108434 PARAMETER Experiment Name: At_Root_Tips_cDNA_P Parameter: Tissue Value: Root Tips
  misc_feature: MA Experiment ID: 108464 Result: Up-regulated in Transcription
  misc_feature: MA Experiment 108464 PARAMETER Experiment Name: At_Germinating_Seeds_cDNA_P Parameter: Age (day) Value: 4 vs. 0
  misc_feature: MA Experiment 108464 PARAMETER Experiment Name: At_Germinating_Seeds_cDNA_P Parameter: Tissue Value: Germinating Seeds
  misc_feature: MA Experiment ID: 108608 Result: Up-regulated in Transcription
  misc_feature: MA Experiment 108608 PARAMETER Experiment Name: At_100uM_ABA_cDNA_P Parameter: Timepoint (hr) Value: 1
  misc_feature: MA Experiment 108608 PARAMETER Experiment Name: At_100uM_ABA_cDNA_P Parameter: Tissue Value: Aerial
  misc_feature: MA Experiment 108608 PARAMETER Experiment Name: At_100uM_ABA_cDNA_P Parameter: Treatment Value: 100uM ABA vs. No Treatment
  misc_feature: MA Experiment ID: 20000180 Result: Up-regulated in Transcription
  misc_feature: MA Experiment 20000180 PARAMETER Experiment Name: At_Germinating_Seeds_P Parameter: Age (hr) Value: 24 vs. 0
  misc_feature: MA Experiment 20000180 PARAMETER Experiment Name: At_Germinating_Seeds_P Parameter: Tissue Value: Germinating Seeds
  misc_feature: MA Experiment ID: 20000495 Result: Up-regulated in Transcription
  misc_feature: MA Experiment 20000495 PARAMETER Experiment Name: At_Guard_Cells_P Parameter: Harvest Date Value: 8/2/2002
  misc_feature: MA Experiment 20000495 PARAMETER Experiment Name: At_Guard_Cells_P Parameter: Organism Value: A. thaliana
  misc_feature: MA Experiment 20000495 PARAMETER Experiment Name: At_Guard_Cells_P Parameter: Tissue Value: Guard Cells vs. Leaves

SEQ ID NO: 34689 - protein, 409 aa, Arabidopsis thaliana; identical to SEQ ID NO: 31099
  peptide (1)..(409): Ceres Seq. ID no. 13497682
  misc_feature (173)..(367): Pfam Name: Arabidopsis proteins of unknown function Pfam Description: Arabidopsis proteins of unknown function
  misc_feature (1)..(409): Homolog of NCBI NO: 15240622 NR Description: expressed protein [Arabidopsis thaliana]
  misc_feature (1)..(106): Homolog of NCBI NO: 6573746 NR Description: F20B24.18 [Arabidopsis thaliana]
  misc_feature (118)..(409): Homolog of NCBI NO: 6573746 NR Description: F20B24.18 [Arabidopsis thaliana]
  misc_feature (1)..(409): Homolog of NCBI NO: 15220207 NR Description: expressed protein [Arabidopsis thaliana]
  misc_feature (1)..(409): Homolog of NCBI NO: 21389708 NR Description: putative carboxyl-terminal proteinase [Gossypium
  misc_feature (2)..(409): Homolog of NCBI NO: 28416687 NR Description: At1g70550 [Arabidopsis thaliana]
  misc_feature (2)..(409): Homolog of NCBI NO: 25345697 NR Description: unknown protein F5A18.27 [imported] - Arabidopsis
  misc_feature (1)..(409): Homolog of NCBI NO: 30698726 NR Description: expressed protein [Arabidopsis thaliana]
  misc_feature (1)..(409): Homolog of NCBI NO: 25345695 NR Description: protein F26F24.22 [imported] - Arabidopsis
  misc_feature (1)..(409): Homolog of NCBI NO: 30688348 NR Description: expressed protein [Arabidopsis thaliana]

SEQ ID NO: 34690 - protein, 366 aa, Arabidopsis thaliana; identical to SEQ ID NO: 31100
  peptide (1)..(366): Ceres Seq. ID no. 13497683
  misc_feature (130)..(324): Pfam Name: Arabidopsis proteins of unknown function Pfam Description: Arabidopsis proteins of unknown function
  misc_feature (1)..(366): Homolog of NCBI NO: 15240622 NR Description: expressed protein [Arabidopsis thaliana]
  misc_feature (1)..(63): Homolog of NCBI NO: 6573746 NR Description: F20B24.18 [Arabidopsis thaliana]
  misc_feature (75)..(366): Homolog of NCBI NO: 6573746 NR Description: F20B24.18 [Arabidopsis thaliana]
  misc_feature (1)..(366): Homolog of NCBI NO: 15220207 NR Description: expressed protein [Arabidopsis thaliana]
  misc_feature (1)..(366): Homolog of NCBI NO: 21389708 NR Description: putative carboxyl-terminal proteinase [Gossypium
  misc_feature (1)..(366): Homolog of NCBI NO: 28416687 NR Description: At1g70550 [Arabidopsis thaliana]
  misc_feature (1)..(366): Homolog of NCBI NO: 25345697 NR Description: unknown protein F5A18.27 [imported] - Arabidopsis
  misc_feature (1)..(366): Homolog of NCBI NO: 30698726 NR Description: expressed protein [Arabidopsis thaliana]
  misc_feature (1)..(366): Homolog of NCBI NO: 25345695 NR Description: protein F26F24.22 [imported] - Arabidopsis
  misc_feature (1)..(366): Homolog of NCBI NO: 30688348 NR Description: expressed protein [Arabidopsis thaliana]

SEQ ID NO: 34691 - protein, 318 aa, Arabidopsis thaliana; identical to SEQ ID NO: 31101
  peptide (1)..(318): Ceres Seq. ID no. 13497684
  misc_feature (82)..(276): Pfam Name: Arabidopsis proteins of unknown function Pfam Description: Arabidopsis proteins of unknown function
  misc_feature (1)..(318): Homolog of NCBI NO: 15240622 NR Description: expressed protein [Arabidopsis thaliana]
  misc_feature (1)..(15): Homolog of NCBI NO: 6573746 NR Description: F20B24.18 [Arabidopsis thaliana]
  misc_feature (27)..(318): Homolog of NCBI NO: 6573746 NR Description: F20B24.18 [Arabidopsis thaliana]
  misc_feature (1)..(318): Homolog of NCBI NO: 15220207 NR Description: expressed protein [Arabidopsis thaliana]
  misc_feature (1)..(318): Homolog of NCBI NO: 21389708 NR Description: putative carboxyl-terminal proteinase [Gossypium
  misc_feature (1)..(318): Homolog of NCBI NO: 28416687 NR Description: At1g70550 [Arabidopsis thaliana]
  misc_feature (1)..(318): Homolog of NCBI NO: 25345697 NR Description: unknown protein F5A18.27 [imported] - Arabidopsis
  misc_feature (1)..(318): Homolog of NCBI NO: 30698726 NR Description: expressed protein [Arabidopsis thaliana]
  misc_feature (1)..(318): Homolog of NCBI NO: 25345695 NR Description: protein F26F24.22 [imported] - Arabidopsis
  misc_feature (1)..(318): Homolog of NCBI NO: 30688348 NR Description: expressed protein [Arabidopsis thaliana]

SEQ ID NO: 34692 - DNA, 1241 bp, Arabidopsis thaliana; identical to SEQ ID NO: 31102
  misc_feature (1)..(1241): Ceres Seq. ID no. 12321288
  misc_feature: MA Experiment ID: 108434 Result: Up-regulated in Transcription
  misc_feature: MA Experiment 108434 PARAMETER Experiment Name: At_Root_Tips_cDNA_P Parameter: Tissue Value: Root Tips
  misc_feature: MA Experiment ID: 108462 Result: Down-regulated in Transcription
  misc_feature: MA Experiment 108462 PARAMETER Experiment Name: At_Germinating_Seeds_cDNA_P Parameter: Age (day) Value: 2 vs. 0
  misc_feature: MA Experiment 108462 PARAMETER Experiment Name: At_Germinating_Seeds_cDNA_P Parameter: Tissue Value: Germinating Seeds
  misc_feature: MA Experiment ID: 108463 Result: Down-regulated in Transcription
  misc_feature: MA Experiment 108463 PARAMETER Experiment Name: At_Germinating_Seeds_cDNA_P Parameter: Age (day) Value: 3 vs. 0
  misc_feature: MA Experiment 108463 PARAMETER Experiment Name: At_Germinating_Seeds_cDNA_P Parameter: Tissue Value: Germinating Seeds
  misc_feature: MA Experiment ID: 108464 Result: Down-regulated in Transcription
  misc_feature: MA Experiment 108464 PARAMETER Experiment Name: At_Germinating_Seeds_cDNA_P Parameter: Age (day) Value: 4 vs. 0
  misc_feature: MA Experiment 108464 PARAMETER Experiment Name: At_Germinating_Seeds_cDNA_P Parameter: Tissue Value: Germinating Seeds
  misc_feature: MA Experiment ID: 20000224 Result: Down-regulated in Transcription
  misc_feature: MA Experiment ID: 20001557 Result: Up-regulated in Transcription
  misc_feature: MA Experiment 20001557 PARAMETER Experiment Name: At_Drought_Soil_Dry_P Parameter: Age (day) Value: 27
  misc_feature: MA Experiment 20001557 PARAMETER Experiment Name: At_Drought_Soil_Dry_P Parameter: Organism Value: A. thaliana
  misc_feature: MA Experiment 20001557 PARAMETER Experiment Name: At_Drought_Soil_Dry_P Parameter: Plant Line Value: WS
  misc_feature: MA Experiment 20001557 PARAMETER Experiment Name: At_Drought_Soil_Dry_P Parameter: Post Timepoint (hr) Value: 3
  misc_feature: MA Experiment 20001557 PARAMETER Experiment Name: At_Drought_Soil_Dry_P Parameter: Post-Treatment Value: Re-Water vs. No Drought
  misc_feature: MA Experiment 20001557 PARAMETER Experiment Name: At_Drought_Soil_Dry_P Parameter: Timepoint (day) Value: 13
  misc_feature: MA Experiment 20001557 PARAMETER Experiment Name: At_Drought_Soil_Dry_P Parameter: Treatment Value: Drought vs. No Drought
  misc_feature: MA Experiment ID: 20001757 Result: Up-regulated in Transcription
  misc_feature: MA Experiment 20001757 PARAMETER Experiment Name: At_50mM_NH4NO3_L-to-H_P Parameter: Timepoint (hr) Value: 6
  misc_feature: MA Experiment 20001757 PARAMETER Experiment Name: At_50mM_NH4NO3_L-to-H_P Parameter: Tissue Value: Leaf
  misc_feature: MA Experiment 20001757 PARAMETER Experiment Name: At_50mM_NH4NO3_L-to-H_P Parameter: Treatment Value: 50mM NH4NO3 vs 100mM Mannitol

SEQ ID NO: 34693 - protein, 296 aa, Arabidopsis thaliana; identical to SEQ ID NO: 31103
  peptide (1)..(296): Ceres Seq. ID no. 12321289
  misc_feature (9)..(77): Pfam Name: RNA recognition motif. (a.k.a. RRM, RBD, or RNP domain) Pfam Description: RNA recognition motif. (a.k.a. RRM, RBD, or RNP
  misc_feature (1)..(260): Homolog of NCBI NO: 5815236 NR Description: splicing factor SR1B [Arabidopsis thaliana]
  misc_feature (1)..(260): Homolog of NCBI NO: 30678395 NR Description: pre-mRNA splicing factor SF2 (SR1 protein)
  misc_feature (1)..(260): Homolog of NCBI NO: 2443473 NR Description: ASF/SF2 homolog [Arabidopsis thaliana]
  misc_feature (1)..(295): Homolog of NCBI NO: 33146854 NR Description: putative pre-mRNA splicing factor SF2
  misc_feature (1)..(295): Homolog of NCBI NO: 2129717 NR Description: splicing factor SF-2 homolog - Arabidopsis
  misc_feature (1)..(295): Homolog of NCBI NO: 5815235 NR Description: splicing factor SR1 [Arabidopsis thaliana]
  misc_feature (1)..(295): Homolog of NCBI NO: 30678391 NR Description: pre-mRNA splicing factor SF2 (SR1 protein)
  misc_feature (1)..(179): Homolog of NCBI NO: 11346384 NR Description: PRE-MRNA SPLICING FACTOR SF2-like protein -
  misc_feature (1)..(291): Homolog of NCBI NO: 12324445 NR Description: putative splicing factor; 53460-55514
  misc_feature (1)..(268): Homolog of NCBI NO: 22331714 NR Description: arginine/serine-rich splicing factor (atSRp34),

SEQ ID NO: 34694 - protein, 155 aa, Arabidopsis thaliana; identical to SEQ ID NO: 31104
  peptide (1)..(155): Ceres Seq. ID no. 12321290
  misc_feature (1)..(119): Homolog of NCBI NO: 5815236 NR Description: splicing factor SR1B [Arabidopsis thaliana]
  misc_feature (1)..(119): Homolog of NCBI NO: 30678395 NR Description: pre-mRNA splicing factor SF2 (SR1 protein)
  misc_feature (1)..(119): Homolog of NCBI NO: 2443473 NR Description: ASF/SF2 homolog [Arabidopsis thaliana]
  misc_feature (1)..(154): Homolog of NCBI NO: 33146854 NR Description: putative pre-mRNA splicing factor SF2
  misc_feature (1)..(154): Homolog of NCBI NO: 2129717 NR Description: splicing factor SF-2 homolog - Arabidopsis
  misc_feature (1)..(154): Homolog of NCBI NO: 5815235 NR Description: splicing factor SR1 [Arabidopsis thaliana]
  misc_feature (1)..(154): Homolog of NCBI NO: 30678391 NR Description: pre-mRNA splicing factor SF2 (SR1 protein)
  misc_feature (1)..(38): Homolog of NCBI NO: 11346384 NR Description: PRE-MRNA SPLICING FACTOR SF2-like protein -
  misc_feature (1)..(150): Homolog of NCBI NO: 12324445 NR Description: putative splicing factor; 53460-55514
  misc_feature (1)..(127): Homolog of NCBI NO: 22331714 NR Description: arginine/serine-rich splicing factor (atSRp34),

SEQ ID NO: 34695 - DNA, 2221 bp, Arabidopsis thaliana; identical to SEQ ID NO: 31105
  misc_feature (1)..(2221): Ceres Seq. ID no. 13645720
  misc_feature: MA Experiment ID: 20000328 Result: Down-regulated in Transcription
  misc_feature: MA Experiment 20000328 PARAMETER Experiment Name: At_42deg_Heat_Sub_P Parameter: Age (day) Value: 14
  misc_feature: MA Experiment 20000328 PARAMETER Experiment Name: At_42deg_Heat_Sub_P Parameter: Organism Value: A. thaliana
  misc_feature: MA Experiment 20000328 PARAMETER Experiment Name: At_42deg_Heat_Sub_P Parameter: Plant Line Value: WS
  misc_feature: MA Experiment 20000328 PARAMETER Experiment Name: At_42deg_Heat_Sub_P Parameter: Temperature (deg C) Value: 42 vs. 22
  misc_feature: MA Experiment 20000328 PARAMETER Experiment Name: At_42deg_Heat_Sub_P Parameter: Timepoint (hr) Value: 6
  misc_feature: MA Experiment 20000328 PARAMETER Experiment Name: At_42deg_Heat_Sub_P Parameter: Tissue Value: Aerial
  misc_feature: MA Experiment ID: 20000355 Result: Down-regulated in Transcription
  misc_feature: MA Experiment 20000355 PARAMETER Experiment Name: At_Siliques_Sub_P Parameter: Age (day) Value: 21
  misc_feature: MA Experiment 20000355 PARAMETER Experiment Name: At_Siliques_Sub_P Parameter: Organism Value: A. thaliana
  misc_feature: MA Experiment 20000355 PARAMETER Experiment Name: At_Siliques_Sub_P Parameter: Plant Line Value: WS
  misc_feature: MA Experiment 20000355 PARAMETER Experiment Name: At_Siliques_Sub_P Parameter: Tissue Value: Less Than 5mm Siliques vs. Whole Plant

SEQ ID NO: 34696 - protein, 630 aa, Arabidopsis thaliana; identical to SEQ ID NO: 31106
  peptide (1)..(630): Ceres Seq. ID no. 13645721
  misc_feature (502)..(536): Pfam Name: PPR repeat Pfam Description: PPR repeat
  misc_feature (35)..(620): Homolog of NCBI NO: 25402719 NR Description: protein F5O11.4 [imported] - Arabidopsis thaliana
  misc_feature (45)..(530): Homolog of NCBI NO: 15221621 NR Description: pentatricopeptide (PPR) repeat-containing protein
  misc_feature (35)..(630): Homolog of NCBI NO: 22531122 NR Description: putative membrane-associated salt-inducible
  misc_feature (9)..(630): Homolog of NCBI NO: 15221674 NR Description: pentatricopeptide (PPR) repeat-containing protein
  misc_feature (1)..(630): Homolog of NCBI NO: 15221515 NR Description: pentatricopeptide (PPR) repeat-containing protein
  misc_feature (6)..(611): Homolog of NCBI NO: 15221621 NR Description: pentatricopeptide (PPR) repeat-containing protein
  misc_feature (7)..(623): Homolog of NCBI NO: 15221635 NR Description: pentatricopeptide (PPR) repeat-containing protein
  misc_feature (6)..(630): Homolog of NCBI NO: 25404377 NR Description: hypothetical protein F16P17.5 [imported] -
  misc_feature (29)..(630): Homolog of NCBI NO: 25404380 NR Description: hypothetical protein F16P17.7 [imported] -
  misc_feature (1)..(630): Homolog of NCBI NO: 15221691 NR Description: pentatricopeptide (PPR) repeat-containing protein

SEQ ID NO: 34697 - protein, 559 aa, Arabidopsis thaliana; identical to SEQ ID NO: 31107
  peptide (1)..(559): Ceres Seq. ID no. 13645722
  misc_feature (431)..(465): Pfam Name: PPR repeat Pfam Description: PPR repeat
  misc_feature (1)..(549): Homolog of NCBI NO: 25402719 NR Description: protein F5O11.4 [imported] - Arabidopsis thaliana
  misc_feature (1)..(459): Homolog of NCBI NO: 15221621 NR Description: pentatricopeptide (PPR) repeat-containing protein
  misc_feature (1)..(559): Homolog of NCBI NO: 22531122 NR Description: putative membrane-associated salt-inducible
  misc_feature (1)..(559): Homolog of NCBI NO: 15221674 NR Description: pentatricopeptide (PPR) repeat-containing protein
  misc_feature (1)..(559): Homolog of NCBI NO: 15221515 NR Description: pentatricopeptide (PPR) repeat-containing protein
  misc_feature (1)..(540): Homolog of NCBI NO: 15221621 NR Description: pentatricopeptide (PPR) repeat-containing protein
  misc_feature (1)..(552): Homolog of NCBI NO: 15221635 NR Description: pentatricopeptide (PPR) repeat-containing protein
  misc_feature (1)..(559): Homolog of NCBI NO: 25404377 NR Description: hypothetical protein F16P17.5 [imported] -
  misc_feature (1)..(559): Homolog of NCBI NO: 25404380 NR Description: hypothetical protein F16P17.7 [imported] -
  misc_feature (1)..(559): Homolog of NCBI NO: 15221691 NR Description: pentatricopeptide (PPR) repeat-containing protein

SEQ ID NO: 34698 - protein, 537 aa, Arabidopsis thaliana; identical to SEQ ID NO: 31108
  peptide (1)..(537): Ceres Seq. ID no. 13645723
  misc_feature (409)..(443): Pfam Name: PPR repeat Pfam Description: PPR repeat
  misc_feature (1)..(527): Homolog of NCBI NO: 25402719 NR Description: protein F5O11.4 [imported] - Arabidopsis thaliana
  misc_feature (1)..(437): Homolog of NCBI NO: 15221621 NR Description: pentatricopeptide (PPR) repeat-containing protein
  misc_feature (1)..(537): Homolog of NCBI NO: 22531122 NR Description: putative membrane-associated salt-inducible
  misc_feature (1)..(537): Homolog of NCBI NO: 15221674 NR Description: pentatricopeptide (PPR) repeat-containing protein
  misc_feature (1)..(537): Homolog of NCBI NO: 15221515 NR Description: pentatricopeptide (PPR) repeat-containing protein
  misc_feature (1)..(518): Homolog of NCBI NO: 15221621 NR Description: pentatricopeptide (PPR) repeat-containing protein
  misc_feature (1)..(530): Homolog of NCBI NO: 15221635 NR Description: pentatricopeptide (PPR) repeat-containing protein
  misc_feature (1)..(537): Homolog of NCBI NO: 25404377 NR Description: hypothetical protein F16P17.5 [imported] -
  misc_feature (1)..(537): Homolog of NCBI NO: 25404380 NR Description: hypothetical protein F16P17.7 [imported] -
  misc_feature (1)..(537): Homolog of NCBI NO: 15221691 NR Description: pentatricopeptide (PPR) repeat-containing protein

SEQ ID NO: 34699 - DNA, 1043 bp, Arabidopsis thaliana; identical to SEQ ID NO: 31109
  misc_feature (1)..(1043): Ceres Seq. ID no. 12327203
  misc_feature: MA Experiment ID: 108435 Result: Down-regulated in Transcription
  misc_feature: MA Experiment 108435 PARAMETER Experiment Name: At_stm_Mutants_cDNA_P Parameter: Plant Line Value: wt Landsburg vs stm
  misc_feature: MA Experiment 108435 PARAMETER Experiment Name: At_stm_Mutants_cDNA_P Parameter: Tissue Value: Shoot Apical Meristem Region
  misc_feature: MA Experiment ID: 108462 Result: Up-regulated in Transcription
  misc_feature: MA Experiment 108462 PARAMETER Experiment Name: At_Germinating_Seeds_cDNA_P Parameter: Age (day) Value: 2 vs. 0
  misc_feature: MA Experiment 108462 PARAMETER Experiment Name: At_Germinating_Seeds_cDNA_P Parameter: Tissue Value: Germinating Seeds
  misc_feature: MA Experiment ID: 108488 Result: Down-regulated in Transcription
  misc_feature: MA Experiment ID: 108489 Result: Up-regulated in Transcription
  misc_feature: MA Experiment ID: 108595 Result: Down-regulated in Transcription
  misc_feature: MA Experiment 108595 PARAMETER Experiment Name: At_Ler-pi_Ovule_cDNA_P Parameter: Plant Line Value: null
  misc_feature: MA Experiment ID: 20000071 Result: Up-regulated in Transcription
  misc_feature: MA Experiment 20000071 PARAMETER Experiment Name: At_100uM_ABA_Mutants_cDNA_P Parameter: Plant Line Value: CS8104
  misc_feature: MA Experiment 20000071 PARAMETER Experiment Name: At_100uM_ABA_Mutants_cDNA_P Parameter: Timepoint (hr) Value: 6
  misc_feature: MA Experiment 20000071 PARAMETER Experiment Name: At_100uM_ABA_Mutants_cDNA_P Parameter: Tissue Value: Aerial
  misc_feature: MA Experiment 20000071 PARAMETER Experiment Name: At_100uM_ABA_Mutants_cDNA_P Parameter: Treatment Value: 100uM ABA vs. No Treatment
  misc_feature: MA Experiment ID: 20000117 Result: Up-regulated in Transcription
  misc_feature: MA Experiment 20000117 PARAMETER Experiment Name: At_100uM_ABA_Mutants_cDNA_P Parameter: Plant Line Value: Columbia
  misc_feature: MA Experiment 20000117 PARAMETER Experiment Name: At_100uM_ABA_Mutants_cDNA_P Parameter: Timepoint (hr) Value: 6
  misc_feature: MA Experiment 20000117 PARAMETER Experiment Name: At_100uM_ABA_Mutants_cDNA_P Parameter: Tissue Value: Aerial
  misc_feature: MA Experiment 20000117 PARAMETER Experiment Name: At_100uM_ABA_Mutants_cDNA_P Parameter: Treatment Value: 100uM ABA vs. No Treatment
  misc_feature: MA Experiment ID: 20000185 Result: Down-regulated in Transcription
  misc_feature: MA Experiment 20000185 PARAMETER Experiment Name: At_Roots__P Parameter: Age (day) Value: 7 vs. 21
  misc_feature: MA Experiment 20000185 PARAMETER Experiment Name: At_Roots__P Parameter: Organism Value: A. thaliana
  misc_feature: MA Experiment 20000185 PARAMETER Experiment Name: At_Roots__P Parameter: Tissue Value: Roots vs. Whole Plant
  misc_feature: MA Experiment ID: 20000794 Result: Up-regulated in Transcription
  misc_feature: MA Experiment 20000794 PARAMETER Experiment Name: At_Petals_P Parameter: Age (day) Value: 23-25 days
  misc_feature: MA Experiment 20000794 PARAMETER Experiment Name: At_Petals_P Parameter: Plant Line Value: WS
  misc_feature: MA Experiment 20000794 PARAMETER Experiment Name: At_Petals_P Parameter: Tissue Value: Petals vs. Whole plant
  misc_feature: MA Experiment ID: 20001905 Result: Up-regulated in Transcription
  misc_feature: MA Experiment 20001905 PARAMETER Experiment Name: At_Drought_Reproduction_P Parameter: Age (day) Value: 40
  misc_feature: MA Experiment 20001905 PARAMETER Experiment Name: At_Drought_Reproduction_P Parameter: Organism Value: A. thaliana
  misc_feature: MA Experiment 20001905 PARAMETER Experiment Name: At_Drought_Reproduction_P Parameter: Plant Line Value: WS
  misc_feature: MA Experiment 20001905 PARAMETER Experiment Name: At_Drought_Reproduction_P Parameter: Timepoint (day) Value: 10
  misc_feature: MA Experiment 20001905 PARAMETER Experiment Name: At_Drought_Reproduction_P Parameter: Tissue Value: Rosettes
  misc_feature: MA Experiment 20001905 PARAMETER Experiment Name: At_Drought_Reproduction_P Parameter: Treatment Value: Drought vs. No Drought

SEQ ID NO: 34700 - protein, 222 aa, Arabidopsis thaliana; identical to SEQ ID NO: 31110
  peptide (1)..(222): Ceres Seq. ID no. 12327204
  misc_feature (117)..(205): Homolog of NCBI NO: 33866372 NR Description: conserved hypothetical protein [Synechococcus sp.
  misc_feature (115)..(205): Homolog of NCBI NO: 37521175 NR Description: hypothetical protein gsr1606 [Gloeobacter
  misc_feature (115)..(220): Homolog of NCBI NO: 22298501 NR Description: ORF_ID:tll0958~hypothetical protein
  misc_feature (115)..(219): Homolog of NCBI NO: 16332324 NR Description: unknown protein [Synechocystis sp. PCC 6803]
  misc_feature (115)..(220): Homolog of NCBI NO: 23130142 NR Description: hypothetical protein [Nostoc punctiforme]
  misc_feature (115)..(220): Homolog of NCBI NO: 17229946 NR Description: hypothetical protein [Nostoc sp. PCC 7120]
  misc_feature (115)..(220): Homolog of NCBI NO: 23041855 NR Description: hypothetical protein [Trichodesmium erythraeum
  misc_feature (1)..(222): Homolog of NCBI NO: 18402409 NR Description: expressed protein
  misc_feature (1)..(222): Homolog of NCBI NO: 11994202 NR Description: dbj|BAA18864.1~gene_id:MPN9.15~similar to unknown

SEQ ID NO: 34701 - protein, 221 aa, Arabidopsis thaliana; identical to SEQ ID NO: 31111
  peptide (1)..(221): Ceres Seq. ID no. 12327205
  misc_feature (116)..(204): Homolog of NCBI NO: 33866372 NR Description: conserved hypothetical protein [Synechococcus sp.
  misc_feature (114)..(204): Homolog of NCBI NO: 37521175 NR Description: hypothetical protein gsr1606 [Gloeobacter
  misc_feature (114)..(219): Homolog of NCBI NO: 22298501 NR Description: ORF_ID:tll0958~hypothetical protein
  misc_feature (114)..(218): Homolog of NCBI NO: 16332324 NR Description: unknown protein [Synechocystis sp. PCC 6803]
  misc_feature (114)..(219): Homolog of NCBI NO: 23130142 NR Description: hypothetical protein [Nostoc punctiforme]
  misc_feature (114)..(219): Homolog of NCBI NO: 17229946 NR Description: hypothetical protein [Nostoc sp. PCC 7120]
  misc_feature (114)..(219): Homolog of NCBI NO: 23041855 NR Description: hypothetical protein [Trichodesmium erythraeum
  misc_feature (1)..(221): Homolog of NCBI NO: 18402409 NR Description: expressed protein
  misc_feature (1)..(221): Homolog of NCBI NO: 11994202 NR Description: dbj|BAA18864.1~gene_id:MPN9.15~similar to unknown

SEQ ID NO: 34702 - protein, 126 aa, Arabidopsis thaliana; identical to SEQ ID NO: 31112
  peptide (1)..(126): Ceres Seq. ID no. 12327206
  misc_feature (21)..(109): Homolog of NCBI NO: 33866372 NR Description: conserved hypothetical protein [Synechococcus sp.
  misc_feature (19)..(109): Homolog of NCBI NO: 37521175 NR Description: hypothetical protein gsr1606 [Gloeobacter
  misc_feature (19)..(124): Homolog of NCBI NO: 22298501 NR Description: ORF_ID:tll0958~hypothetical protein
  misc_feature (19)..(123): Homolog of NCBI NO: 16332324 NR Description: unknown protein [Synechocystis sp. PCC 6803]
  misc_feature (19)..(124): Homolog of NCBI NO: 23130142 NR Description: hypothetical protein [Nostoc punctiforme]
  misc_feature (19)..(124): Homolog of NCBI NO: 17229946 NR Description: hypothetical protein [Nostoc sp. PCC 7120]
  misc_feature (19)..(124): Homolog of NCBI NO: 23041855 NR Description: hypothetical protein [Trichodesmium erythraeum
  misc_feature (1)..(126): Homolog of NCBI NO: 18402409 NR Description: expressed protein
  misc_feature (1)..(126): Homolog of NCBI NO: 11994202 NR Description: dbj|BAA18864.1~gene_id:MPN9.15~similar to unknown

SEQ ID NO: 34703 - DNA, 573 bp, Arabidopsis thaliana
  misc_feature (1)..(573): Ceres Seq. ID no. 12397113
  misc_feature: MA Experiment ID: 108434 Result: Up-regulated in Transcription
  misc_feature: MA Experiment 108434 PARAMETER Experiment Name: At_Root_Tips_cDNA_P Parameter: Tissue Value: Root Tips
  misc_feature: MA Experiment ID: 108435 Result: Up-regulated in Transcription
  misc_feature: MA Experiment 108435 PARAMETER Experiment Name: At_stm_Mutants_cDNA_P Parameter: Plant Line Value: wt Landsburg vs stm
  misc_feature: MA Experiment 108435 PARAMETER Experiment Name: At_stm_Mutants_cDNA_P Parameter: Tissue Value: Shoot Apical Meristem Region
  misc_feature: MA Experiment ID: 108462 Result: Down-regulated in Transcription
  misc_feature: MA Experiment 108462 PARAMETER Experiment Name: At_Germinating_Seeds_cDNA_P Parameter: Age (day) Value: 2 vs. 0
  misc_feature: MA Experiment 108462 PARAMETER Experiment Name: At_Germinating_Seeds_cDNA_P Parameter: Tissue Value: Germinating Seeds
  misc_feature: MA Experiment ID: 108463 Result: Down-regulated in Transcription
  misc_feature: MA Experiment 108463 PARAMETER Experiment Name: At_Germinating_Seeds_cDNA_P Parameter: Age (day) Value: 3 vs. 0
  misc_feature: MA Experiment 108463 PARAMETER Experiment Name: At_Germinating_Seeds_cDNA_P Parameter: Tissue Value: Germinating Seeds
  misc_feature: MA Experiment ID: 108464 Result: Down-regulated in Transcription
  misc_feature: MA Experiment 108464 PARAMETER Experiment Name: At_Germinating_Seeds_cDNA_P Parameter: Age (day) Value: 4 vs. 0
  misc_feature: MA Experiment 108464 PARAMETER Experiment Name: At_Germinating_Seeds_cDNA_P Parameter: Tissue Value: Germinating Seeds
  misc_feature: MA Experiment ID: 20000224 Result: Down-regulated in Transcription
actagaaattttgtctctctcgccgccttgcgaaaagcattttcgatcttactcttaggataaaaaaatgtcgacagttggagagcttgcttgcagctacgctgttatgatcctcgaggacgagggtatcgctatcacggctgacaaaatcgcgaccttggtgaaagctgctggtgttagtattgagtcatactggccaatgctattcgccaagatggctgagaaacgtaacgtgactgatctcatcatgaacgttggtgctggtggtggaggtggtgctccggttgcagctgctgctccagctgctggcggtggtgcggcagctgctcctgctgctgaggagaagaagaaggatgagccagcagaagagagtgacggagatttgggtttcggtttgtttgactaaacgcagtcacttgtctttcttctttgtagttggatattggagactatattttgtcgtatgagttattattacttgtttgatctggctaaaggactattagttggtttatgatgcgtatgttgtataactcaagtttcctagcaaaccaatcggctcgggcttttgtt

SEQ ID NO: 34704 - protein, 112 aa, Arabidopsis thaliana; identical to SEQ ID NO: 29961
  peptide (1)..(112): Ceres Seq. ID no. 12397114
  misc_feature (22)..(111): Pfam Name: 60s Acidic ribosomal protein Pfam Description: 60s Acidic ribosomal protein
  misc_feature (1)..(112): Homolog of NCBI NO: 18253043 NR Description: 60S acidic ribosomal protein P1 [Spodoptera
  misc_feature (1)..(112): Homolog of NCBI NO: 25150244 NR Description: 60S Ribosomal Protein, Acidic 1
  misc_feature (5)..(112): Homolog of NCBI NO: 1710590 NR Description: 60S ACIDIC RIBOSOMAL PROTEIN P1 (L12)
  misc_feature (5)..(112): Homolog of NCBI NO: 7440759 NR Description: acidic ribosomal protein P1a - maize
  misc_feature (1)..(112): Homolog of NCBI NO: 6094103 NR Description: 60S acidic ribosomal protein P1
  misc_feature (1)..(112): Homolog of NCBI NO: 18411448 NR Description: acidic ribosomal protein p1
  misc_feature (1)..(112): Homolog of NCBI NO: 21553441 NR Description: 60S acidic ribosomal protein P1-like protein
  misc_feature (1)..(112): Homolog of NCBI NO: 15238170 NR Description: 60S acidic ribosomal protein P1-like protein
  misc_feature (1)..(112): Homolog of NCBI NO: 21592477 NR Description: acidic ribosomal protein, putative [Arabidopsis
  misc_feature (1)..(112): Homolog of NCBI NO: 15223303 NR Description: acidic ribosomal protein, putative

SEQ ID NO: 34705 - protein, 99 aa, Arabidopsis thaliana; identical to SEQ ID NO: 29962
  peptide (1)..(99): Ceres Seq. ID no. 12397115
  misc_feature (9)..(98): Pfam Name: 60s Acidic ribosomal protein Pfam Description: 60s Acidic ribosomal protein
  misc_feature (1)..(99): Homolog of NCBI NO: 18253043 NR Description: 60S acidic ribosomal protein P1 [Spodoptera
  misc_feature (1)..(99): Homolog of NCBI NO: 25150244 NR Description: 60S Ribosomal Protein, Acidic 1
  misc_feature (1)..(99): Homolog of NCBI NO: 1710590 NR Description: 60S ACIDIC RIBOSOMAL PROTEIN P1 (L12)
  misc_feature (1)..(99): Homolog of NCBI NO: 7440759 NR Description: acidic ribosomal protein P1a - maize
  misc_feature (1)..(99): Homolog of NCBI NO: 6094103 NR Description: 60S acidic ribosomal protein P1
  misc_feature (1)..(99): Homolog of NCBI NO: 18411448 NR Description: acidic ribosomal protein p1
  misc_feature (1)..(99): Homolog of NCBI NO: 21553441 NR Description: 60S acidic ribosomal protein P1-like protein
  misc_feature (1)..(99): Homolog of NCBI NO: 15238170 NR Description: 60S acidic ribosomal protein P1-like protein
  misc_feature (1)..(99): Homolog of NCBI NO: 21592477 NR Description: acidic ribosomal protein, putative [Arabidopsis
  misc_feature (1)..(99): Homolog of NCBI NO: 15223303 NR Description: acidic ribosomal protein, putative

SEQ ID NO: 34706 - protein, 68 aa, Arabidopsis thaliana; identical to SEQ ID NO: 29963
  peptide (1)..(68): Ceres Seq. ID no. 12397116
  misc_feature (1)..(67): Pfam Name: 60s Acidic ribosomal protein Pfam Description: 60s Acidic ribosomal protein
  misc_feature (1)..(68): Homolog of NCBI NO: 18253043 NR Description: 60S acidic ribosomal protein P1 [Spodoptera
  misc_feature (1)..(68): Homolog of NCBI NO: 25150244 NR Description: 60S Ribosomal Protein, Acidic 1
  misc_feature (1)..(68): Homolog of NCBI NO: 1710590 NR Description: 60S ACIDIC RIBOSOMAL PROTEIN P1 (L12)
  misc_feature (1)..(68): Homolog of NCBI NO: 7440759 NR Description: acidic ribosomal protein P1a - maize
  misc_feature (1)..(68): Homolog of NCBI NO: 6094103 NR Description: 60S acidic ribosomal protein P1
  misc_feature (1)..(68): Homolog of NCBI NO: 18411448 NR Description: acidic ribosomal protein p1
  misc_feature (1)..(68): Homolog of NCBI NO: 21553441 NR Description: 60S acidic ribosomal protein P1-like protein
  misc_feature (1)..(68): Homolog of NCBI NO: 15238170 NR Description: 60S acidic ribosomal protein P1-like protein
  misc_feature (1)..(68): Homolog of NCBI NO: 21592477 NR Description: acidic ribosomal protein, putative [Arabidopsis
  misc_feature (1)..(68): Homolog of NCBI NO: 15223303 NR Description: acidic ribosomal protein, putative

SEQ ID NO: 34707 - DNA, 654 bp, Arabidopsis thaliana
  misc_feature (1)..(654): Ceres Seq. ID no. 12397117
  misc_feature: MA Experiment ID: 108433 Result: Down-regulated in Transcription
  misc_feature: MA Experiment 108433 PARAMETER Experiment Name: At_rhl_Mutant2_cDNA_P Parameter: Age (day) Value: 7
  misc_feature: MA Experiment 108433 PARAMETER Experiment Name: At_rhl_Mutant2_cDNA_P Parameter: Organism Value: A. thaliana
  misc_feature: MA Experiment 108433 PARAMETER Experiment Name: At_rhl_Mutant2_cDNA_P Parameter: Plant Line Value: rhl Mutant vs. wt landsburg
  misc_feature: MA Experiment 108433 PARAMETER Experiment Name: At_rhl_Mutant2_cDNA_P Parameter: Tissue Value: Roots
  misc_feature: MA Experiment ID: 108435 Result: Down-regulated in Transcription
  misc_feature: MA Experiment 108435 PARAMETER Experiment Name: At_stm_Mutants_cDNA_P Parameter: Plant Line Value: wt Landsburg vs stm
  misc_feature: MA Experiment 108435 PARAMETER Experiment Name: At_stm_Mutants_cDNA_P Parameter: Tissue Value: Shoot Apical Meristem Region
  misc_feature: MA Experiment ID: 108461 Result: Up-regulated in Transcription
  misc_feature: MA Experiment 108461 PARAMETER Experiment Name: At_Germinating_Seeds_cDNA_P Parameter: Age (day) Value: 1 vs. 0
  misc_feature: MA Experiment 108461 PARAMETER Experiment Name: At_Germinating_Seeds_cDNA_P Parameter: Tissue Value: Germinating Seeds
  misc_feature: MA Experiment ID: 108462 Result: Up-regulated in Transcription
  misc_feature: MA Experiment 108462 PARAMETER Experiment Name: At_Germinating_Seeds_cDNA_P Parameter: Age (day) Value: 2 vs. 0
  misc_feature: MA Experiment 108462 PARAMETER Experiment Name: At_Germinating_Seeds_cDNA_P Parameter: Tissue Value: Germinating Seeds
  misc_feature: MA Experiment ID: 108463 Result: Up-regulated in Transcription
  misc_feature: MA Experiment 108463 PARAMETER Experiment Name: At_Germinating_Seeds_cDNA_P Parameter: Age (day) Value: 3 vs. 0
  misc_feature: MA Experiment 108463 PARAMETER Experiment Name: At_Germinating_Seeds_cDNA_P Parameter: Tissue Value: Germinating Seeds
  misc_feature: MA Experiment ID: 108464 Result: Up-regulated in Transcription
  misc_feature: MA Experiment 108464 PARAMETER Experiment Name: At_Germinating_Seeds_cDNA_P Parameter: Age (day) Value: 4 vs. 0
  misc_feature: MA Experiment 108464 PARAMETER Experiment Name: At_Germinating_Seeds_cDNA_P Parameter: Tissue Value: Germinating Seeds
  misc_feature: MA Experiment ID: 108488 Result: Up-regulated in Transcription
  misc_feature: MA Experiment ID: 108577 Result: Up-regulated in Transcription
  misc_feature: MA Experiment 108577 PARAMETER Experiment Name: At_42deg_Heat_cDNA_P Parameter: Temperature (deg C) Value: 42 vs. 22
  misc_feature: MA Experiment 108577 PARAMETER Experiment Name: At_42deg_Heat_cDNA_P Parameter: Timepoint (hr) Value: 6
  misc_feature: MA Experiment 108577 PARAMETER Experiment Name: At_42deg_Heat_cDNA_P Parameter: Tissue Value: Aerial
  misc_feature: MA Experiment ID: 108579 Result: Up-regulated in Transcription
  misc_feature: MA Experiment 108579 PARAMETER Experiment Name: At_4deg_Cold_cDNA_P Parameter: Temperature (deg C) Value: 4 vs. 22
  misc_feature: MA Experiment 108579 PARAMETER Experiment Name: At_4deg_Cold_cDNA_P Parameter: Timepoint (hr) Value: 6
  misc_feature: MA Experiment 108579 PARAMETER Experiment Name: At_4deg_Cold_cDNA_P Parameter: Tissue Value: Aerial
  misc_feature: MA Experiment ID: 108595 Result: Down-regulated in Transcription
  misc_feature: MA Experiment 108595 PARAMETER Experiment Name: At_Ler-pi_Ovule_cDNA_P Parameter: Plant Line Value: null
  misc_feature: MA Experiment ID: 20000069 Result: Down-regulated in Transcription
  misc_feature: MA Experiment 20000069 PARAMETER Experiment Name: At_100uM_ABA_Mutants_cDNA_P Parameter: Plant Line Value: CS23
  misc_feature: MA Experiment 20000069 PARAMETER Experiment Name: At_100uM_ABA_Mutants_cDNA_P Parameter: Timepoint (hr) Value: 6
  misc_feature: MA Experiment 20000069 PARAMETER Experiment Name: At_100uM_ABA_Mutants_cDNA_P Parameter: Tissue Value: Aerial
  misc_feature: MA Experiment 20000069 PARAMETER Experiment Name: At_100uM_ABA_Mutants_cDNA_P Parameter: Treatment Value: 100uM ABA vs. No Treatment
  misc_feature: MA Experiment ID: 20000070 Result: Down-regulated in Transcription
  misc_feature: MA Experiment 20000070 PARAMETER Experiment Name: At_100uM_ABA_Mutants_cDNA_P Parameter: Plant Line Value: CS24
  misc_feature: MA Experiment 20000070 PARAMETER Experiment Name: At_100uM_ABA_Mutants_cDNA_P Parameter: Timepoint (hr) Value: 6
  misc_feature: MA Experiment 20000070 PARAMETER Experiment Name: At_100uM_ABA_Mutants_cDNA_P Parameter: Tissue Value: Aerial
  misc_feature: MA Experiment 20000070 PARAMETER Experiment Name: At_100uM_ABA_Mutants_cDNA_P Parameter: Treatment Value: 100uM ABA vs. No Treatment
  misc_feature: MA Experiment ID: 20000071 Result: Down-regulated in Transcription
  misc_feature: MA Experiment 20000071 PARAMETER Experiment Name: At_100uM_ABA_Mutants_cDNA_P Parameter: Plant Line Value: CS8104
  misc_feature: MA Experiment 20000071 PARAMETER Experiment Name: At_100uM_ABA_Mutants_cDNA_P Parameter: Timepoint (hr) Value: 6
  misc_feature: MA Experiment 20000071 PARAMETER Experiment Name: At_100uM_ABA_Mutants_cDNA_P Parameter: Tissue Value: Aerial
  misc_feature: MA Experiment 20000071 PARAMETER Experiment Name: At_100uM_ABA_Mutants_cDNA_P Parameter: Treatment Value: 100uM ABA vs. No Treatment
  misc_feature: MA Experiment ID: 20000072 Result: Down-regulated in Transcription
  misc_feature: MA Experiment 20000072 PARAMETER Experiment Name: At_100uM_ABA_Mutants_cDNA_P Parameter: Plant Line Value: CS8105
  misc_feature: MA Experiment 20000072 PARAMETER Experiment Name: At_100uM_ABA_Mutants_cDNA_P Parameter: Timepoint (hr) Value: 6
  misc_feature: MA Experiment 20000072 PARAMETER Experiment Name: At_100uM_ABA_Mutants_cDNA_P Parameter: Tissue Value: Aerial
  misc_feature: MA Experiment 20000072 PARAMETER Experiment Name: At_100uM_ABA_Mutants_cDNA_P Parameter: Treatment Value: 100uM ABA vs. No Treatment
  misc_feature: MA Experiment ID: 20000086 Result: Down-regulated in Transcription
  misc_feature: MA Experiment 20000086 PARAMETER Experiment Name: At_100uM_ABA_Mutants_cDNA_P Parameter: Plant Line Value: CS22
  misc_feature: MA Experiment 20000086 PARAMETER Experiment Name: At_100uM_ABA_Mutants_cDNA_P Parameter: Timepoint (hr) Value: 6
  misc_feature: MA Experiment 20000086 PARAMETER Experiment Name: At_100uM_ABA_Mutants_cDNA_P Parameter: Tissue Value: Aerial
  misc_feature: MA Experiment 20000086 PARAMETER Experiment Name: At_100uM_ABA_Mutants_cDNA_P Parameter: Treatment Value: 100uM ABA vs. No Treatment
  misc_feature: MA Experiment ID: 20000087 Result: Down-regulated in Transcription
  misc_feature: MA Experiment 20000087 PARAMETER Experiment Name: At_100uM_ABA_Mutants_cDNA_P Parameter: Plant Line Value: WS
  misc_feature: MA Experiment 20000087 PARAMETER Experiment Name: At_100uM_ABA_Mutants_cDNA_P Parameter: Timepoint (hr) Value: 6
  misc_feature: MA Experiment 20000087 PARAMETER Experiment Name: At_100uM_ABA_Mutants_cDNA_P Parameter: Tissue Value: Aerial
  misc_feature: MA Experiment 20000087 PARAMETER Experiment Name: At_100uM_ABA_Mutants_cDNA_P Parameter: Treatment Value: 100uM ABA vs. No Treatment
  misc_feature: MA Experiment ID: 20000088 Result: Down-regulated in Transcription
  misc_feature: MA Experiment 20000088 PARAMETER Experiment Name: At_100uM_ABA_Mutants_cDNA_P Parameter: Plant Line Value: Landsberg
  misc_feature: MA Experiment 20000088 PARAMETER Experiment Name: At_100uM_ABA_Mutants_cDNA_P Parameter: Timepoint (hr) Value: 6
  misc_feature: MA Experiment 20000088 PARAMETER Experiment Name: At_100uM_ABA_Mutants_cDNA_P Parameter: Tissue Value: Aerial
  misc_feature: MA Experiment 20000088 PARAMETER Experiment Name: At_100uM_ABA_Mutants_cDNA_P Parameter: Treatment Value: 100uM ABA vs. No Treatment
  misc_feature: MA Experiment ID: 20000089 Result: Down-regulated in Transcription
  misc_feature: MA Experiment ID: 20000090 Result: Down-regulated in Transcription
  misc_feature: MA Experiment ID: 20000093 Result: Up-regulated in Transcription
  misc_feature: MA Experiment 20000093 PARAMETER Experiment Name: At_42deg_Heat_cDNA_P Parameter: Temperature (deg C) Value: 42 vs. 22
  misc_feature: MA Experiment 20000093 PARAMETER Experiment Name: At_42deg_Heat_cDNA_P Parameter: Timepoint (hr) Value: 0.5
  misc_feature: MA Experiment 20000093 PARAMETER Experiment Name: At_42deg_Heat_cDNA_P Parameter: Tissue Value: Aerial
  misc_feature: MA Experiment ID: 20000111 Result: Up-regulated in Transcription
  misc_feature: MA Experiment 20000111 PARAMETER Experiment Name: At_42deg_Heat_cDNA_P Parameter: Temperature (deg C) Value: 42 vs. 22
  misc_feature: MA Experiment 20000111 PARAMETER Experiment Name: At_42deg_Heat_cDNA_P Parameter: Timepoint (hr) Value: 6
  misc_feature: MA Experiment 20000111 PARAMETER Experiment Name: At_42deg_Heat_cDNA_P Parameter: Tissue Value: Aerial
  misc_feature: MA Experiment ID: 20000112 Result: Up-regulated in Transcription
  misc_feature: MA Experiment 20000112 PARAMETER Experiment Name: At_42deg_Heat_cDNA_P Parameter: Temperature (deg C) Value: 42 vs. 22
  misc_feature: MA Experiment 20000112 PARAMETER Experiment Name: At_42deg_Heat_cDNA_P Parameter: Timepoint (hr) Value: 2
  misc_feature: MA Experiment 20000112 PARAMETER Experiment Name: At_42deg_Heat_cDNA_P Parameter: Tissue Value: Aerial
  misc_feature: MA Experiment ID: 20000113 Result: Up-regulated in Transcription
  misc_feature: MA Experiment 20000113 PARAMETER Experiment Name: At_42deg_Heat_cDNA_P Parameter: Temperature (deg C) Value: 42 vs. 22
  misc_feature: MA Experiment 20000113 PARAMETER Experiment Name: At_42deg_Heat_cDNA_P Parameter: Timepoint (hr) Value: 8
  misc_feature: MA Experiment 20000113 PARAMETER Experiment Name: At_42deg_Heat_cDNA_P Parameter: Tissue Value: Aerial
  misc_feature: MA Experiment ID: 20000117 Result: Down-regulated in Transcription
  misc_feature: MA Experiment 20000117 PARAMETER Experiment Name: At_100uM_ABA_Mutants_cDNA_P Parameter: Plant Line Value: Columbia
  misc_feature: MA Experiment 20000117 PARAMETER Experiment Name: At_100uM_ABA_Mutants_cDNA_P Parameter: Timepoint (hr) Value: 6
  misc_feature: MA Experiment 20000117 PARAMETER Experiment Name: At_100uM_ABA_Mutants_cDNA_P Parameter: Tissue Value: Aerial
  misc_feature: MA Experiment 20000117 PARAMETER Experiment Name: At_100uM_ABA_Mutants_cDNA_P Parameter: Treatment Value: 100uM ABA vs. No Treatment
  misc_feature: MA Experiment ID: 20000144 Result: Up-regulated in Transcription
  misc_feature: MA Experiment 20000144 PARAMETER Experiment Name: At_42deg_Heat_cDNA_P Parameter: Temperature (deg C) Value: 42 vs. 22
  misc_feature: MA Experiment 20000144 PARAMETER Experiment Name: At_42deg_Heat_cDNA_P Parameter: Timepoint (hr) Value: 1
  misc_feature: MA Experiment 20000144 PARAMETER Experiment Name: At_42deg_Heat_cDNA_P Parameter: Tissue Value: Aerial
  misc_feature: MA Experiment ID: 20000171 Result: Up-regulated in Transcription
  misc_feature: MA Experiment 20000171 PARAMETER Experiment Name: At_42deg_Heat_P Parameter: Age (day) Value: 14
  misc_feature: MA Experiment 20000171 PARAMETER Experiment Name: At_42deg_Heat_P Parameter: Organism Value: A. thaliana
  misc_feature: MA Experiment 20000171 PARAMETER Experiment Name: At_42deg_Heat_P Parameter: Plant Line Value: WS
  misc_feature: MA Experiment 20000171 PARAMETER Experiment Name: At_42deg_Heat_P Parameter: Temperature (deg C) Value: 42 vs. 22
  misc_feature: MA Experiment 20000171 PARAMETER Experiment Name: At_42deg_Heat_P Parameter: Timepoint (hr) Value: 1
  misc_feature: MA Experiment 20000171 PARAMETER Experiment Name: At_42deg_Heat_P Parameter: Tissue Value: Aerial
  misc_feature: MA Experiment ID: 20000173 Result: Up-regulated in Transcription
  misc_feature: MA Experiment 20000173 PARAMETER Experiment Name: At_42deg_Heat_P Parameter: Age (day) Value: 14
  misc_feature: MA Experiment 20000173 PARAMETER Experiment Name: At_42deg_Heat_P Parameter: Organism Value: A. thaliana
  misc_feature: MA Experiment 20000173 PARAMETER Experiment Name: At_42deg_Heat_P Parameter: Plant Line Value: WS
  misc_feature: MA Experiment 20000173 PARAMETER Experiment Name: At_42deg_Heat_P Parameter: Temperature (deg C) Value: 42 vs. 22
  misc_feature: MA Experiment 20000173 PARAMETER Experiment Name: At_42deg_Heat_P Parameter: Timepoint (hr) Value: 6
  misc_feature: MA Experiment 20000173 PARAMETER Experiment Name: At_42deg_Heat_P Parameter: Tissue Value: Aerial
  misc_feature: MA Experiment ID: 20000180 Result: Up-regulated in Transcription
  misc_feature: MA Experiment 20000180 PARAMETER Experiment Name: At_Germinating_Seeds_P Parameter: Age (hr) Value: 24 vs. 0
  misc_feature: MA Experiment 20000180 PARAMETER Experiment Name: At_Germinating_Seeds_P Parameter: Tissue Value: Germinating Seeds
  misc_feature: MA Experiment ID: 20000184 Result: Up-regulated in Transcription
  misc_feature: MA Experiment 20000184 PARAMETER Experiment Name: At_Shoots__P Parameter: Age (day) Value: 7
  misc_feature: MA Experiment 20000184 PARAMETER Experiment Name: At_Shoots__P Parameter: Tissue Value: Shoots vs. Whole Plant
  misc_feature: MA Experiment ID: 20000224 Result: Up-regulated in Transcription
  misc_feature: MA Experiment ID: 20000227 Result: Up-regulated in Transcription
  misc_feature: MA Experiment 20000227 PARAMETER Experiment Name: At_Root-Tips-vs-Tops_P Parameter: Tissue Value: Root Tips vs. Root Tops
  misc_feature: MA Experiment ID: 20000234 Result: Up-regulated in Transcription
  misc_feature: MA Experiment 20000234 PARAMETER Experiment Name: At_Siliques_P Parameter: Age (day) Value: 21
  misc_feature: MA Experiment 20000234 PARAMETER Experiment Name: At_Siliques_P Parameter: Organism Value: A. thaliana
  misc_feature: MA Experiment 20000234 PARAMETER Experiment Name: At_Siliques_P Parameter: Plant Line Value: WS
  misc_feature: MA Experiment 20000234 PARAMETER Experiment Name: At_Siliques_P Parameter: Tissue Value: Less Than 5mm Siliques vs. Whole Plant
  misc_feature: MA Experiment ID: 20000437 Result: Down-regulated in Transcription
  misc_feature: MA Experiment 20000437 PARAMETER Experiment Name: At_Drought_P Parameter: Age (day) Value: 8
  misc_feature: MA Experiment 20000437 PARAMETER Experiment Name: At_Drought_P Parameter: Organism Value: A. thaliana
  misc_feature: MA Experiment 20000437 PARAMETER Experiment Name: At_Drought_P Parameter: Plant Line Value: WS
  misc_feature: MA Experiment 20000437 PARAMETER Experiment Name: At_Drought_P Parameter: Timepoint (hr) Value: 24
  misc_feature: MA Experiment 20000437 PARAMETER Experiment Name: At_Drought_P Parameter: Tissue Value: Whole Plant
  misc_feature: MA Experiment 20000437 PARAMETER Experiment Name: At_Drought_P Parameter: Treatment Value: Drought vs. No Drought
  misc_feature: MA Experiment ID: 20000438 Result: Up-regulated in Transcription
  misc_feature: MA Experiment 20000438 PARAMETER Experiment Name: At_Shoots__P Parameter: Age (day) Value: 14
  misc_feature: MA Experiment 20000438 PARAMETER Experiment Name: At_Shoots__P Parameter: Tissue Value: Shoots vs. Whole Plant
  misc_feature: MA Experiment ID: 20000439 Result: Down-regulated in Transcription
  misc_feature: MA Experiment 20000439 PARAMETER Experiment Name: At_Roots__P Parameter: Age (day) Value: 14 vs. 21
  misc_feature: MA Experiment 20000439 PARAMETER Experiment Name: At_Roots__P Parameter: Organism Value: A. thaliana
  misc_feature: MA Experiment 20000439 PARAMETER Experiment Name: At_Roots__P Parameter: Tissue Value: Roots vs. Whole Plant
  misc_feature: MA Experiment ID: 20000441 Result: Up-regulated in Transcription
  misc_feature: MA Experiment 20000441 PARAMETER Experiment Name: At_1uM_BR-BRZ__P Parameter: Tissue Value: Shoot Apices
  misc_feature: MA Experiment 20000441 PARAMETER Experiment Name: At_1uM_BR-BRZ__P Parameter: Treatment Value: 1uM BR vs. No Treatment
  misc_feature: MA Experiment ID: 20000443 Result: Up-regulated in Transcription
  misc_feature: MA Experiment 20000443 PARAMETER Experiment Name: At_1uM_BR-BRZ__P Parameter: Tissue Value: Shoot Apices
  misc_feature: MA Experiment 20000443 PARAMETER Experiment Name: At_1uM_BR-BRZ__P Parameter: Treatment Value: 1uM BRZ vs. No Treatment
  misc_feature: MA Experiment ID: 20001248 Result: Down-regulated in Transcription
  misc_feature: MA Experiment 20001248 PARAMETER Experiment Name: At_Far-red-induction_P Parameter: Age (day) Value: 7
  misc_feature: MA Experiment 20001248 PARAMETER Experiment Name: At_Far-red-induction_P Parameter: Light Value: Far-red vs. White
  misc_feature: MA Experiment 20001248 PARAMETER Experiment Name: At_Far-red-induction_P Parameter: Organism Value: A. thaliana
  misc_feature: MA Experiment 20001248 PARAMETER Experiment Name: At_Far-red-induction_P Parameter: Plant Line Value: Columbia
  misc_feature: MA Experiment 20001248 PARAMETER Experiment Name: At_Far-red-induction_P Parameter: Timepoint (hr) Value: 4
  misc_feature: MA Experiment 20001248 PARAMETER Experiment Name: At_Far-red-induction_P Parameter: Tissue Value: Whole Plant
  misc_feature: MA Experiment ID: 20001450 Result: Down-regulated in Transcription
  misc_feature: MA Experiment 20001450 PARAMETER Experiment Name: At_Far-red-induction_P Parameter: Age (day) Value: 7
  misc_feature: MA Experiment 20001450 PARAMETER Experiment Name: At_Far-red-induction_P Parameter: Light Value: Far-red vs. White
  misc_feature: MA Experiment 20001450 PARAMETER Experiment Name: At_Far-red-induction_P Parameter: Organism Value: A. thaliana
  misc_feature: MA Experiment 20001450 PARAMETER Experiment Name: At_Far-red-induction_P Parameter: Plant Line Value: Columbia
  misc_feature: MA Experiment 20001450 PARAMETER Experiment Name: At_Far-red-induction_P Parameter: Timepoint (hr) Value: 8
  misc_feature: MA Experiment 20001450 PARAMETER Experiment Name: At_Far-red-induction_P Parameter: Tissue Value: Whole Plant
  misc_feature: MA Experiment ID: 20001451 Result: Down-regulated in Transcription
  misc_feature: MA Experiment 20001451 PARAMETER Experiment Name: At_Far-red-induction_P Parameter: Age (day) Value: 7
  misc_feature: MA Experiment 20001451 PARAMETER Experiment Name: At_Far-red-induction_P Parameter: Light Value: Far-red vs. White
  misc_feature: MA Experiment 20001451 PARAMETER Experiment Name: At_Far-red-induction_P Parameter: Organism Value: A. thaliana
  misc_feature: MA Experiment 20001451 PARAMETER Experiment Name: At_Far-red-induction_P Parameter: Plant Line Value: Columbia
  misc_feature: MA Experiment 20001451 PARAMETER Experiment Name: At_Far-red-induction_P Parameter: Timepoint (hr) Value: 24
  misc_feature: MA Experiment 20001451 PARAMETER Experiment Name: At_Far-red-induction_P Parameter: Tissue Value: Whole Plant
  misc_feature: MA Experiment ID: 20001905 Result: Down-regulated in Transcription
  misc_feature: MA Experiment 20001905 PARAMETER Experiment Name: At_Drought_Reproduction_P Parameter: Age (day) Value: 40
  misc_feature: MA Experiment 20001905 PARAMETER Experiment Name: At_Drought_Reproduction_P Parameter: Organism Value: A. thaliana
  misc_feature: MA Experiment 20001905 PARAMETER Experiment Name: At_Drought_Reproduction_P Parameter: Plant Line Value: WS
  misc_feature: MA Experiment 20001905 PARAMETER Experiment Name: At_Drought_Reproduction_P Parameter: Timepoint (day) Value: 10
  misc_feature: MA Experiment 20001905 PARAMETER Experiment Name: At_Drought_Reproduction_P Parameter: Tissue Value: Rosettes
  misc_feature: MA Experiment 20001905 PARAMETER Experiment Name: At_Drought_Reproduction_P Parameter: Treatment Value: Drought vs. No Drought
atttttttttttttcacaaagccacaccaactcactcacaaaatctgtagaatcatctttcaacaatggcttccactgctctctccagcgcaatcgtaagcacctctttcctccgccgtcaacagacaccaatcagcctcagatccctcccgtttgccaacacacaatctctcttcggcctcaaatcttccaccgctcgcggcggccgcgtcacggccatggctacctacaaggtcaagttcatcacacctgagggagaacaagaggtcgaatgcgaagaagatgtctacgtcctcgacgctgctgaggaagccggactcgacttgccctactcatgccgtgccggttcttgctcaagttgcgccgggaaagtcgtctctggttctattgaccagtcggaccagagcttcttagacgatgaacagatgagtgagggctatgtcttgacctgtgtggcttatccgacttctgatgtcgtcatcgaaacccacaaagaagaagccattatgtaaaattttaaagctttttgatgaatttcatcaaaagagaaattacttgatgtttaagtcatctctcttgttacttcgctaatgttgccctaatttggctcatccttttataagatcaatcaataataacaaatttcaatgtttt

SEQ ID NO: 34708 - protein, 148 aa, Arabidopsis thaliana
  peptide (1)..(148): Ceres Seq. ID no. 12397118
  misc_feature (60)..(135): Pfam Name: 2Fe-2S iron-sulfur cluster binding domain Pfam Description: 2Fe-2S iron-sulfur cluster binding domain
  misc_feature (1)..(147): Homolog of NCBI NO: 119937 NR Description: Ferredoxin I, chloroplast precursor (Fd I)
  misc_feature (1)..(148): Homolog of NCBI NO: 34921349 NR Description: Ferredoxin, chloroplast precursor (PFLP)
  misc_feature (1)..(147): Homolog of NCBI NO: 120026 NR Description: Ferredoxin, chloroplast precursor
  misc_feature (2)..(145): Homolog of NCBI NO: 37779195 NR Description: ferredoxin [Helianthus annuus]
  misc_feature (1)..(147): Homolog of NCBI NO: 33520415 NR Description: ferredoxin I [Trifolium pratense]
  misc_feature (1)..(145): Homolog of NCBI NO: 119931 NR Description: Ferredoxin I, chloroplast precursor
  misc_feature (1)..(147): Homolog of NCBI NO: 3023743 NR Description: Ferredoxin I, chloroplast precursor
  misc_feature (1)..(118): Homolog of NCBI NO: 16604416 NR Description: At1g10960/T19D16_12 [Arabidopsis thaliana]
  misc_feature (1)..(148): Homolog of NCBI NO: 15219837 NR Description: ferrodoxin precursor
  misc_feature (1)..(148): Homolog of NCBI NO: 15220256 NR Description: ferredoxin precusor isolog
MASTALSSAIVSTSFLRRQQTPISLRSLPFANTQSLFGLKSSTARGGRVTAMATYKVKFITPEGEQEVECEEDVYVLDAAEEAGLDLPYSCRAGSCSSCAGKVVSGSIDQSDQSFLDDEQMSEGYVLTCVAYPTSDVVIETHKEEAIM

SEQ ID NO: 34709 - protein, 97 aa, Arabidopsis thaliana
  peptide (1)..(97): Ceres Seq. ID no. 12397119
  misc_feature (9)..(84): Pfam Name: 2Fe-2S iron-sulfur cluster binding domain Pfam Description: 2Fe-2S iron-sulfur cluster binding domain
  misc_feature (1)..(96): Homolog of NCBI NO: 119937 NR Description: Ferredoxin I, chloroplast precursor (Fd I)
  misc_feature (1)..(97): Homolog of NCBI NO: 34921349 NR Description: Ferredoxin, chloroplast precursor (PFLP)
  misc_feature (1)..(96): Homolog of NCBI NO: 120026 NR Description: Ferredoxin, chloroplast precursor
  misc_feature (1)..(94): Homolog of NCBI NO: 37779195 NR Description: ferredoxin [Helianthus annuus]
  misc_feature (1)..(96): Homolog of NCBI NO: 33520415 NR Description: ferredoxin I [Trifolium pratense]
  misc_feature (1)..(94): Homolog of NCBI NO: 119931 NR Description: Ferredoxin I, chloroplast precursor
  misc_feature (1)..(96): Homolog of NCBI NO: 3023743 NR Description: Ferredoxin I, chloroplast precursor
  misc_feature (1)..(67): Homolog of NCBI NO: 16604416 NR Description: At1g10960/T19D16_12 [Arabidopsis thaliana]
  misc_feature (1)..(97): Homolog of NCBI NO: 15219837 NR Description: ferrodoxin precursor
  misc_feature (1)..(97): Homolog of NCBI NO: 15220256 NR Description: ferredoxin precusor isolog
MATYKVKFITPEGEQEVECEEDVYVLDAAEEAGLDLPYSCRAGSCSSCAGKVVSGSIDQSDQSFLDDEQMSEGYVLTCVAYPTSDVVIETHKEEAIM

SEQ ID NO: 34710 - protein, 83 aa, Arabidopsis thaliana
  peptide (1)..(83): Ceres Seq. ID no. 12397120
FFFFSQSHTNSLTKSVESSFNNGFHCSLQRNRKHLFPPPSTDTNQPQIPPVCQHTISLRPQIFHRSRRPRHGHGYLQGQVHHT

SEQ ID NO: 34711 - DNA, 1809 bp, Arabidopsis thaliana; identical to SEQ ID NO: 23714
  misc_feature (1)..(1809): Ceres Seq. ID no. 13591810
  misc_feature: MA Experiment ID: 108434 Result: Down-regulated in Transcription
  misc_feature: MA Experiment 108434 PARAMETER Experiment Name: At_Root_Tips_cDNA_P Parameter: Tissue Value: Root Tips
  misc_feature: MA Experiment ID: 108461 Result: Up-regulated in Transcription
  misc_feature: MA Experiment 108461 PARAMETER Experiment Name: At_Germinating_Seeds_cDNA_P Parameter: Age (day) Value: 1 vs. 0
  misc_feature: MA Experiment 108461 PARAMETER Experiment Name: At_Germinating_Seeds_cDNA_P Parameter: Tissue Value: Germinating Seeds
  misc_feature: MA Experiment ID: 108462 Result: Up-regulated in Transcription
  misc_feature: MA Experiment 108462 PARAMETER Experiment Name: At_Germinating_Seeds_cDNA_P Parameter: Age (day) Value: 2 vs. 0
  misc_feature: MA Experiment 108462 PARAMETER Experiment Name: At_Germinating_Seeds_cDNA_P Parameter: Tissue Value: Germinating Seeds
  misc_feature: MA Experiment ID: 108463 Result: Up-regulated in Transcription
  misc_feature: MA Experiment 108463 PARAMETER Experiment Name: At_Germinating_Seeds_cDNA_P Parameter: Age (day) Value: 3 vs. 0
  misc_feature: MA Experiment 108463 PARAMETER Experiment Name: At_Germinating_Seeds_cDNA_P Parameter: Tissue Value: Germinating Seeds
  misc_feature: MA Experiment ID: 108577 Result: Down-regulated in Transcription
  misc_feature: MA Experiment 108577 PARAMETER Experiment Name: At_42deg_Heat_cDNA_P Parameter: Temperature (deg C) Value: 42 vs. 22
  misc_feature: MA Experiment 108577 PARAMETER Experiment Name: At_42deg_Heat_cDNA_P Parameter: Timepoint (hr) Value: 6
  misc_feature: MA Experiment 108577 PARAMETER Experiment Name: At_42deg_Heat_cDNA_P Parameter: Tissue Value: Aerial
  misc_feature: MA Experiment ID: 20000180 Result: Up-regulated in Transcription
  misc_feature: MA Experiment 20000180 PARAMETER Experiment Name: At_Germinating_Seeds_P Parameter: Age (hr) Value: 24 vs. 0
  misc_feature: MA Experiment 20000180 PARAMETER Experiment Name: At_Germinating_Seeds_P Parameter: Tissue Value: Germinating Seeds
  misc_feature: MA Experiment ID: 20000185 Result: Down-regulated in Transcription
  misc_feature: MA Experiment 20000185 PARAMETER Experiment Name: At_Roots__P Parameter: Age (day) Value: 7 vs. 21
  misc_feature: MA Experiment 20000185 PARAMETER Experiment Name: At_Roots__P Parameter: Organism Value: A. thaliana
  misc_feature: MA Experiment 20000185 PARAMETER Experiment Name: At_Roots__P Parameter: Tissue Value: Roots vs. Whole Plant
  misc_feature: MA Experiment ID: 20000224 Result: Up-regulated in Transcription
  misc_feature: MA Experiment ID: 20000234 Result: Up-regulated in Transcription
  misc_feature: MA Experiment 20000234 PARAMETER Experiment Name: At_Siliques_P Parameter: Age (day) Value: 21
  misc_feature: MA Experiment 20000234 PARAMETER Experiment Name: At_Siliques_P Parameter: Organism Value: A. thaliana
  misc_feature: MA Experiment 20000234 PARAMETER Experiment Name: At_Siliques_P Parameter: Plant Line Value: WS
  misc_feature: MA Experiment 20000234 PARAMETER Experiment Name: At_Siliques_P Parameter: Tissue Value: Less Than 5mm Siliques vs. Whole Plant
  misc_feature: MA Experiment ID: 20000235 Result: Up-regulated in Transcription
  misc_feature: MA Experiment 20000235 PARAMETER Experiment Name: At_Siliques_P Parameter: Age (day) Value: 21
  misc_feature: MA Experiment 20000235 PARAMETER Experiment Name: At_Siliques_P Parameter: Organism Value: A. thaliana
  misc_feature: MA Experiment 20000235 PARAMETER Experiment Name: At_Siliques_P Parameter: Plant Line Value: WS
  misc_feature: MA Experiment 20000235 PARAMETER Experiment Name: At_Siliques_P Parameter: Tissue Value: 5-10mm Siliques vs. Whole Plant
  misc_feature: MA Experiment ID: 20000265 Result: Up-regulated in Transcription
  misc_feature: MA Experiment 20000265 PARAMETER Experiment Name: At_Open_Flower_P Parameter: Age (day) Value: 21
  misc_feature: MA Experiment 20000265 PARAMETER Experiment Name: At_Open_Flower_P Parameter: Plant Line Value: WS
  misc_feature: MA Experiment 20000265 PARAMETER Experiment Name: At_Open_Flower_P Parameter: Tissue Value: Closed Flower vs. Whole Plant
  misc_feature: MA Experiment ID: 20000439 Result: Down-regulated in Transcription
  misc_feature: MA Experiment 20000439 PARAMETER Experiment Name: At_Roots__P Parameter: Age (day) Value: 14 vs. 21
  misc_feature: MA Experiment 20000439 PARAMETER Experiment Name: At_Roots__P Parameter: Organism Value: A. thaliana
  misc_feature: MA Experiment 20000439 PARAMETER Experiment Name: At_Roots__P Parameter: Tissue Value: Roots vs. Whole Plant
  misc_feature: MA Experiment ID: 20000573 Result: Down-regulated in Transcription
  misc_feature: MA Experiment 20000573 PARAMETER Experiment Name: At_100uM_ABA_Mutants__P Parameter: Organism Value: A. thaliana
  misc_feature: MA Experiment 20000573 PARAMETER Experiment Name: At_100uM_ABA_Mutants__P Parameter: Plant Line Value: CS22 vs. Ler wt
  misc_feature: MA Experiment 20000573 PARAMETER Experiment Name: At_100uM_ABA_Mutants__P Parameter: Timepoint (hr) Value: N/A
  misc_feature: MA Experiment 20000573 PARAMETER Experiment Name: At_100uM_ABA_Mutants__P Parameter: Tissue Value: Whole Plant
  misc_feature: MA Experiment 20000573 PARAMETER Experiment Name: At_100uM_ABA_Mutants__P Parameter: Treatment Value: None
  misc_feature: MA Experiment ID: 20000574 Result: Down-regulated in Transcription
  misc_feature: MA Experiment 20000574 PARAMETER Experiment Name: At_100uM_ABA_Mutants__P Parameter: Organism Value: A. thaliana
  misc_feature: MA Experiment 20000574 PARAMETER Experiment Name: At_100uM_ABA_Mutants__P Parameter: Plant Line Value: CS23 vs. Ler wt
  misc_feature: MA Experiment 20000574 PARAMETER Experiment Name: At_100uM_ABA_Mutants__P Parameter: Timepoint (hr) Value: N/A
  misc_feature: MA Experiment 20000574 PARAMETER Experiment Name: At_100uM_ABA_Mutants__P Parameter: Tissue Value: Whole Plant
  misc_feature: MA Experiment 20000574 PARAMETER Experiment Name: At_100uM_ABA_Mutants__P Parameter: Treatment Value: None
  misc_feature: MA Experiment ID: 20000794 Result: Up-regulated in Transcription
  misc_feature: MA Experiment 20000794 PARAMETER Experiment Name: At_Petals_P Parameter: Age (day) Value: 23-25 days
  misc_feature: MA Experiment 20000794 PARAMETER Experiment Name: At_Petals_P Parameter: Plant Line Value: WS
  misc_feature: MA Experiment 20000794 PARAMETER Experiment Name: At_Petals_P Parameter: Tissue Value: Petals vs. Whole plant
  misc_feature: MA Experiment ID: 20001451 Result: Down-regulated in Transcription
  misc_feature: MA Experiment 20001451 PARAMETER Experiment Name: At_Far-red-induction_P Parameter: Age (day) Value: 7
  misc_feature: MA Experiment 20001451 PARAMETER Experiment Name: At_Far-red-induction_P Parameter: Light Value: Far-red vs. White
  misc_feature: MA Experiment 20001451 PARAMETER Experiment Name: At_Far-red-induction_P Parameter: Organism Value: A. thaliana
  misc_feature: MA Experiment 20001451 PARAMETER Experiment Name: At_Far-red-induction_P Parameter: Plant Line Value: Columbia
  misc_feature: MA Experiment 20001451 PARAMETER Experiment Name: At_Far-red-induction_P Parameter: Timepoint (hr) Value: 24
  misc_feature: MA Experiment 20001451 PARAMETER Experiment Name: At_Far-red-induction_P Parameter: Tissue Value: Whole Plant
  misc_feature: MA Experiment ID: 20001557 Result: Down-regulated in Transcription
  misc_feature: MA Experiment 20001557 PARAMETER Experiment Name: At_Drought_Soil_Dry_P Parameter: Age (day) Value: 27
  misc_feature: MA Experiment 20001557 PARAMETER Experiment Name: At_Drought_Soil_Dry_P Parameter: Organism Value: A. thaliana
  misc_feature: MA Experiment 20001557 PARAMETER Experiment Name: At_Drought_Soil_Dry_P Parameter: Plant Line Value: WS
  misc_feature: MA Experiment 20001557 PARAMETER Experiment Name: At_Drought_Soil_Dry_P Parameter: Post Timepoint (hr) Value: 3
  misc_feature: MA Experiment 20001557 PARAMETER Experiment Name: At_Drought_Soil_Dry_P Parameter: Post-Treatment Value: Re-Water vs. No Drought
  misc_feature: MA Experiment 20001557 PARAMETER Experiment Name: At_Drought_Soil_Dry_P Parameter: Timepoint (day) Value: 13
  misc_feature: MA Experiment 20001557 PARAMETER Experiment Name: At_Drought_Soil_Dry_P Parameter: Treatment Value: Drought vs. No Drought
  misc_feature: MA Experiment ID: 20001558 Result: Down-regulated in Transcription
  misc_feature: MA Experiment 20001558 PARAMETER Experiment Name: At_Drought_Soil_Dry_P Parameter: Age (day) Value: 27
  misc_feature: MA Experiment 20001558 PARAMETER Experiment Name: At_Drought_Soil_Dry_P Parameter: Organism Value: A. thaliana
  misc_feature: MA Experiment 20001558 PARAMETER Experiment Name: At_Drought_Soil_Dry_P Parameter: Plant Line Value: WS
  misc_feature: MA Experiment 20001558 PARAMETER Experiment Name: At_Drought_Soil_Dry_P Parameter: Post Timepoint (hr) Value: 6
  misc_feature: MA Experiment 20001558 PARAMETER Experiment Name: At_Drought_Soil_Dry_P Parameter: Post-Treatment Value: Re-Water vs. No Drought
  misc_feature: MA Experiment 20001558 PARAMETER Experiment Name: At_Drought_Soil_Dry_P Parameter: Timepoint (day) Value: 13
  misc_feature: MA Experiment 20001558 PARAMETER Experiment Name: At_Drought_Soil_Dry_P Parameter: Treatment Value: Drought vs. No Drought
  misc_feature: MA Experiment ID: 20001560 Result: Down-regulated in Transcription
  misc_feature: MA Experiment 20001560 PARAMETER Experiment Name: At_Drought_Soil_Dry_P Parameter: Age (day) Value: 28
  misc_feature: MA Experiment 20001560 PARAMETER Experiment Name: At_Drought_Soil_Dry_P Parameter: Organism Value: A. thaliana
  misc_feature: MA Experiment 20001560 PARAMETER Experiment Name: At_Drought_Soil_Dry_P Parameter: Plant Line Value: WS
  misc_feature: MA Experiment 20001560 PARAMETER Experiment Name: At_Drought_Soil_Dry_P Parameter: Post Timepoint (hr) Value: None
  misc_feature: MA Experiment 20001560 PARAMETER Experiment Name: At_Drought_Soil_Dry_P Parameter: Post-Treatment Value: None
  misc_feature: MA Experiment 20001560 PARAMETER Experiment Name: At_Drought_Soil_Dry_P Parameter: Timepoint (day) Value: 14
  misc_feature: MA Experiment 20001560 PARAMETER Experiment Name: At_Drought_Soil_Dry_P Parameter: Treatment Value: Drought vs. No Drought
  misc_feature: MA Experiment ID: 20001757 Result: Up-regulated in Transcription
  misc_feature: MA Experiment 20001757 PARAMETER Experiment Name: At_50mM_NH4NO3_L-to-H_P Parameter: Timepoint (hr) Value: 6
  misc_feature: MA Experiment 20001757 PARAMETER Experiment Name: At_50mM_NH4NO3_L-to-H_P Parameter: Tissue Value: Leaf
  misc_feature: MA Experiment 20001757 PARAMETER Experiment Name: At_50mM_NH4NO3_L-to-H_P Parameter: Treatment Value: 50mM NH4NO3 vs 100mM Mannitol
  misc_feature: MA Experiment ID: 20001904 Result: Down-regulated in Transcription
  misc_feature: MA Experiment 20001904 PARAMETER Experiment Name: At_Drought_Reproduction_P Parameter: Age (day) Value: 37
  misc_feature: MA Experiment 20001904 PARAMETER Experiment Name: At_Drought_Reproduction_P Parameter: Organism Value: A. thaliana
  misc_feature: MA Experiment 20001904 PARAMETER Experiment Name: At_Drought_Reproduction_P Parameter: Plant Line Value: WS
  misc_feature: MA Experiment 20001904 PARAMETER Experiment Name: At_Drought_Reproduction_P Parameter: Timepoint (day) Value: 7
  misc_feature: MA Experiment 20001904 PARAMETER Experiment Name: At_Drought_Reproduction_P Parameter: Tissue Value: Rosettes
  misc_feature: MA Experiment 20001904 PARAMETER Experiment Name: At_Drought_Reproduction_P Parameter: Treatment Value: Drought vs. No Drought
  misc_feature: MA Experiment ID: 20001905 Result: Down-regulated in Transcription
  misc_feature: MA Experiment 20001905 PARAMETER Experiment Name: At_Drought_Reproduction_P Parameter: Age (day) Value: 40
  misc_feature: MA Experiment 20001905 PARAMETER Experiment Name: At_Drought_Reproduction_P Parameter: Organism Value: A. thaliana
  misc_feature: MA Experiment 20001905 PARAMETER Experiment Name: At_Drought_Reproduction_P Parameter: Plant Line Value: WS
  misc_feature: MA Experiment 20001905 PARAMETER Experiment Name: At_Drought_Reproduction_P Parameter: Timepoint (day) Value: 10
  misc_feature: MA Experiment 20001905 PARAMETER Experiment Name: At_Drought_Reproduction_P Parameter: Tissue Value: Rosettes
  misc_feature: MA Experiment 20001905 PARAMETER Experiment Name: At_Drought_Reproduction_P Parameter: Treatment Value: Drought vs. No Drought
  misc_feature: MA Experiment ID: 20001906 Result: Down-regulated in Transcription
  misc_feature: MA Experiment 20001906 PARAMETER Experiment Name: At_Drought_Reproduction_P Parameter: Age (day) Value: 35
  misc_feature: MA Experiment 20001906 PARAMETER Experiment Name: At_Drought_Reproduction_P Parameter: Organism Value: A. thaliana
  misc_feature: MA Experiment 20001906 PARAMETER Experiment Name: At_Drought_Reproduction_P Parameter: Plant Line Value: WS
  misc_feature: MA Experiment 20001906 PARAMETER Experiment Name: At_Drought_Reproduction_P Parameter: Timepoint (day) Value: 5
  misc_feature: MA Experiment 20001906 PARAMETER Experiment Name: At_Drought_Reproduction_P Parameter: Tissue Value: Siliques
  misc_feature: MA Experiment 20001906 PARAMETER Experiment Name: At_Drought_Reproduction_P Parameter: Treatment Value: Drought vs. No Drought
  misc_feature: MA Experiment ID: 20001908 Result: Down-regulated in Transcription
  misc_feature: MA Experiment 20001908 PARAMETER Experiment Name: At_Drought_Reproduction_P Parameter: Age (day) Value: 40
  misc_feature: MA Experiment 20001908 PARAMETER Experiment Name: At_Drought_Reproduction_P Parameter: Organism Value: A. thaliana
  misc_feature: MA Experiment 20001908 PARAMETER Experiment Name: At_Drought_Reproduction_P Parameter: Plant Line Value: WS
  misc_feature: MA Experiment 20001908 PARAMETER Experiment Name: At_Drought_Reproduction_P Parameter: Timepoint (day) Value: 10
  misc_feature: MA Experiment 20001908 PARAMETER Experiment Name: At_Drought_Reproduction_P Parameter: Tissue Value: Siliques
  misc_feature: MA Experiment 20001908 PARAMETER Experiment Name: At_Drought_Reproduction_P Parameter: Treatment Value: Drought vs. No Drought

SEQ ID NO: 34712 - protein, 541 aa, Arabidopsis thaliana; identical to SEQ ID NO: 23715
  peptide (1)..(541): Ceres Seq. ID no. 13591811
  misc_feature (1)..(541): Homolog of NCBI NO: 11034736 NR Description: myrosinase [Raphanus sativus]
  misc_feature (2)..(538): Homolog of NCBI NO: 27261134 NR Description: carboxypeptidase Y/myrosinase fusion protein
  misc_feature (1)..(538): Homolog of NCBI NO: 13605680 NR Description: AT5g25980/T1N24_18 [Arabidopsis thaliana]
  misc_feature (1)..(541): Homolog of NCBI NO: 127733 NR Description: Myrosinase precursor (Sinigrinase)
  misc_feature (1)..(538): Homolog of NCBI NO: 1362007 NR Description: thioglucosidase (EC 3.2.1.147) 2 - Arabidopsis
  misc_feature (1)..(538): Homolog of NCBI NO: 18420974 NR Description: glycosyl hydrolase family 1 [Arabidopsis
  misc_feature (1)..(456): Homolog of NCBI NO: 30690089 NR Description: glycosyl hydrolase family 1, myrosinase precursor
  misc_feature (1)..(541): Homolog of NCBI NO: 15809938 NR Description: AT5g26000/T1N24_7 [Arabidopsis thaliana]
  misc_feature (1)..(541): Homolog of NCBI NO: 16648811 NR Description: AT5g26000/T1N24_7 [Arabidopsis thaliana]
  misc_feature (1)..(541): Homolog of NCBI NO: 30690085 NR Description: glycosyl hydrolase family 1, myrosinase precursor
  misc_feature (1)..(541): Homolog of NCBI NO: 11034736 NR Description: myrosinase [Raphanus sativus]
  misc_feature (2)..(538): Homolog of NCBI NO: 27261134 NR Description: carboxypeptidase Y/myrosinase fusion protein
  misc_feature (1)..(538): Homolog of NCBI NO: 13605680 NR Description: AT5g25980/T1N24_18 [Arabidopsis thaliana]
  misc_feature (1)..(541): Homolog of NCBI NO: 127733 NR Description: Myrosinase precursor (Sinigrinase)
  misc_feature (1)..(538): Homolog of NCBI NO: 1362007 NR Description: thioglucosidase (EC 3.2.1.147) 2 - Arabidopsis
  misc_feature (1)..(538): Homolog of NCBI NO: 18420974 NR Description: glycosyl hydrolase family 1 [Arabidopsis
  misc_feature (1)..(456): Homolog of NCBI NO: 30690089 NR Description: glycosyl hydrolase family 1, myrosinase precursor
  misc_feature (1)..(541): Homolog of NCBI NO: 15809938 NR Description: AT5g26000/T1N24_7 [Arabidopsis thaliana]
  misc_feature (1)..(541): Homolog of NCBI NO: 16648811 NR Description: AT5g26000/T1N24_7 [Arabidopsis thaliana]
  misc_feature (1)..(541): Homolog of NCBI NO: 30690085 NR Description: glycosyl hydrolase family 1, myrosinase precursor
  misc_feature (1)..(541): Homolog of NCBI NO: 30690085 NR Description: glycosyl hydrolase family 1, myrosinase precursor
  misc_feature (1)..(541): Homolog of NCBI NO: 15809938 NR Description: AT5g26000/T1N24_7 [Arabidopsis thaliana]
  misc_feature (1)..(541): Homolog of NCBI NO: 16648811 NR Description: AT5g26000/T1N24_7 [Arabidopsis thaliana]
  misc_feature (1)..(541): Homolog of NCBI NO: 11034736 NR Description: myrosinase [Raphanus sativus]
  misc_feature (2)..(538): Homolog of NCBI NO: 27261134 NR Description: carboxypeptidase Y/myrosinase fusion protein
  misc_feature (1)..(538): Homolog of NCBI NO: 13605680 NR Description: AT5g25980/T1N24_18 [Arabidopsis thaliana]
  misc_feature (1)..(541): Homolog of NCBI NO: 127733 NR Description: Myrosinase precursor (Sinigrinase)
  misc_feature (1)..(538): Homolog of NCBI NO: 1362007 NR Description: thioglucosidase (EC 3.2.1.147) 2 - Arabidopsis
  misc_feature (1)..(538): Homolog of NCBI NO: 18420974 NR Description: glycosyl hydrolase family 1 [Arabidopsis
  misc_feature (1)..(456): Homolog of NCBI NO: 30690089 NR Description: glycosyl hydrolase family 1, myrosinase precursor

SEQ ID NO: 34713 - protein, 537 aa, Arabidopsis thaliana; identical to SEQ ID NO: 23716
  peptide (1)..(537): Ceres Seq. ID no. 13591812
  misc_feature (1)..(537): Homolog of NCBI NO: 11034736 NR Description: myrosinase [Raphanus sativus]
  misc_feature (1)..(534): Homolog of NCBI NO: 27261134 NR Description: carboxypeptidase Y/myrosinase fusion protein
  misc_feature (1)..(534): Homolog of NCBI NO: 13605680 NR Description: AT5g25980/T1N24_18 [Arabidopsis thaliana]
  misc_feature (1)..(537): Homolog of NCBI NO: 127733 NR Description: Myrosinase precursor (Sinigrinase)
  misc_feature (1)..(534): Homolog of NCBI NO: 1362007 NR Description: thioglucosidase (EC 3.2.1.147) 2 - Arabidopsis
  misc_feature (1)..(534): Homolog of NCBI NO: 18420974 NR Description: glycosyl hydrolase family 1 [Arabidopsis
  misc_feature (1)..(452): Homolog of NCBI NO: 30690089 NR Description: glycosyl hydrolase family 1, myrosinase precursor
  misc_feature (1)..(537): Homolog of NCBI NO: 15809938 NR Description: AT5g26000/T1N24_7 [Arabidopsis thaliana]
  misc_feature (1)..(537): Homolog of NCBI NO: 16648811 NR Description: AT5g26000/T1N24_7 [Arabidopsis thaliana]
  misc_feature (1)..(537): Homolog of NCBI NO: 30690085 NR Description: glycosyl hydrolase family 1, myrosinase precursor
  misc_feature (1)..(537): Homolog of NCBI NO: 11034736 NR Description: myrosinase [Raphanus sativus]
  misc_feature (1)..(534): Homolog of NCBI NO: 27261134 NR Description: carboxypeptidase Y/myrosinase fusion protein
  misc_feature (1)..(534): Homolog of NCBI NO: 13605680 NR Description: AT5g25980/T1N24_18 [Arabidopsis thaliana]
  misc_feature (1)..(537): Homolog of NCBI NO: 127733 NR Description: Myrosinase precursor (Sinigrinase)
  misc_feature (1)..(534): Homolog of NCBI NO: 1362007 NR Description: thioglucosidase (EC 3.2.1.147) 2 - Arabidopsis
  misc_feature (1)..(534): Homolog of NCBI NO: 18420974 NR Description: glycosyl hydrolase family 1 [Arabidopsis
  misc_feature (1)..(452): Homolog of NCBI NO: 30690089 NR Description: glycosyl hydrolase family 1, myrosinase precursor
  misc_feature (1)..(537): Homolog of NCBI NO: 15809938 NR Description: AT5g26000/T1N24_7 [Arabidopsis thaliana]
  misc_feature (1)..(537): Homolog of NCBI NO: 16648811 NR Description: AT5g26000/T1N24_7 [Arabidopsis thaliana]
  misc_feature (1)..(537): Homolog of NCBI NO: 30690085 NR Description: glycosyl hydrolase family 1, myrosinase precursor
  misc_feature (1)..(537): Homolog of NCBI NO: 11034736 NR Description: myrosinase [Raphanus sativus]
  misc_feature (1)..(534): Homolog of NCBI NO: 27261134 NR Description: carboxypeptidase Y/myrosinase fusion protein
  misc_feature (1)..(534): Homolog of NCBI NO: 13605680 NR Description: AT5g25980/T1N24_18 [Arabidopsis thaliana]
  misc_feature (1)..(537): Homolog of NCBI NO: 127733 NR Description: Myrosinase precursor (Sinigrinase)
  misc_feature (1)..(534): Homolog of NCBI NO: 1362007 NR Description: thioglucosidase (EC 3.2.1.147) 2 - Arabidopsis
  misc_feature (1)..(534): Homolog of NCBI NO: 18420974 NR Description: glycosyl hydrolase family 1 [Arabidopsis
  misc_feature (1)..(452): Homolog of NCBI NO: 30690089 NR Description: glycosyl hydrolase family 1, myrosinase precursor
  misc_feature (1)..(537): Homolog of NCBI NO: 15809938 NR Description: AT5g26000/T1N24_7 [Arabidopsis thaliana]
  misc_feature (1)..(537): Homolog of NCBI NO: 16648811 NR Description: AT5g26000/T1N24_7 [Arabidopsis thaliana]
  misc_feature (1)..(537): Homolog of NCBI NO: 30690085 NR Description: glycosyl hydrolase family 1, myrosinase precursor

SEQ ID NO: 34714 - protein, 438 aa, Arabidopsis thaliana; identical to SEQ ID NO: 23717
  peptide (1)..(438): Ceres Seq. ID no. 13591813
  misc_feature (1)..(438): Homolog of NCBI NO: 11034736 NR Description: myrosinase [Raphanus sativus]
  misc_feature (1)..(435): Homolog of NCBI NO: 27261134 NR Description: carboxypeptidase Y/myrosinase fusion protein
  misc_feature (1)..(435): Homolog of NCBI NO: 13605680 NR Description: AT5g25980/T1N24_18 [Arabidopsis thaliana]
  misc_feature (1)..(438): Homolog of NCBI NO: 127733 NR Description: Myrosinase precursor (Sinigrinase)
  misc_feature (1)..(435): Homolog of NCBI NO: 1362007 NR Description: thioglucosidase (EC 3.2.1.147) 2 - Arabidopsis
  misc_feature (1)..(435): Homolog of NCBI NO: 18420974 NR Description: glycosyl hydrolase family 1 [Arabidopsis
  misc_feature (1)..(353): Homolog of NCBI NO: 30690089 NR Description: glycosyl hydrolase family 1, myrosinase precursor
  misc_feature (1)..(438): Homolog of NCBI NO: 15809938 NR Description: AT5g26000/T1N24_7 [Arabidopsis thaliana]
  misc_feature (1)..(438): Homolog of NCBI NO: 16648811 NR Description: AT5g26000/T1N24_7 [Arabidopsis thaliana]
  misc_feature (1)..(438): Homolog of NCBI NO: 30690085 NR Description: glycosyl hydrolase family 1, myrosinase precursor
  misc_feature (1)..(438): Homolog of NCBI NO: 11034736 NR Description: myrosinase [Raphanus sativus]
  misc_feature (1)..(435): Homolog of NCBI NO: 27261134 NR Description: carboxypeptidase Y/myrosinase fusion protein
  misc_feature (1)..(435): Homolog of NCBI NO: 13605680 NR Description: AT5g25980/T1N24_18 [Arabidopsis thaliana]
  misc_feature (1)..(438): Homolog of NCBI NO: 127733 NR Description: Myrosinase precursor (Sinigrinase)
  misc_feature (1)..(435): Homolog of NCBI NO: 1362007 NR Description: thioglucosidase (EC 3.2.1.147) 2 - Arabidopsis
  misc_feature (1)..(435): Homolog of NCBI NO: 18420974 NR Description: glycosyl hydrolase family 1 [Arabidopsis
  misc_feature (1)..(353): Homolog of NCBI NO: 30690089 NR Description: glycosyl hydrolase family 1, myrosinase precursor
  misc_feature (1)..(438): Homolog of NCBI NO: 15809938 NR Description: AT5g26000/T1N24_7 [Arabidopsis thaliana]
  misc_feature (1)..(438): Homolog of NCBI NO: 16648811 NR Description: AT5g26000/T1N24_7 [Arabidopsis thaliana]
  misc_feature (1)..(438): Homolog of NCBI NO: 30690085 NR Description: glycosyl hydrolase family 1, myrosinase precursor
  misc_feature (1)..(438): Homolog of NCBI NO: 11034736 NR Description: myrosinase [Raphanus sativus]
  misc_feature (1)..(435): Homolog of NCBI NO: 27261134 NR Description: carboxypeptidase Y/myrosinase fusion protein
  misc_feature (1)..(435): Homolog of NCBI NO: 13605680 NR Description: AT5g25980/T1N24_18 [Arabidopsis thaliana]
  misc_feature (1)..(438): Homolog of NCBI NO: 127733 NR Description: Myrosinase precursor (Sinigrinase)
  misc_feature (1)..(435): Homolog of NCBI NO: 1362007 NR Description: thioglucosidase (EC 3.2.1.147) 2 - Arabidopsis
  misc_feature (1)..(435): Homolog of NCBI NO: 18420974 NR Description: glycosyl hydrolase family 1 [Arabidopsis
  misc_feature (1)..(353): Homolog of NCBI NO: 30690089 NR Description: glycosyl hydrolase family 1, myrosinase precursor
  misc_feature (1)..(438): Homolog of NCBI NO: 15809938 NR Description: AT5g26000/T1N24_7 [Arabidopsis thaliana]
  misc_feature (1)..(438): Homolog of NCBI NO: 16648811 NR Description: AT5g26000/T1N24_7 [Arabidopsis thaliana]
  misc_feature (1)..(438): Homolog of NCBI NO: 30690085 NR Description: glycosyl hydrolase family 1, myrosinase precursor

SEQ ID NO: 34715 - DNA, 762 bp, Arabidopsis thaliana
  misc_feature (1)..(762): Ceres Seq. ID no. 13593421
  misc_feature: MA Experiment ID: 108435 Result: Down-regulated in Transcription
  misc_feature: MA Experiment 108435 PARAMETER Experiment Name: At_stm_Mutants_cDNA_P Parameter: Plant Line Value: wt Landsburg vs stm
  misc_feature: MA Experiment 108435 PARAMETER Experiment Name: At_stm_Mutants_cDNA_P Parameter: Tissue Value: Shoot Apical Meristem Region
  misc_feature: MA Experiment ID: 108461 Result: Up-regulated in Transcription
  misc_feature: MA Experiment 108461 PARAMETER Experiment Name: At_Germinating_Seeds_cDNA_P Parameter: Age (day) Value: 1 vs. 0
  misc_feature: MA Experiment 108461 PARAMETER Experiment Name: At_Germinating_Seeds_cDNA_P Parameter: Tissue Value: Germinating Seeds
  misc_feature: MA Experiment ID: 108462 Result: Up-regulated in Transcription
  misc_feature: MA Experiment 108462 PARAMETER Experiment Name: At_Germinating_Seeds_cDNA_P Parameter: Age (day) Value: 2 vs. 0
  misc_feature: MA Experiment 108462 PARAMETER Experiment Name: At_Germinating_Seeds_cDNA_P Parameter: Tissue Value: Germinating Seeds
  misc_feature: MA Experiment ID: 108464 Result: Up-regulated in Transcription
  misc_feature: MA Experiment 108464 PARAMETER Experiment Name: At_Germinating_Seeds_cDNA_P Parameter: Age (day) Value: 4 vs. 0
  misc_feature: MA Experiment 108464 PARAMETER Experiment Name: At_Germinating_Seeds_cDNA_P Parameter: Tissue Value: Germinating Seeds
  misc_feature: MA Experiment ID: 108488 Result: Down-regulated in Transcription
  misc_feature: MA Experiment ID: 108573 Result: Up-regulated in Transcription
  misc_feature: MA Experiment 108573 PARAMETER Experiment Name: At_Drought_cDNA_P Parameter: Timepoint (hr) Value: 6
  misc_feature: MA Experiment 108573 PARAMETER Experiment Name: At_Drought_cDNA_P Parameter: Tissue Value: Aerial
  misc_feature: MA Experiment 108573 PARAMETER Experiment Name: At_Drought_cDNA_P Parameter: Treatment Value: Drought vs. No Drought
  misc_feature: MA Experiment ID: 108577 Result: Down-regulated in Transcription
  misc_feature: MA Experiment 108577 PARAMETER Experiment Name: At_42deg_Heat_cDNA_P Parameter: Temperature (deg C) Value: 42 vs. 22
  misc_feature: MA Experiment 108577 PARAMETER Experiment Name: At_42deg_Heat_cDNA_P Parameter: Timepoint (hr) Value: 6
  misc_feature: MA Experiment 108577 PARAMETER Experiment Name: At_42deg_Heat_cDNA_P Parameter: Tissue Value: Aerial
  misc_feature: MA Experiment ID: 108608 Result: Up-regulated in Transcription
  misc_feature: MA Experiment 108608 PARAMETER Experiment Name: At_100uM_ABA_cDNA_P Parameter: Timepoint (hr) Value: 1
  misc_feature: MA Experiment 108608 PARAMETER Experiment Name: At_100uM_ABA_cDNA_P Parameter: Tissue Value: Aerial
  misc_feature: MA Experiment 108608 PARAMETER Experiment Name: At_100uM_ABA_cDNA_P Parameter: Treatment Value: 100uM ABA vs. No Treatment
  misc_feature: MA Experiment ID: 108609 Result: Up-regulated in Transcription
  misc_feature: MA Experiment 108609 PARAMETER Experiment Name: At_100uM_ABA_cDNA_P Parameter: Timepoint (hr) Value: 24
  misc_feature: MA Experiment 108609 PARAMETER Experiment Name: At_100uM_ABA_cDNA_P Parameter: Tissue Value: Aerial
  misc_feature: MA Experiment 108609 PARAMETER Experiment Name: At_100uM_ABA_cDNA_P Parameter: Treatment Value: 100uM ABA vs. No Treatment
  misc_feature: MA Experiment ID: 20000069 Result: Up-regulated in Transcription
  misc_feature: MA Experiment 20000069 PARAMETER Experiment Name: At_100uM_ABA_Mutants_cDNA_P Parameter: Plant Line Value: CS23
  misc_feature: MA Experiment 20000069 PARAMETER Experiment Name: At_100uM_ABA_Mutants_cDNA_P Parameter: Timepoint (hr) Value: 6
  misc_feature: MA Experiment 20000069 PARAMETER Experiment Name: At_100uM_ABA_Mutants_cDNA_P Parameter: Tissue Value: Aerial
  misc_feature: MA Experiment 20000069 PARAMETER Experiment Name: At_100uM_ABA_Mutants_cDNA_P Parameter: Treatment Value: 100uM ABA vs. No Treatment
  misc_feature: MA Experiment ID: 20000070 Result: Up-regulated in Transcription
  misc_feature: MA Experiment 20000070 PARAMETER Experiment Name: At_100uM_ABA_Mutants_cDNA_P Parameter: Plant Line Value: CS24
  misc_feature: MA Experiment 20000070 PARAMETER Experiment Name: At_100uM_ABA_Mutants_cDNA_P Parameter: Timepoint (hr) Value: 6
  misc_feature: MA Experiment 20000070 PARAMETER Experiment Name: At_100uM_ABA_Mutants_cDNA_P Parameter: Tissue Value: Aerial
  misc_feature: MA Experiment 20000070 PARAMETER Experiment Name: At_100uM_ABA_Mutants_cDNA_P Parameter: Treatment Value: 100uM ABA vs. No Treatment
  misc_feature: MA Experiment ID: 20000071 Result: Up-regulated in Transcription
  misc_feature: MA Experiment 20000071 PARAMETER Experiment Name: At_100uM_ABA_Mutants_cDNA_P Parameter: Plant Line Value: CS8104
  misc_feature: MA Experiment 20000071 PARAMETER Experiment Name: At_100uM_ABA_Mutants_cDNA_P Parameter: Timepoint (hr) Value: 6
  misc_feature: MA Experiment 20000071 PARAMETER Experiment Name: At_100uM_ABA_Mutants_cDNA_P Parameter: Tissue Value: Aerial
  misc_feature: MA Experiment 20000071 PARAMETER Experiment Name: At_100uM_ABA_Mutants_cDNA_P Parameter: Treatment Value: 100uM ABA vs. No Treatment
  misc_feature: MA Experiment ID: 20000072 Result: Up-regulated in Transcription
  misc_feature: MA Experiment 20000072 PARAMETER Experiment Name: At_100uM_ABA_Mutants_cDNA_P Parameter: Plant Line Value: CS8105
  misc_feature: MA Experiment 20000072 PARAMETER Experiment Name: At_100uM_ABA_Mutants_cDNA_P Parameter: Timepoint (hr) Value: 6
  misc_feature: MA Experiment 20000072 PARAMETER Experiment Name: At_100uM_ABA_Mutants_cDNA_P Parameter: Tissue Value: Aerial
  misc_feature: MA Experiment 20000072 PARAMETER Experiment Name: At_100uM_ABA_Mutants_cDNA_P Parameter: Treatment Value: 100uM ABA vs. No Treatment
  misc_feature: MA Experiment ID: 20000086 Result: Up-regulated in Transcription
  misc_feature: MA Experiment 20000086 PARAMETER Experiment Name: At_100uM_ABA_Mutants_cDNA_P Parameter: Plant Line Value: CS22
  misc_feature: MA Experiment 20000086 PARAMETER Experiment Name: At_100uM_ABA_Mutants_cDNA_P Parameter: Timepoint (hr) Value: 6
  misc_feature: MA Experiment 20000086 PARAMETER Experiment Name: At_100uM_ABA_Mutants_cDNA_P Parameter: Tissue Value: Aerial
  misc_feature: MA Experiment 20000086 PARAMETER Experiment Name: At_100uM_ABA_Mutants_cDNA_P Parameter: Treatment Value: 100uM ABA vs. No Treatment
  misc_feature: MA Experiment ID: 20000087 Result: Up-regulated in Transcription
  misc_feature: MA Experiment 20000087 PARAMETER Experiment Name: At_100uM_ABA_Mutants_cDNA_P Parameter: Plant Line Value: WS
  misc_feature: MA Experiment 20000087 PARAMETER Experiment Name: At_100uM_ABA_Mutants_cDNA_P Parameter: Timepoint (hr) Value: 6
  misc_feature: MA Experiment 20000087 PARAMETER Experiment Name: At_100uM_ABA_Mutants_cDNA_P Parameter: Tissue Value: Aerial
  misc_feature: MA Experiment 20000087 PARAMETER Experiment Name: At_100uM_ABA_Mutants_cDNA_P Parameter: Treatment Value: 100uM ABA vs. No Treatment
  misc_feature: MA Experiment ID: 20000088 Result: Up-regulated in Transcription
  misc_feature: MA Experiment 20000088 PARAMETER Experiment Name: At_100uM_ABA_Mutants_cDNA_P Parameter: Plant Line Value: Landsberg
  misc_feature: MA Experiment 20000088 PARAMETER Experiment Name: At_100uM_ABA_Mutants_cDNA_P Parameter: Timepoint (hr) Value: 6
  misc_feature: MA Experiment 20000088 PARAMETER Experiment Name: At_100uM_ABA_Mutants_cDNA_P Parameter: Tissue Value: Aerial
  misc_feature: MA Experiment 20000088 PARAMETER Experiment Name: At_100uM_ABA_Mutants_cDNA_P Parameter: Treatment Value: 100uM ABA vs. No Treatment
  misc_feature: MA Experiment ID: 20000089 Result: Up-regulated in Transcription
  misc_feature: MA Experiment ID: 20000090 Result: Up-regulated in Transcription
  misc_feature: MA Experiment ID: 20000113 Result: Up-regulated in Transcription
  misc_feature: MA Experiment 20000113 PARAMETER Experiment Name: At_42deg_Heat_cDNA_P Parameter: Temperature (deg C) Value: 42 vs. 22
  misc_feature: MA Experiment 20000113 PARAMETER Experiment Name: At_42deg_Heat_cDNA_P Parameter: Timepoint (hr) Value: 8
  misc_feature: MA Experiment 20000113 PARAMETER Experiment Name: At_42deg_Heat_cDNA_P Parameter: Tissue Value: Aerial
  misc_feature: MA Experiment ID: 20000117 Result: Up-regulated in Transcription
  misc_feature: MA Experiment 20000117 PARAMETER Experiment Name: At_100uM_ABA_Mutants_cDNA_P Parameter: Plant Line Value: Columbia
  misc_feature: MA Experiment 20000117 PARAMETER Experiment Name: At_100uM_ABA_Mutants_cDNA_P Parameter: Timepoint (hr) Value: 6
  misc_feature: MA Experiment 20000117 PARAMETER Experiment Name: At_100uM_ABA_Mutants_cDNA_P Parameter: Tissue Value: Aerial
  misc_feature: MA Experiment 20000117 PARAMETER Experiment Name: At_100uM_ABA_Mutants_cDNA_P Parameter: Treatment Value: 100uM ABA vs. No Treatment
  misc_feature: MA Experiment ID: 20000166 Result: Up-regulated in Transcription
  misc_feature: MA Experiment 20000166 PARAMETER Experiment Name: At_100uM_ABA_P Parameter: Age (day) Value: 14
  misc_feature: MA Experiment 20000166 PARAMETER Experiment Name: At_100uM_ABA_P Parameter: Organism Value: A. thaliana
  misc_feature: MA Experiment 20000166 PARAMETER Experiment Name: At_100uM_ABA_P Parameter: Plant Line Value: WS
  misc_feature: MA Experiment 20000166 PARAMETER Experiment Name: At_100uM_ABA_P Parameter: Timepoint (hr) Value: 1
  misc_feature: MA Experiment 20000166 PARAMETER Experiment Name: At_100uM_ABA_P Parameter: Tissue Value: Aerial
  misc_feature: MA Experiment 20000166 PARAMETER Experiment Name: At_100uM_ABA_P Parameter: Treatment Value: 100uM ABA vs. No Treatment
  misc_feature: MA Experiment ID: 20000180 Result: Up-regulated in Transcription
  misc_feature: MA Experiment 20000180 PARAMETER Experiment Name: At_Germinating_Seeds_P Parameter: Age (hr) Value: 24 vs. 0
  misc_feature: MA Experiment 20000180 PARAMETER Experiment Name: At_Germinating_Seeds_P Parameter: Tissue Value: Germinating Seeds
  misc_feature: MA Experiment ID: 20000184 Result: Down-regulated in Transcription
  misc_feature: MA Experiment 20000184 PARAMETER Experiment Name: At_Shoots__P Parameter: Age (day) Value: 7
  misc_feature: MA Experiment 20000184 PARAMETER Experiment Name: At_Shoots__P Parameter: Tissue Value: Shoots vs. Whole Plant
  misc_feature: MA Experiment ID: 20000224 Result: Up-regulated in Transcription
  misc_feature: MA Experiment ID: 20000227 Result: Up-regulated in Transcription
  misc_feature: MA Experiment 20000227 PARAMETER Experiment Name: At_Root-Tips-vs-Tops_P Parameter: Tissue Value: Root Tips vs. Root Tops
  misc_feature: MA Experiment ID: 20000437 Result: Up-regulated in Transcription
  misc_feature: MA Experiment 20000437 PARAMETER Experiment Name: At_Drought_P Parameter: Age (day) Value: 8
  misc_feature: MA Experiment 20000437 PARAMETER Experiment Name: At_Drought_P Parameter: Organism Value: A. thaliana
  misc_feature: MA Experiment 20000437 PARAMETER Experiment Name: At_Drought_P Parameter: Plant Line Value: WS
  misc_feature: MA Experiment 20000437 PARAMETER Experiment Name: At_Drought_P Parameter: Timepoint (hr) Value: 24
  misc_feature: MA Experiment 20000437 PARAMETER Experiment Name: At_Drought_P Parameter: Tissue Value: Whole Plant
  misc_feature: MA Experiment 20000437 PARAMETER Experiment Name: At_Drought_P Parameter: Treatment Value: Drought vs. No Drought
  misc_feature: MA Experiment ID: 20000453 Result: Up-regulated in Transcription
  misc_feature: MA Experiment 20000453 PARAMETER Experiment Name: At_100uM_ABA_P Parameter: Age (day) Value: 15
  misc_feature: MA Experiment 20000453 PARAMETER Experiment Name: At_100uM_ABA_P Parameter: Organism Value: A. thaliana
  misc_feature: MA Experiment 20000453 PARAMETER Experiment Name: At_100uM_ABA_P Parameter: Plant Line Value: WS
  misc_feature: MA Experiment 20000453 PARAMETER Experiment Name: At_100uM_ABA_P Parameter: Timepoint (hr) Value: 24
  misc_feature: MA Experiment 20000453 PARAMETER Experiment Name: At_100uM_ABA_P Parameter: Tissue Value: Aerial
  misc_feature: MA Experiment 20000453 PARAMETER Experiment Name: At_100uM_ABA_P Parameter: Treatment Value: 100uM ABA vs. No Treatment
  misc_feature: MA Experiment ID: 20000496 Result: Down-regulated in Transcription
  misc_feature: MA Experiment 20000496 PARAMETER Experiment Name: At_Guard_Cells_P Parameter: Harvest Date Value: 7/19/2002
  misc_feature: MA Experiment 20000496 PARAMETER Experiment Name: At_Guard_Cells_P Parameter: Organism Value: Canola
  misc_feature: MA Experiment 20000496 PARAMETER Experiment Name: At_Guard_Cells_P Parameter: Tissue Value: Guard Cells vs. Leaves
  misc_feature: MA Experiment ID: 20001248 Result: Up-regulated in Transcription
  misc_feature: MA Experiment 20001248 PARAMETER Experiment Name: At_Far-red-induction_P Parameter: Age (day) Value: 7
  misc_feature: MA Experiment 20001248 PARAMETER Experiment Name: At_Far-red-induction_P Parameter: Light Value: Far-red vs. White
  misc_feature: MA Experiment 20001248 PARAMETER Experiment Name: At_Far-red-induction_P Parameter: Organism Value: A. thaliana
  misc_feature: MA Experiment 20001248 PARAMETER Experiment Name: At_Far-red-induction_P Parameter: Plant Line Value: Columbia
  misc_feature: MA Experiment 20001248 PARAMETER Experiment Name: At_Far-red-induction_P Parameter: Timepoint (hr) Value: 4
  misc_feature: MA Experiment 20001248 PARAMETER Experiment Name: At_Far-red-induction_P Parameter: Tissue Value: Whole Plant
  misc_feature: MA Experiment ID: 20001451 Result: Up-regulated in Transcription
  misc_feature: MA Experiment 20001451 PARAMETER Experiment Name: At_Far-red-induction_P Parameter: Age (day) Value: 7
  misc_feature: MA Experiment 20001451 PARAMETER Experiment Name: At_Far-red-induction_P Parameter: Light Value: Far-red vs. White
  misc_feature: MA Experiment 20001451 PARAMETER Experiment Name: At_Far-red-induction_P Parameter: Organism Value: A. thaliana
  misc_feature: MA Experiment 20001451 PARAMETER Experiment Name: At_Far-red-induction_P Parameter: Plant Line Value: Columbia
  misc_feature: MA Experiment 20001451 PARAMETER Experiment Name: At_Far-red-induction_P Parameter: Timepoint (hr) Value: 24
  misc_feature: MA Experiment 20001451 PARAMETER Experiment Name: At_Far-red-induction_P Parameter: Tissue Value: Whole Plant
  misc_feature: MA Experiment ID: 20001557 Result: Down-regulated in Transcription
  misc_feature: MA Experiment 20001557 PARAMETER Experiment Name: At_Drought_Soil_Dry_P Parameter: Age (day) Value: 27
  misc_feature: MA Experiment 20001557 PARAMETER Experiment Name: At_Drought_Soil_Dry_P Parameter: Organism Value: A. thaliana
  misc_feature: MA Experiment 20001557 PARAMETER Experiment Name: At_Drought_Soil_Dry_P Parameter: Plant Line Value: WS
  misc_feature: MA Experiment 20001557 PARAMETER Experiment Name: At_Drought_Soil_Dry_P Parameter: Post Timepoint (hr) Value: 3
  misc_feature: MA Experiment 20001557 PARAMETER Experiment Name: At_Drought_Soil_Dry_P Parameter: Post-Treatment Value: Re-Water vs. No Drought
  misc_feature: MA Experiment 20001557 PARAMETER Experiment Name: At_Drought_Soil_Dry_P Parameter: Timepoint (day) Value: 13
  misc_feature: MA Experiment 20001557 PARAMETER Experiment Name: At_Drought_Soil_Dry_P Parameter: Treatment Value: Drought vs. No Drought
  misc_feature: MA Experiment ID: 20001558 Result: Down-regulated in Transcription
  misc_feature: MA Experiment 20001558 PARAMETER Experiment Name: At_Drought_Soil_Dry_P Parameter: Age (day) Value: 27
  misc_feature: MA Experiment 20001558 PARAMETER Experiment Name: At_Drought_Soil_Dry_P Parameter: Organism Value: A. thaliana
  misc_feature: MA Experiment 20001558 PARAMETER Experiment Name: At_Drought_Soil_Dry_P Parameter: Plant Line Value: WS
  misc_feature: MA Experiment 20001558 PARAMETER Experiment Name: At_Drought_Soil_Dry_P Parameter: Post Timepoint (hr) Value: 6
  misc_feature: MA Experiment 20001558 PARAMETER Experiment Name: At_Drought_Soil_Dry_P Parameter: Post-Treatment Value: Re-Water vs. No Drought
  misc_feature: MA Experiment 20001558 PARAMETER Experiment Name: At_Drought_Soil_Dry_P Parameter: Timepoint (day) Value: 13
  misc_feature: MA Experiment 20001558 PARAMETER Experiment Name: At_Drought_Soil_Dry_P Parameter: Treatment Value: Drought vs. No Drought
  misc_feature: MA Experiment ID: 20001911 Result: Up-regulated in Transcription
  misc_feature: MA Experiment 20001911 PARAMETER Experiment Name: At_Drought_Reproduction_P Parameter: Age (day) Value: 40
  misc_feature: MA Experiment 20001911 PARAMETER Experiment Name: At_Drought_Reproduction_P Parameter: Organism Value: A. thaliana
  misc_feature: MA Experiment 20001911 PARAMETER Experiment Name: At_Drought_Reproduction_P Parameter: Plant Line Value: WS
  misc_feature: MA Experiment 20001911 PARAMETER Experiment Name: At_Drought_Reproduction_P Parameter: Timepoint (day) Value: 10
  misc_feature: MA Experiment 20001911 PARAMETER Experiment Name: At_Drought_Reproduction_P Parameter: Tissue Value: Flowers
  misc_feature: MA Experiment 20001911 PARAMETER Experiment Name: At_Drought_Reproduction_P Parameter: Treatment Value: Drought vs. No Drought
ctctcacaagtcaccaccatttctctctagaaaaaatctgaaaaacaaaaccatctcaaagtttcttgagaagaaaaaaagggtcaagaaagatgcctaaagacaggaatatcggaatcgccatggatttctcagagagcagcaagaacgctctgaaatgggcgatcgagaacttagcagacaaaggagacacgatttacatcatccacactctaccactctctggcgatgaatctcgtaactccctctggttcaaatccggttctcctctcataccgttggagagtttagggaaccggagattatggagaaatacggtgtcaaaaccgacatcgcatgtcttgatatgctcgacactggttcgaggcagaaagaggtgcatgtagtgaccaagttatactggggagatgcaagagagaagcttgttgatgctgttaaagatcttaaactcgattctattgtcatgggaagcagaggactcagtgctcttcaaaggataataatgggaagcgtgagcagctttgtgatccaacacgcgccttgccctgtcaccgttgtcaaggataacgaataaacgattctcactacaaaaaaaaaaaaaaaactgtctttatcttataagtcctaccaaataatcatcgcaatttatgctttttagtttttattaataaaagaatctttatgttggttttatttgtaatttgactacaacaaaaaaagaacccagagtgttttcatcttctagttttgagagtttcttgc

SEQ ID NO: 34716 - protein, 97 aa, Arabidopsis thaliana
  peptide (1)..(97): Ceres Seq. ID no. 13593422
  misc_feature (4)..(63): Pfam Name: Universal stress protein family Pfam Description: Universal stress protein family
  misc_feature (1)..(41): Homolog of NCBI NO: 30025162 NR Description: pathogen induced protein 2-4 [Hordeum vulgare]
  misc_feature (5)..(97): Homolog of NCBI NO: 18401345 NR Description: expressed protein [Arabidopsis thaliana]
  misc_feature (1)..(97): Homolog of NCBI NO: 30678807 NR Description: expressed protein [Arabidopsis thaliana]
  misc_feature (1)..(97): Homolog of NCBI NO: 18396497 NR Description: expressed protein [Arabidopsis thaliana]
  misc_feature (4)..(66): Homolog of NCBI NO: 20160561 NR Description: P0414E03.3 [Oryza sativa (japonica
  misc_feature (1)..(63): Homolog of NCBI NO: 21555070 NR Description: unknown [Arabidopsis thaliana]
  misc_feature (1)..(64): Homolog of NCBI NO: 11602749 NR Description: early nodulin ENOD18 [Vicia faba]
  misc_feature (1)..(66): Homolog of NCBI NO: 11602747 NR Description: early nodulin ENOD18 [Vicia faba]
  misc_feature (3)..(66): Homolog of NCBI NO: 11602751 NR Description: ENOD18 protein [Vicia faba]
  misc_feature (1)..(63): Homolog of NCBI NO: 30693971 NR Description: expressed protein [Arabidopsis thaliana]
MPKDRNIGIAMDFSESSKNALKWAIENLADKGDTIYIIHTLPLSGDESRNSLWFKSGSPLIPLESLGNRRLWRNTVSKPTSHVLICSTLVRGRKRCM

SEQ ID NO: 34717 - protein, 89 aa, Arabidopsis thaliana
  peptide (1)..(89): Ceres Seq. ID no. 13593423
  misc_feature (1)..(86): Pfam Name: Universal stress protein family Pfam Description: Universal stress protein family
  misc_feature (1)..(64): Homolog of NCBI NO: 18396497 NR Description: expressed protein [Arabidopsis thaliana]
  misc_feature (1)..(88): Homolog of NCBI NO: 15528707 NR Description: P0583G08.8 [Oryza sativa (japonica
  misc_feature (1)..(86): Homolog of NCBI NO: 18401345 NR Description: expressed protein [Arabidopsis thaliana]
  misc_feature (1)..(88): Homolog of NCBI NO: 30678807 NR Description: expressed protein [Arabidopsis thaliana]
  misc_feature (1)..(86): Homolog of NCBI NO: 20160561 NR Description: P0414E03.3 [Oryza sativa (japonica
  misc_feature (1)..(27): Homolog of NCBI NO: 21555070 NR Description: unknown [Arabidopsis thaliana]
  misc_feature (1)..(87): Homolog of NCBI NO: 11602749 NR Description: early nodulin ENOD18 [Vicia faba]
  misc_feature (1)..(87): Homolog of NCBI NO: 11602747 NR Description: early nodulin ENOD18 [Vicia faba]
  misc_feature (1)..(87): Homolog of NCBI NO: 11602751 NR Description: ENOD18 protein [Vicia faba]
  misc_feature (1)..(89): Homolog of NCBI NO: 30693971 NR Description: expressed protein [Arabidopsis thaliana]
MEKYGVKTDIACLDMLDTGSRQKEVHVVTKLYWGDAREKLVDAVKDLKLDSIVMGSRGLSALQRIIMGSVSSFVIQHAPCPVTVVKDNE

SEQ ID NO: 34718 - protein, 87 aa, Arabidopsis thaliana
  peptide (1)..(87): Ceres Seq. ID no. 13593424
  misc_feature (1)..(53): Pfam Name: Universal stress protein family Pfam Description: Universal stress protein family
  misc_feature (1)..(31): Homolog of NCBI NO: 30025162 NR Description: pathogen induced protein 2-4 [Hordeum vulgare]
  misc_feature (1)..(87): Homolog of NCBI NO: 18401345 NR Description: expressed protein [Arabidopsis thaliana]
  misc_feature (1)..(87): Homolog of NCBI NO: 30678807 NR Description: expressed protein [Arabidopsis thaliana]
  misc_feature (1)..(87): Homolog of NCBI NO: 18396497 NR Description: expressed protein [Arabidopsis thaliana]
  misc_feature (1)..(56): Homolog of NCBI NO: 20160561 NR Description: P0414E03.3 [Oryza sativa (japonica
  misc_feature (1)..(53): Homolog of NCBI NO: 21555070 NR Description: unknown [Arabidopsis thaliana]
  misc_feature (1)..(54): Homolog of NCBI NO: 11602749 NR Description: early nodulin ENOD18 [Vicia faba]
  misc_feature (1)..(56): Homolog of NCBI NO: 11602747 NR Description: early nodulin ENOD18 [Vicia faba]
  misc_feature (1)..(56): Homolog of NCBI NO: 11602751 NR Description: ENOD18 protein [Vicia faba]
  misc_feature (1)..(53): Homolog of NCBI NO: 30693971 NR Description: expressed protein [Arabidopsis thaliana]
MDFSESSKNALKWAIENLADKGDTIYIIHTLPLSGDESRNSLWFKSGSPLIPLESLGNRRLWRNTVSKPTSHVLICSTLVRGRKRCM

SEQ ID NO: 34719 - DNA, 871 bp, Arabidopsis thaliana
  misc_feature (1)..(871): Ceres Seq. ID no. 15178443
  misc_feature: MA Experiment ID: 108434 Result: Up-regulated in Transcription
  misc_feature: MA Experiment 108434 PARAMETER Experiment Name: At_Root_Tips_cDNA_P Parameter: Tissue Value: Root Tips
  misc_feature: MA Experiment ID: 108462 Result: Down-regulated in Transcription
  misc_feature: MA Experiment 108462 PARAMETER Experiment Name: At_Germinating_Seeds_cDNA_P Parameter: Age (day) Value: 2 vs. 0
  misc_feature: MA Experiment 108462 PARAMETER Experiment Name: At_Germinating_Seeds_cDNA_P Parameter: Tissue Value: Germinating Seeds
  misc_feature: MA Experiment ID: 108463 Result: Down-regulated in Transcription
  misc_feature: MA Experiment 108463 PARAMETER Experiment Name: At_Germinating_Seeds_cDNA_P Parameter: Age (day) Value: 3 vs. 0
  misc_feature: MA Experiment 108463 PARAMETER Experiment Name: At_Germinating_Seeds_cDNA_P Parameter: Tissue Value: Germinating Seeds
  misc_feature: MA Experiment ID: 108464 Result: Down-regulated in Transcription
  misc_feature: MA Experiment 108464 PARAMETER Experiment Name: At_Germinating_Seeds_cDNA_P Parameter: Age (day) Value: 4 vs. 0
  misc_feature: MA Experiment 108464 PARAMETER Experiment Name: At_Germinating_Seeds_cDNA_P Parameter: Tissue Value: Germinating Seeds
  misc_feature: MA Experiment ID: 108488 Result: Up-regulated in Transcription
  misc_feature: MA Experiment ID: 108573 Result: Down-regulated in Transcription
  misc_feature: MA Experiment 108573 PARAMETER Experiment Name: At_Drought_cDNA_P Parameter: Timepoint (hr) Value: 6
  misc_feature: MA Experiment 108573 PARAMETER Experiment Name: At_Drought_cDNA_P Parameter: Tissue Value: Aerial
  misc_feature: MA Experiment 108573 PARAMETER Experiment Name: At_Drought_cDNA_P Parameter: Treatment Value: Drought vs. No Drought
  misc_feature: MA Experiment ID: 20000112 Result: Down-regulated in Transcription
  misc_feature: MA Experiment 20000112 PARAMETER Experiment Name: At_42deg_Heat_cDNA_P Parameter: Temperature (deg C) Value: 42 vs. 22
  misc_feature: MA Experiment 20000112 PARAMETER Experiment Name: At_42deg_Heat_cDNA_P Parameter: Timepoint (hr) Value: 2
  misc_feature: MA Experiment 20000112 PARAMETER Experiment Name: At_42deg_Heat_cDNA_P Parameter: Tissue Value: Aerial
  misc_feature: MA Experiment ID: 20000113 Result: Down-regulated in Transcription
  misc_feature: MA Experiment 20000113 PARAMETER Experiment Name: At_42deg_Heat_cDNA_P Parameter: Temperature (deg C) Value: 42 vs. 22
  misc_feature: MA Experiment 20000113 PARAMETER Experiment Name: At_42deg_Heat_cDNA_P Parameter: Timepoint (hr) Value: 8
  misc_feature: MA Experiment 20000113 PARAMETER Experiment Name: At_42deg_Heat_cDNA_P Parameter: Tissue Value: Aerial
  misc_feature: MA Experiment ID: 20000495 Result: Up-regulated in Transcription
  misc_feature: MA Experiment 20000495 PARAMETER Experiment Name: At_Guard_Cells_P Parameter: Harvest Date Value: 8/2/2002
  misc_feature: MA Experiment 20000495 PARAMETER Experiment Name: At_Guard_Cells_P Parameter: Organism Value: A. thaliana
  misc_feature: MA Experiment 20000495 PARAMETER Experiment Name: At_Guard_Cells_P Parameter: Tissue Value: Guard Cells vs. Leaves
  misc_feature: MA Experiment ID: 20000794 Result: Down-regulated in Transcription
  misc_feature: MA Experiment 20000794 PARAMETER Experiment Name: At_Petals_P Parameter: Age (day) Value: 23-25 days
  misc_feature: MA Experiment 20000794 PARAMETER Experiment Name: At_Petals_P Parameter: Plant Line Value: WS
  misc_feature: MA Experiment 20000794 PARAMETER Experiment Name: At_Petals_P Parameter: Tissue Value: Petals vs. Whole plant
  misc_feature: MA Experiment ID: 20001451 Result: Up-regulated in Transcription
  misc_feature: MA Experiment 20001451 PARAMETER Experiment Name: At_Far-red-induction_P Parameter: Age (day) Value: 7
  misc_feature: MA Experiment 20001451 PARAMETER Experiment Name: At_Far-red-induction_P Parameter: Light Value: Far-red vs. White
  misc_feature: MA Experiment 20001451 PARAMETER Experiment Name: At_Far-red-induction_P Parameter: Organism Value: A. thaliana
  misc_feature: MA Experiment 20001451 PARAMETER Experiment Name: At_Far-red-induction_P Parameter: Plant Line Value: Columbia
  misc_feature: MA Experiment 20001451 PARAMETER Experiment Name: At_Far-red-induction_P Parameter: Timepoint (hr) Value: 24
  misc_feature: MA Experiment 20001451 PARAMETER Experiment Name: At_Far-red-induction_P Parameter: Tissue Value: Whole Plant
  misc_feature: MA Experiment ID: 20001557 Result: Up-regulated in Transcription
  misc_feature: MA Experiment 20001557 PARAMETER Experiment Name: At_Drought_Soil_Dry_P Parameter: Age (day) Value: 27
  misc_feature: MA Experiment 20001557 PARAMETER Experiment Name: At_Drought_Soil_Dry_P Parameter: Organism Value: A. thaliana
  misc_feature: MA Experiment 20001557 PARAMETER Experiment Name: At_Drought_Soil_Dry_P Parameter: Plant Line Value: WS
  misc_feature: MA Experiment 20001557 PARAMETER Experiment Name: At_Drought_Soil_Dry_P Parameter: Post Timepoint (hr) Value: 3
  misc_feature: MA Experiment 20001557 PARAMETER Experiment Name: At_Drought_Soil_Dry_P Parameter: Post-Treatment Value: Re-Water vs. No Drought
  misc_feature: MA Experiment 20001557 PARAMETER Experiment Name: At_Drought_Soil_Dry_P Parameter: Timepoint (day) Value: 13
  misc_feature: MA Experiment 20001557 PARAMETER Experiment Name: At_Drought_Soil_Dry_P Parameter: Treatment Value: Drought vs. No Drought
  misc_feature: MA Experiment ID: 20001558 Result: Up-regulated in Transcription
  misc_feature: MA Experiment 20001558 PARAMETER Experiment Name: At_Drought_Soil_Dry_P Parameter: Age (day) Value: 27
  misc_feature: MA Experiment 20001558 PARAMETER Experiment Name: At_Drought_Soil_Dry_P Parameter: Organism Value: A. thaliana
  misc_feature: MA Experiment 20001558 PARAMETER Experiment Name: At_Drought_Soil_Dry_P Parameter: Plant Line Value: WS
  misc_feature: MA Experiment 20001558 PARAMETER Experiment Name: At_Drought_Soil_Dry_P Parameter: Post Timepoint (hr) Value: 6
  misc_feature: MA Experiment 20001558 PARAMETER Experiment Name: At_Drought_Soil_Dry_P Parameter: Post-Treatment Value: Re-Water vs. No Drought
  misc_feature: MA Experiment 20001558 PARAMETER Experiment Name: At_Drought_Soil_Dry_P Parameter: Timepoint (day) Value: 13
  misc_feature: MA Experiment 20001558 PARAMETER Experiment Name: At_Drought_Soil_Dry_P Parameter: Treatment Value: Drought vs. No Drought
  misc_feature: MA Experiment ID: 20001560 Result: Up-regulated in Transcription
  misc_feature: MA Experiment 20001560 PARAMETER Experiment Name: At_Drought_Soil_Dry_P Parameter: Age (day) Value: 28
  misc_feature: MA Experiment 20001560 PARAMETER Experiment Name: At_Drought_Soil_Dry_P Parameter: Organism Value: A. thaliana
  misc_feature: MA Experiment 20001560 PARAMETER Experiment Name: At_Drought_Soil_Dry_P Parameter: Plant Line Value: WS
  misc_feature: MA Experiment 20001560 PARAMETER Experiment Name: At_Drought_Soil_Dry_P Parameter: Post Timepoint (hr) Value: None
  misc_feature: MA Experiment 20001560 PARAMETER Experiment Name: At_Drought_Soil_Dry_P Parameter: Post-Treatment Value: None
  misc_feature: MA Experiment 20001560 PARAMETER Experiment Name: At_Drought_Soil_Dry_P Parameter: Timepoint (day) Value: 14
  misc_feature: MA Experiment 20001560 PARAMETER Experiment Name: At_Drought_Soil_Dry_P Parameter: Treatment Value: Drought vs. No Drought
  misc_feature: MA Experiment ID: 20001757 Result: Up-regulated in Transcription
  misc_feature: MA Experiment 20001757 PARAMETER Experiment Name: At_50mM_NH4NO3_L-to-H_P Parameter: Timepoint (hr) Value: 6
  misc_feature: MA Experiment 20001757 PARAMETER Experiment Name: At_50mM_NH4NO3_L-to-H_P Parameter: Tissue Value: Leaf
  misc_feature: MA Experiment 20001757 PARAMETER Experiment Name: At_50mM_NH4NO3_L-to-H_P Parameter: Treatment Value: 50mM NH4NO3 vs 100mM Mannitol
ctccctggaacaccgaagctctggattaacctattttcaccttctaaggttcttcgtcgttcttattgatctgtgaagatgtattcgggtcagaacaagatccacaaggataagggtgttgcaccaacagagtttgaagagcaagttactcaggctttgtttgacttggagaacaccaaccaggagttgaaaagcgagttgaaagatctctacattaaccaagctgttcagatggatatttctggcaaccgcaaagctgttgtgatctacgttccattcaggctgaggaaagctttccgcaagattcatcttcgtctggtcagagagcttgagaagaagttcagtggaaaagatgtgatctttgttgctaccagaagaatcatgcgcccaccaaagaaaggctcagctgttcagagaccacgcaacagaactcttacttctgtccatgaagccatgctcgaggatgtcgcttaccctgctgagattgtaggaaagagaaccagataccgtcttgatggcaccaagatcatgaaggtatttttggatagtaagctaaagaacgacactgagtacaagctggagacaatggtgggtgtgtacaggaaacttacagggaaagatgtagttttcgagtacccagtcatagaagcttgaagagatgaatgtttgtttcattcttttttgtcggatagagagcttttgattctgtttgggagtaaaactctttgcaaagattttgttatttcagcatttcgcaatctcttcttcaaagttcgatttatcgatacaattcttttttcctactagcattcatagtttcaaaaacaaaagtttcaaataattccaggttaaatttataatttttgagcac

SEQ ID NO: 34720 - protein, 191 aa, Arabidopsis thaliana; identical to SEQ ID NO: 21551
  peptide (1)..(191): Ceres Seq. ID no. 15178444
  misc_feature (4)..(191): Pfam Name: Ribosomal protein S7e Pfam Description: Ribosomal protein S7e
  misc_feature (1)..(187): Homolog of NCBI NO: 15294025 NR Description: 40S ribosomal protein S7 [Ictalurus punctatus]
  misc_feature (1)..(190): Homolog of NCBI NO: 4588906 NR Description: ribosomal protein S7 [Secale cereale]
  misc_feature (1)..(190): Homolog of NCBI NO: 14787424 NR Description: Ribosomal protein S7 [Hordeum vulgare subsp.
  misc_feature (1)..(190): Homolog of NCBI NO: 22671664 NR Description: ribosomal protein S7 [Oryza sativa (japonica
  misc_feature (1)..(191): Homolog of NCBI NO: 15221972 NR Description: 40S ribosomal protein S7 (RPS7A) [Arabidopsis
  misc_feature (1)..(190): Homolog of NCBI NO: 20139964 NR Description: 40S ribosomal protein S7
  misc_feature (1)..(188): Homolog of NCBI NO: 15237278 NR Description: 40S ribosomal protein S7 (RPS7C) [Arabidopsis
  misc_feature (1)..(188): Homolog of NCBI NO: 21592413 NR Description: 40S ribosomal protein S7-like [Arabidopsis
  misc_feature (1)..(190): Homolog of NCBI NO: 20139962 NR Description: 40S ribosomal protein S7
  misc_feature (1)..(191): Homolog of NCBI NO: 15232926 NR Description: 40S ribosomal protein S7 (RPS7B) [Arabidopsis

SEQ ID NO: 34721 - protein, 140 aa, Arabidopsis thaliana; identical to SEQ ID NO: 21552
  peptide (1)..(140): Ceres Seq. ID no. 15178445
  misc_feature (1)..(140): Pfam Name: Ribosomal protein S7e Pfam Description: Ribosomal protein S7e
  misc_feature (1)..(136): Homolog of NCBI NO: 15294025 NR Description: 40S ribosomal protein S7 [Ictalurus punctatus]
  misc_feature (1)..(139): Homolog of NCBI NO: 4588906 NR Description: ribosomal protein S7 [Secale cereale]
  misc_feature (1)..(139): Homolog of NCBI NO: 14787424 NR Description: Ribosomal protein S7 [Hordeum vulgare subsp.
  misc_feature (1)..(139): Homolog of NCBI NO: 22671664 NR Description: ribosomal protein S7 [Oryza sativa (japonica
  misc_feature (1)..(140): Homolog of NCBI NO: 15221972 NR Description: 40S ribosomal protein S7 (RPS7A) [Arabidopsis
  misc_feature (1)..(139): Homolog of NCBI NO: 20139964 NR Description: 40S ribosomal protein S7
  misc_feature (1)..(137): Homolog of NCBI NO: 15237278 NR Description: 40S ribosomal protein S7 (RPS7C) [Arabidopsis
  misc_feature (1)..(137): Homolog of NCBI NO: 21592413 NR Description: 40S ribosomal protein S7-like [Arabidopsis
  misc_feature (1)..(139): Homolog of NCBI NO: 20139962 NR Description: 40S ribosomal protein S7
  misc_feature (1)..(140): Homolog of NCBI NO: 15232926 NR Description: 40S ribosomal protein S7 (RPS7B) [Arabidopsis

SEQ ID NO: 34722 - DNA, 1056 bp, Arabidopsis thaliana
  misc_feature (1)..(1056): Ceres Seq. ID no. 12327024
  misc_feature: MA Experiment ID: 108462 Result: Up-regulated in Transcription
  misc_feature: MA Experiment 108462 PARAMETER Experiment Name: At_Germinating_Seeds_cDNA_P Parameter: Age (day) Value: 2 vs. 0
  misc_feature: MA Experiment 108462 PARAMETER Experiment Name: At_Germinating_Seeds_cDNA_P Parameter: Tissue Value: Germinating Seeds
  misc_feature: MA Experiment ID: 108464 Result: Up-regulated in Transcription
  misc_feature: MA Experiment 108464 PARAMETER Experiment Name: At_Germinating_Seeds_cDNA_P Parameter: Age (day) Value: 4 vs. 0
  misc_feature: MA Experiment 108464 PARAMETER Experiment Name: At_Germinating_Seeds_cDNA_P Parameter: Tissue Value: Germinating Seeds
  misc_feature: MA Experiment ID: 108501 Result: Up-regulated in Transcription
  misc_feature: MA Experiment 108501 PARAMETER Experiment Name: At_ap2_floral_buds_cDNA_P Parameter: Plant Line Value: ap2 (Ler.)
  misc_feature: MA Experiment 108501 PARAMETER Experiment Name: At_ap2_floral_buds_cDNA_P Parameter: Tissue Value: Closed Flower
  misc_feature: MA Experiment ID: 108561 Result: Down-regulated in Transcription
  misc_feature: MA Experiment 108561 PARAMETER Experiment Name: At_100uM_ABA_cDNA_P Parameter: Timepoint (hr) Value: 6
  misc_feature: MA Experiment 108561 PARAMETER Experiment Name: At_100uM_ABA_cDNA_P Parameter: Tissue Value: Aerial
  misc_feature: MA Experiment 108561 PARAMETER Experiment Name: At_100uM_ABA_cDNA_P Parameter: Treatment Value: 100uM ABA vs. No Treatment
  misc_feature: MA Experiment ID: 108573 Result: Down-regulated in Transcription
  misc_feature: MA Experiment 108573 PARAMETER Experiment Name: At_Drought_cDNA_P Parameter: Timepoint (hr) Value: 6
  misc_feature: MA Experiment 108573 PARAMETER Experiment Name: At_Drought_cDNA_P Parameter: Tissue Value: Aerial
  misc_feature: MA Experiment 108573 PARAMETER Experiment Name: At_Drought_cDNA_P Parameter: Treatment Value: Drought vs. No Drought
  misc_feature: MA Experiment ID: 108577 Result: Down-regulated in Transcription
  misc_feature: MA Experiment 108577 PARAMETER Experiment Name: At_42deg_Heat_cDNA_P Parameter: Temperature (deg C) Value: 42 vs. 22
  misc_feature: MA Experiment 108577 PARAMETER Experiment Name: At_42deg_Heat_cDNA_P Parameter: Timepoint (hr) Value: 6
  misc_feature: MA Experiment 108577 PARAMETER Experiment Name: At_42deg_Heat_cDNA_P Parameter: Tissue Value: Aerial
  misc_feature: MA Experiment ID: 108668 Result: Down-regulated in Transcription
  misc_feature: MA Experiment 108668 PARAMETER Experiment Name: At_2mM_SA_cDNA_P Parameter: Plant Line Value: WS
  misc_feature: MA Experiment 108668 PARAMETER Experiment Name: At_2mM_SA_cDNA_P Parameter: Timepoint (hr) Value: 6
  misc_feature: MA Experiment 108668 PARAMETER Experiment Name: At_2mM_SA_cDNA_P Parameter: Treatment Value: 2mM SA vs. No Treatment
  misc_feature: MA Experiment ID: 20000071 Result: Down-regulated in Transcription
  misc_feature: MA Experiment 20000071 PARAMETER Experiment Name: At_100uM_ABA_Mutants_cDNA_P Parameter: Plant Line Value: CS8104
  misc_feature: MA Experiment 20000071 PARAMETER Experiment Name: At_100uM_ABA_Mutants_cDNA_P Parameter: Timepoint (hr) Value: 6
  misc_feature: MA Experiment 20000071 PARAMETER Experiment Name: At_100uM_ABA_Mutants_cDNA_P Parameter: Tissue Value: Aerial
  misc_feature: MA Experiment 20000071 PARAMETER Experiment Name: At_100uM_ABA_Mutants_cDNA_P Parameter: Treatment Value: 100uM ABA vs. No Treatment
  misc_feature: MA Experiment ID: 20000117 Result: Down-regulated in Transcription
  misc_feature: MA Experiment 20000117 PARAMETER Experiment Name: At_100uM_ABA_Mutants_cDNA_P Parameter: Plant Line Value: Columbia
  misc_feature: MA Experiment 20000117 PARAMETER Experiment Name: At_100uM_ABA_Mutants_cDNA_P Parameter: Timepoint (hr) Value: 6
  misc_feature: MA Experiment 20000117 PARAMETER Experiment Name: At_100uM_ABA_Mutants_cDNA_P Parameter: Tissue Value: Aerial
  misc_feature: MA Experiment 20000117 PARAMETER Experiment Name: At_100uM_ABA_Mutants_cDNA_P Parameter: Treatment Value: 100uM ABA vs. No Treatment
  misc_feature: MA Experiment ID: 20000182 Result: Down-regulated in Transcription
  misc_feature: MA Experiment 20000182 PARAMETER Experiment Name: At_2mM_SA_P Parameter: Age (day) Value: 14
  misc_feature: MA Experiment 20000182 PARAMETER Experiment Name: At_2mM_SA_P Parameter: Organism Value: A. thaliana
  misc_feature: MA Experiment 20000182 PARAMETER Experiment Name: At_2mM_SA_P Parameter: Plant Line Value: WS
  misc_feature: MA Experiment 20000182 PARAMETER Experiment Name: At_2mM_SA_P Parameter: Timepoint (hr) Value: 6
  misc_feature: MA Experiment 20000182 PARAMETER Experiment Name: At_2mM_SA_P Parameter: Tissue Value: Aerial
  misc_feature: MA Experiment 20000182 PARAMETER Experiment Name: At_2mM_SA_P Parameter: Treatment Value: 2mM SA vs. No Treatment
  misc_feature: MA Experiment ID: 20000234 Result: Up-regulated in Transcription
  misc_feature: MA Experiment 20000234 PARAMETER Experiment Name: At_Siliques_P Parameter: Age (day) Value: 21
  misc_feature: MA Experiment 20000234 PARAMETER Experiment Name: At_Siliques_P Parameter: Organism Value: A. thaliana
  misc_feature: MA Experiment 20000234 PARAMETER Experiment Name: At_Siliques_P Parameter: Plant Line Value: WS
  misc_feature: MA Experiment 20000234 PARAMETER Experiment Name: At_Siliques_P Parameter: Tissue Value: Less Than 5mm Siliques vs. Whole Plant
  misc_feature: MA Experiment ID: 20000264 Result: Up-regulated in Transcription
  misc_feature: MA Experiment 20000264 PARAMETER Experiment Name: At_Open_Flower_P Parameter: Age (day) Value: 21
  misc_feature: MA Experiment 20000264 PARAMETER Experiment Name: At_Open_Flower_P Parameter: Plant Line Value: WS
  misc_feature: MA Experiment 20000264 PARAMETER Experiment Name: At_Open_Flower_P Parameter: Tissue Value: Open Flower vs. Whole Plant
  misc_feature: MA Experiment ID: 20000265 Result: Up-regulated in Transcription
  misc_feature: MA Experiment 20000265 PARAMETER Experiment Name: At_Open_Flower_P Parameter: Age (day) Value: 21
  misc_feature: MA Experiment 20000265 PARAMETER Experiment Name: At_Open_Flower_P Parameter: Plant Line Value: WS
  misc_feature: MA Experiment 20000265 PARAMETER Experiment Name: At_Open_Flower_P Parameter: Tissue Value: Closed Flower vs. Whole Plant
  misc_feature: MA Experiment ID: 20000286 Result: Up-regulated in Transcription
  misc_feature: MA Experiment 20000286 PARAMETER Experiment Name: At_Open_Flower_P Parameter: Age (day) Value: 21
  misc_feature: MA Experiment 20000286 PARAMETER Experiment Name: At_Open_Flower_P Parameter: Plant Line Value: WS
  misc_feature: MA Experiment 20000286 PARAMETER Experiment Name: At_Open_Flower_P Parameter: Tissue Value: Half Open vs. Whole Plant
  misc_feature: MA Experiment ID: 20000439 Result: Down-regulated in Transcription
  misc_feature: MA Experiment 20000439 PARAMETER Experiment Name: At_Roots__P Parameter: Age (day) Value: 14 vs. 21
  misc_feature: MA Experiment 20000439 PARAMETER Experiment Name: At_Roots__P Parameter: Organism Value: A. thaliana
  misc_feature: MA Experiment 20000439 PARAMETER Experiment Name: At_Roots__P Parameter: Tissue Value: Roots vs. Whole Plant
  misc_feature: MA Experiment ID: 20001911 Result: Down-regulated in Transcription
  misc_feature: MA Experiment 20001911 PARAMETER Experiment Name: At_Drought_Reproduction_P Parameter: Age (day) Value: 40
  misc_feature: MA Experiment 20001911 PARAMETER Experiment Name: At_Drought_Reproduction_P Parameter: Organism Value: A. thaliana
  misc_feature: MA Experiment 20001911 PARAMETER Experiment Name: At_Drought_Reproduction_P Parameter: Plant Line Value: WS
  misc_feature: MA Experiment 20001911 PARAMETER Experiment Name: At_Drought_Reproduction_P Parameter: Timepoint (day) Value: 10
  misc_feature: MA Experiment 20001911 PARAMETER Experiment Name: At_Drought_Reproduction_P Parameter: Tissue Value: Flowers
  misc_feature: MA Experiment 20001911 PARAMETER Experiment Name: At_Drought_Reproduction_P Parameter: Treatment Value: Drought vs. No Drought
gatgggtgataggaaacaaacacacatacgtcatcatcatccttaatttctatttctccttcttcttcatcatcaatatcaatctcatcttccactactcctcccctctaacaataagcagcatctctataatccctaagattcacaatggagcttggaggaaaatgcaatgcaattacaaccacaacaataatctcaacagaagtaaagccacatacggatccggaaccagaagccaaacccgaatcagatccatccatggctttattcccgatcaagaaagaaaaccaaaaaccaaagacacgtgtcgaccaaggagctaagtaccgggaatgtcagaagaaccacgcggcctcaaccggaggacacgtggtggacggatgctgcgagttcatggccggcggagaagaaggtacactcggtgctttaaaatgcgccgcctgtaactgtcaccggagcttccaccggaaagaagtgtacggacacatgaacagtaaacaagattatcagctgatgataactccggcgttttacagcagtaacagctcgtacaagccacgtgtaatgcatccaacgggtgagattggacggaggacttcatcttcaagcgaggatatgaagaagattctgagtcatcgtaaccaaaacgttgatgggaaaagtttgatgatgatgatgatgaggaagaagaagagagtgaggacaaagatcaatgaagaacaaaaggagaagatgaaggaatttgcagagagattagggtggaggatgcagaagaaagatgaagaagagattgataagttttgtaggatggtgaatctgaggagacaagtttttaaggtttggatgcataataacaagcaagcaatgaagagaaacaatagtaacattagtgaatagtttgatgatctgataaaagtgaaataaatttttacaatcctgttttgcttttatatataatttttgcccttcaaattattcaaaatcttgagtataaatctgtggaatcttgtatgttttgattgttttatattgtatctgggattatttttttctttt

SEQ ID NO: 34723 - protein, 249 aa, Arabidopsis thaliana
  peptide (1)..(249): Ceres Seq. ID no. 12327025
  misc_feature (55)..(114): Pfam Name: ZF-HD protein dimerisation region Pfam Description: ZF-HD protein dimerisation region
  misc_feature (59)..(249): Homolog of NCBI NO: 20148768 NR Description: hypothetical protein At2g02540/T822.16
  misc_feature (59)..(249): Homolog of NCBI NO: 15226993 NR Description: hypothetical protein
  misc_feature (59)..(249): Homolog of NCBI NO: 15223757 NR Description: hypothetical protein
  misc_feature (57)..(240): Homolog of NCBI NO: 15233925 NR Description: putative protein
  misc_feature (57)..(240): Homolog of NCBI NO: 13374061 NR Description: ZF-HD homeobox protein [Flaveria bidentis]
  misc_feature (147)..(242): Homolog of NCBI NO: 18410804 NR Description: expressed protein
  misc_feature (4)..(112): Homolog of NCBI NO: 18410804 NR Description: expressed protein
  misc_feature (24)..(244): Homolog of NCBI NO: 18398714 NR Description: expressed protein
  misc_feature (1)..(249): Homolog of NCBI NO: 15230335 NR Description: putative protein
  misc_feature (1)..(249): Homolog of NCBI NO: 21554149 NR Description: unknown [Arabidopsis thaliana]
MELGGKCNAITTTTIISTEVKPHTDPEPEAKPESDPSMALFPIKKENQKPKTRVDQGAKYRECQKNHAASTGGHVVDGCCEFMAGGEEGTLGALKCAACNCHRSFHRKEVYGHMNSKQDYQLMITPAFYSSNSSYKPRVMHPTGEIGRRTSSSSEDMKKILSHRNQNVDGKSLMMMMMRKKKRVRTKINEEQKEKMKEFAERLGWRMQKKDEEEIDKFCRMVNLRRQVFKVWMHNNKQAMKRNNSNISE

SEQ ID NO: 34724 - protein, 212 aa, Arabidopsis thaliana
  peptide (1)..(212): Ceres Seq. ID no. 12327026
  misc_feature (18)..(77): Pfam Name: ZF-HD protein dimerisation region Pfam Description: ZF-HD protein dimerisation region
  misc_feature (22)..(212): Homolog of NCBI NO: 20148768 NR Description: hypothetical protein At2g02540/T822.16
  misc_feature (22)..(212): Homolog of NCBI NO: 15226993 NR Description: hypothetical protein
  misc_feature (22)..(212): Homolog of NCBI NO: 15223757 NR Description: hypothetical protein
  misc_feature (20)..(203): Homolog of NCBI NO: 15233925 NR Description: putative protein
  misc_feature (20)..(203): Homolog of NCBI NO: 13374061 NR Description: ZF-HD homeobox protein [Flaveria bidentis]
  misc_feature (110)..(205): Homolog of NCBI NO: 18410804 NR Description: expressed protein
  misc_feature (1)..(75): Homolog of NCBI NO: 18410804 NR Description: expressed protein
  misc_feature (1)..(207): Homolog of NCBI NO: 18398714 NR Description: expressed protein
  misc_feature (1)..(212): Homolog of NCBI NO: 15230335 NR Description: putative protein
  misc_feature (1)..(212): Homolog of NCBI NO: 21554149 NR Description: unknown [Arabidopsis thaliana]
MALFPIKKENQKPKTRVDQGAKYRECQKNHAASTGGHVVDGCCEFMAGGEEGTLGALKCAACNCHRSFHRKEVYGHMNSKQDYQLMITPAFYSSNSSYKPRVMHPTGEIGRRTSSSSEDMKKILSHRNQNVDGKSLMMMMMRKKKRVRTKINEEQKEKMKEFAERLGWRMQKKDEEEIDKFCRMVNLRRQVFKVWMHNNKQAMKRNNSNISE

SEQ ID NO: 34725 - protein, 167 aa, Arabidopsis thaliana
  peptide (1)..(167): Ceres Seq. ID no. 12327027
  misc_feature (1)..(167): Homolog of NCBI NO: 20148768 NR Description: hypothetical protein At2g02540/T822.16
  misc_feature (1)..(167): Homolog of NCBI NO: 15226993 NR Description: hypothetical protein
  misc_feature (1)..(167): Homolog of NCBI NO: 15223757 NR Description: hypothetical protein
  misc_feature (1)..(158): Homolog of NCBI NO: 15233925 NR Description: putative protein
  misc_feature (1)..(158): Homolog of NCBI NO: 13374061 NR Description: ZF-HD homeobox protein [Flaveria bidentis]
  misc_feature (65)..(160): Homolog of NCBI NO: 18410804 NR Description: expressed protein
  misc_feature (1)..(30): Homolog of NCBI NO: 18410804 NR Description: expressed protein
  misc_feature (1)..(162): Homolog of NCBI NO: 18398714 NR Description: expressed protein
  misc_feature (1)..(167): Homolog of NCBI NO: 15230335 NR Description: putative protein
  misc_feature (1)..(167): Homolog of NCBI NO: 21554149 NR Description: unknown [Arabidopsis thaliana]
MAGGEEGTLGALKCAACNCHRSFHRKEVYGHMNSKQDYQLMITPAFYSSNSSYKPRVMHPTGEIGRRTSSSSEDMKKILSHRNQNVDGKSLMMMMMRKKKRVRTKINEEQKEKMKEFAERLGWRMQKKDEEEIDKFCRMVNLRRQVFKVWMHNNKQAMKRNNSNISE

SEQ ID NO: 34726 - DNA, 920 bp, Arabidopsis thaliana
  misc_feature (1)..(920): Ceres Seq. ID no. 13504388
  misc_feature: MA Experiment ID: 108461 Result: Up-regulated in Transcription
  misc_feature: MA Experiment 108461 PARAMETER Experiment Name: At_Germinating_Seeds_cDNA_P Parameter: Age (day) Value: 1 vs. 0
  misc_feature: MA Experiment 108461 PARAMETER Experiment Name: At_Germinating_Seeds_cDNA_P Parameter: Tissue Value: Germinating Seeds
  misc_feature: MA Experiment ID: 108462 Result: Up-regulated in Transcription
  misc_feature: MA Experiment 108462 PARAMETER Experiment Name: At_Germinating_Seeds_cDNA_P Parameter: Age (day) Value: 2 vs. 0
  misc_feature: MA Experiment 108462 PARAMETER Experiment Name: At_Germinating_Seeds_cDNA_P Parameter: Tissue Value: Germinating Seeds
  misc_feature: MA Experiment ID: 108463 Result: Up-regulated in Transcription
  misc_feature: MA Experiment 108463 PARAMETER Experiment Name: At_Germinating_Seeds_cDNA_P Parameter: Age (day) Value: 3 vs. 0
  misc_feature: MA Experiment 108463 PARAMETER Experiment Name: At_Germinating_Seeds_cDNA_P Parameter: Tissue Value: Germinating Seeds
  misc_feature: MA Experiment ID: 108473 Result: Down-regulated in Transcription
  misc_feature: MA Experiment 108473 PARAMETER Experiment Name: At_Drought_Flowers_cDNA_P Parameter: Timepoint (hr) Value: 7 d
  misc_feature: MA Experiment 108473 PARAMETER Experiment Name: At_Drought_Flowers_cDNA_P Parameter: Tissue Value: Flower
  misc_feature: MA Experiment 108473 PARAMETER Experiment Name: At_Drought_Flowers_cDNA_P Parameter: Treatment Value: Drought vs. No Drought
  misc_feature: MA Experiment ID: 108489 Result: Down-regulated in Transcription
  misc_feature: MA Experiment ID: 108576 Result: Down-regulated in Transcription
  misc_feature: MA Experiment 108576 PARAMETER Experiment Name: At_42deg_Heat_cDNA_P Parameter: Temperature (deg C) Value: 42 vs. 22
  misc_feature: MA Experiment 108576 PARAMETER Experiment Name: At_42deg_Heat_cDNA_P Parameter: Timepoint (hr) Value: 1
  misc_feature: MA Experiment 108576 PARAMETER Experiment Name: At_42deg_Heat_cDNA_P Parameter: Tissue Value: Aerial
  misc_feature: MA Experiment ID: 20000090 Result: Down-regulated in Transcription
  misc_feature: MA Experiment ID: 20000111 Result: Down-regulated in Transcription
  misc_feature: MA Experiment 20000111 PARAMETER Experiment Name: At_42deg_Heat_cDNA_P Parameter: Temperature (deg C) Value: 42 vs. 22
  misc_feature: MA Experiment 20000111 PARAMETER Experiment Name: At_42deg_Heat_cDNA_P Parameter: Timepoint (hr) Value: 6
  misc_feature: MA Experiment 20000111 PARAMETER Experiment Name: At_42deg_Heat_cDNA_P Parameter: Tissue Value: Aerial
  misc_feature: MA Experiment ID: 20000112 Result: Down-regulated in Transcription
  misc_feature: MA Experiment 20000112 PARAMETER Experiment Name: At_42deg_Heat_cDNA_P Parameter: Temperature (deg C) Value: 42 vs. 22
  misc_feature: MA Experiment 20000112 PARAMETER Experiment Name: At_42deg_Heat_cDNA_P Parameter: Timepoint (hr) Value: 2
  misc_feature: MA Experiment 20000112 PARAMETER Experiment Name: At_42deg_Heat_cDNA_P Parameter: Tissue Value: Aerial
  misc_feature: MA Experiment ID: 20000113 Result: Down-regulated in Transcription
  misc_feature: MA Experiment 20000113 PARAMETER Experiment Name: At_42deg_Heat_cDNA_P Parameter: Temperature (deg C) Value: 42 vs. 22
  misc_feature: MA Experiment 20000113 PARAMETER Experiment Name: At_42deg_Heat_cDNA_P Parameter: Timepoint (hr) Value: 8
  misc_feature: MA Experiment 20000113 PARAMETER Experiment Name: At_42deg_Heat_cDNA_P Parameter: Tissue Value: Aerial
  misc_feature: MA Experiment ID: 20000144 Result: Down-regulated in Transcription
  misc_feature: MA Experiment 20000144 PARAMETER Experiment Name: At_42deg_Heat_cDNA_P Parameter: Temperature (deg C) Value: 42 vs. 22
  misc_feature: MA Experiment 20000144 PARAMETER Experiment Name: At_42deg_Heat_cDNA_P Parameter: Timepoint (hr) Value: 1
  misc_feature: MA Experiment 20000144 PARAMETER Experiment Name: At_42deg_Heat_cDNA_P Parameter: Tissue Value: Aerial
  misc_feature: MA Experiment ID: 20000224 Result: Up-regulated in Transcription
  misc_feature: MA Experiment ID: 20000307 Result: Up-regulated in Transcription
  misc_feature: MA Experiment 20000307 PARAMETER Experiment Name: At_Germinating_Seeds_Sub_P Parameter: Age (hr) Value: 24 vs. 0
  misc_feature: MA Experiment 20000307 PARAMETER Experiment Name: At_Germinating_Seeds_Sub_P Parameter: Organism Value: A. thaliana
  misc_feature: MA Experiment 20000307 PARAMETER Experiment Name: At_Germinating_Seeds_Sub_P Parameter: Plant Line Value: WS
  misc_feature: MA Experiment 20000307 PARAMETER Experiment Name: At_Germinating_Seeds_Sub_P Parameter: Tissue Value: Germinating Seeds
  misc_feature: MA Experiment ID: 20000314 Result: Down-regulated in Transcription
  misc_feature: MA Experiment 20000314 PARAMETER Experiment Name: At_14day_Shoots-Roots_Sub_P Parameter: Age (day) Value: 14
  misc_feature: MA Experiment 20000314 PARAMETER Experiment Name: At_14day_Shoots-Roots_Sub_P Parameter: Organism Value: A. thaliana
  misc_feature: MA Experiment 20000314 PARAMETER Experiment Name: At_14day_Shoots-Roots_Sub_P Parameter: Plant Line Value: WS
  misc_feature: MA Experiment 20000314 PARAMETER Experiment Name: At_14day_Shoots-Roots_Sub_P Parameter: Tissue Value: Roots vs. Whole Plant
  misc_feature: MA Experiment ID: 20000327 Result: Down-regulated in Transcription
  misc_feature: MA Experiment 20000327 PARAMETER Experiment Name: At_42deg_Heat_Sub_P Parameter: Age (day) Value: 14
  misc_feature: MA Experiment 20000327 PARAMETER Experiment Name: At_42deg_Heat_Sub_P Parameter: Organism Value: A. thaliana
  misc_feature: MA Experiment 20000327 PARAMETER Experiment Name: At_42deg_Heat_Sub_P Parameter: Plant Line Value: WS
  misc_feature: MA Experiment 20000327 PARAMETER Experiment Name: At_42deg_Heat_Sub_P Parameter: Temperature (deg C) Value: 42 vs. 22
  misc_feature: MA Experiment 20000327 PARAMETER Experiment Name: At_42deg_Heat_Sub_P Parameter: Timepoint (hr) Value: 1
  misc_feature: MA Experiment 20000327 PARAMETER Experiment Name: At_42deg_Heat_Sub_P Parameter: Tissue Value: Aerial
  misc_feature: MA Experiment ID: 20000328 Result: Down-regulated in Transcription
  misc_feature: MA Experiment 20000328 PARAMETER Experiment Name: At_42deg_Heat_Sub_P Parameter: Age (day) Value: 14
  misc_feature: MA Experiment 20000328 PARAMETER Experiment Name: At_42deg_Heat_Sub_P Parameter: Organism Value: A. thaliana
  misc_feature: MA Experiment 20000328 PARAMETER Experiment Name: At_42deg_Heat_Sub_P Parameter: Plant Line Value: WS
  misc_feature: MA Experiment 20000328 PARAMETER Experiment Name: At_42deg_Heat_Sub_P Parameter: Temperature (deg C) Value: 42 vs. 22
  misc_feature: MA Experiment 20000328 PARAMETER Experiment Name: At_42deg_Heat_Sub_P Parameter: Timepoint (hr) Value: 6
  misc_feature: MA Experiment 20000328 PARAMETER Experiment Name: At_42deg_Heat_Sub_P Parameter: Tissue Value: Aerial
  misc_feature: MA Experiment ID: 20000355 Result: Up-regulated in Transcription
  misc_feature: MA Experiment 20000355 PARAMETER Experiment Name: At_Siliques_Sub_P Parameter: Age (day) Value: 21
  misc_feature: MA Experiment 20000355 PARAMETER Experiment Name: At_Siliques_Sub_P Parameter: Organism Value: A. thaliana
  misc_feature: MA Experiment 20000355 PARAMETER Experiment Name: At_Siliques_Sub_P Parameter: Plant Line Value: WS
  misc_feature: MA Experiment 20000355 PARAMETER Experiment Name: At_Siliques_Sub_P Parameter: Tissue Value: Less Than 5mm Siliques vs. Whole Plant
atctctcttgtcatcacaacaaaattttgccttggcttgcgaaaaaaggagatcaagtgatcatatggaggaagaacaagtaagagcaattaagataatagtatttggagtcatctcatggggtgtggccttcattctcacccggagaatcttctcaagctactcattcagcttcagcaaccgtcttctctccacggctcacgcgactatcgctgtcactttagcaacactctctgttcaagatttgtcttgccctgtttgtccccttgcttctaagccatctcataaacagatggacgtgatggcgttttcgttgtcgtacatgatctacgatctaatatgttgtcatttcgatcaagtgtttagcattgataacgcggttcatcatttcgttagcattcttggttttatagctggacttgcataccaaaagtctggatctgagatcgtggctacactgtgggtagcagagatatcaagtccttttttccaccttagggagattctcaaagagattggatacaaagacaccaaactcaatctagctgccgatgtgtgttttgccactatattcacattggcgagaattgtgtgtggacctttcctcgtttacgtcagtctatcagctgataatcccatcttcatcaaggcaatgggatcaggattacaactcgtgagcatcttttggttctataaaattttcgggatgatgagatataaactttttaagaagccaaagtcaaacaaaaagtctacttagcttagttagagatatacaaaagctgattcaatccaaatatttttttcttatttttatttatggtcatttatctattttattaaaatgtattaataaaataacgaaaacaaaaaggaaagagacatacatgtgagacaaccgactttgaaatgtcttgttt

SEQ ID NO: 34727 - protein, 252 aa, Arabidopsis thaliana
  peptide (1)..(252): Ceres Seq. ID no. 13504389
  misc_feature (55)..(246): Homolog of NCBI NO: 27661880 NR Description: hypothetical protein XP_236191 [Rattus norvegicus]
  misc_feature (33)..(244): Homolog of NCBI NO: 34535216 NR Description: unnamed protein product [Homo sapiens]
  misc_feature (141)..(185): Homolog of NCBI NO: 25405881 NR Description: protein F27F5.9 [imported] - Arabidopsis thaliana
  misc_feature (22)..(97): Homolog of NCBI NO: 25405881 NR Description: protein F27F5.9 [imported] - Arabidopsis thaliana
  misc_feature (33)..(249): Homolog of NCBI NO: 34903030 NR Description: unnamed protein product [Oryza sativa (japonica
  misc_feature (22)..(192): Homolog of NCBI NO: 25518603 NR Description: hypothetical protein T32G9.28 - Arabidopsis
  misc_feature (22)..(216): Homolog of NCBI NO: 15219511 NR Description: hypothetical protein [Arabidopsis thaliana]
  misc_feature (22)..(251): Homolog of NCBI NO: 30693154 NR Description: expressed protein [Arabidopsis thaliana]
  misc_feature (22)..(252): Homolog of NCBI NO: 22330031 NR Description: expressed protein [Arabidopsis thaliana]
  misc_feature (55)..(246): Homolog of NCBI NO: 27661880 NR Description: hypothetical protein XP_236191 [Rattus norvegicus]
  misc_feature (33)..(244): Homolog of NCBI NO: 34535216 NR Description: unnamed protein product [Homo sapiens]
  misc_feature (141)..(185): Homolog of NCBI NO: 25405881 NR Description: protein F27F5.9 [imported] - Arabidopsis thaliana
  misc_feature (22)..(97): Homolog of NCBI NO: 25405881 NR Description: protein F27F5.9 [imported] - Arabidopsis thaliana
  misc_feature (33)..(249): Homolog of NCBI NO: 34903030 NR Description: unnamed protein product [Oryza sativa (japonica
  misc_feature (22)..(192): Homolog of NCBI NO: 25518603 NR Description: hypothetical protein T32G9.28 - Arabidopsis
  misc_feature (22)..(216): Homolog of NCBI NO: 15219511 NR Description: hypothetical protein [Arabidopsis thaliana]
  misc_feature (22)..(251): Homolog of NCBI NO: 30693154 NR Description: expressed protein [Arabidopsis thaliana]
  misc_feature (22)..(252): Homolog of NCBI NO: 22330031 NR Description: expressed protein [Arabidopsis thaliana]
SLLSSQQNFALACEKRRSSDHMEEEQVRAIKIIVFGVISWGVAFILTRRIFSSYSFSFSNRLLSTAHATIAVTLATLSVQDLSCPVCPLASKPSHKQMDVMAFSLSYMIYDLICCHFDQVFSIDNAVHHFVSILGFIAGLAYQKSGSEIVATLWVAEISSPFFHLREILKEIGYKDTKLNLAADVCFATIFTLARIVCGPFLVYVSLSADNPIFIKAMGSGLQLVSIFWFYKIFGMMRYKLFKKPKSNKKST

SEQ ID NO: 34728 - protein, 231 aa, Arabidopsis thaliana
  peptide (1)..(231): Ceres Seq. ID no. 13504390
  misc_feature (34)..(225): Homolog of NCBI NO: 27661880 NR Description: hypothetical protein XP_236191 [Rattus norvegicus]
  misc_feature (12)..(223): Homolog of NCBI NO: 34535216 NR Description: unnamed protein product [Homo sapiens]
  misc_feature (120)..(164): Homolog of NCBI NO: 25405881 NR Description: protein F27F5.9 [imported] - Arabidopsis thaliana
  misc_feature (1)..(76): Homolog of NCBI NO: 25405881 NR Description: protein F27F5.9 [imported] - Arabidopsis thaliana
  misc_feature (12)..(228): Homolog of NCBI NO: 34903030 NR Description: unnamed protein product [Oryza sativa (japonica
  misc_feature (1)..(171): Homolog of NCBI NO: 25518603 NR Description: hypothetical protein T32G9.28 - Arabidopsis
  misc_feature (1)..(195): Homolog of NCBI NO: 15219511 NR Description: hypothetical protein [Arabidopsis thaliana]
  misc_feature (1)..(230): Homolog of NCBI NO: 30693154 NR Description: expressed protein [Arabidopsis thaliana]
  misc_feature (1)..(231): Homolog of NCBI NO: 22330031 NR Description: expressed protein [Arabidopsis thaliana]
  misc_feature (34)..(225): Homolog of NCBI NO: 27661880 NR Description: hypothetical protein XP_236191 [Rattus norvegicus]
  misc_feature (12)..(223): Homolog of NCBI NO: 34535216 NR Description: unnamed protein product [Homo sapiens]
  misc_feature (120)..(164): Homolog of NCBI NO: 25405881 NR Description: protein F27F5.9 [imported] - Arabidopsis thaliana
  misc_feature (1)..(76): Homolog of NCBI NO: 25405881 NR Description: protein F27F5.9 [imported] - Arabidopsis thaliana
  misc_feature (12)..(228): Homolog of NCBI NO: 34903030 NR Description: unnamed protein product [Oryza sativa (japonica
  misc_feature (1)..(171): Homolog of NCBI NO: 25518603 NR Description: hypothetical protein T32G9.28 - Arabidopsis
  misc_feature (1)..(195): Homolog of NCBI NO: 15219511 NR Description: hypothetical protein [Arabidopsis thaliana]
  misc_feature (1)..(230): Homolog of NCBI NO: 30693154 NR Description: expressed protein [Arabidopsis thaliana]
  misc_feature (1)..(231): Homolog of NCBI NO: 22330031 NR Description: expressed protein [Arabidopsis thaliana]
MEEEQVRAIKIIVFGVISWGVAFILTRRIFSSYSFSFSNRLLSTAHATIAVTLATLSVQDLSCPVCPLASKPSHKQMDVMAFSLSYMIYDLICCHFDQVFSIDNAVHHFVSILGFIAGLAYQKSGSEIVATLWVAEISSPFFHLREILKEIGYKDTKLNLAADVCFATIFTLARIVCGPFLVYVSLSADNPIFIKAMGSGLQLVSIFWFYKIFGMMRYKLFKKPKSNKKST

SEQ ID NO: 34729 - protein, 155 aa, Arabidopsis thaliana
  peptide (1)..(155): Ceres Seq. ID no. 13504391
  misc_feature (1)..(149): Homolog of NCBI NO: 27661880 NR Description: hypothetical protein XP_236191 [Rattus norvegicus]
  misc_feature (1)..(147): Homolog of NCBI NO: 34535216 NR Description: unnamed protein product [Homo sapiens]
  misc_feature (44)..(88): Homolog of NCBI NO: 25405881 NR Description: protein F27F5.9 [imported] - Arabidopsis thaliana
  misc_feature (1)..(152): Homolog of NCBI NO: 34903030 NR Description: unnamed protein product [Oryza sativa (japonica
  misc_feature (1)..(95): Homolog of NCBI NO: 25518603 NR Description: hypothetical protein T32G9.28 - Arabidopsis
  misc_feature (1)..(119): Homolog of NCBI NO: 15219511 NR Description: hypothetical protein [Arabidopsis thaliana]
  misc_feature (1)..(154): Homolog of NCBI NO: 30693154 NR Description: expressed protein [Arabidopsis thaliana]
  misc_feature (1)..(155): Homolog of NCBI NO: 22330031 NR Description: expressed protein [Arabidopsis thaliana]
  misc_feature (1)..(149): Homolog of NCBI NO: 27661880 NR Description: hypothetical protein XP_236191 [Rattus norvegicus]
  misc_feature (1)..(147): Homolog of NCBI NO: 34535216 NR Description: unnamed protein product [Homo sapiens]
  misc_feature (44)..(88): Homolog of NCBI NO: 25405881 NR Description: protein F27F5.9 [imported] - Arabidopsis thaliana
  misc_feature (1)..(152): Homolog of NCBI NO: 34903030 NR Description: unnamed protein product [Oryza sativa (japonica
  misc_feature (1)..(95): Homolog of NCBI NO: 25518603 NR Description: hypothetical protein T32G9.28 - Arabidopsis
  misc_feature (1)..(119): Homolog of NCBI NO: 15219511 NR Description: hypothetical protein [Arabidopsis thaliana]
  misc_feature (1)..(154): Homolog of NCBI NO: 30693154 NR Description: expressed protein [Arabidopsis thaliana]
  misc_feature (1)..(155): Homolog of NCBI NO: 22330031 NR Description: expressed protein [Arabidopsis thaliana]
MDVMAFSLSYMIYDLICCHFDQVFSIDNAVHHFVSILGFIAGLAYQKSGSEIVATLWVAEISSPFFHLREILKEIGYKDTKLNLAADVCFATIFTLARIVCGPFLVYVSLSADNPIFIKAMGSGLQLVSIFWFYKIFGMMRYKLFKKPKSNKKST

SEQ ID NO: 34730 - DNA, 1417 bp, Arabidopsis thaliana
  misc_feature (1)..(1417): Ceres Seq. ID no. 12396117
  misc_feature: MA Experiment ID: 108434 Result: Down-regulated in Transcription
  misc_feature: MA Experiment 108434 PARAMETER Experiment Name: At_Root_Tips_cDNA_P Parameter: Tissue Value: Root Tips
  misc_feature: MA Experiment ID: 108461 Result: Up-regulated in Transcription
  misc_feature: MA Experiment 108461 PARAMETER Experiment Name: At_Germinating_Seeds_cDNA_P Parameter: Age (day) Value: 1 vs. 0
  misc_feature: MA Experiment 108461 PARAMETER Experiment Name: At_Germinating_Seeds_cDNA_P Parameter: Tissue Value: Germinating Seeds
  misc_feature: MA Experiment ID: 108462 Result: Up-regulated in Transcription
  misc_feature: MA Experiment 108462 PARAMETER Experiment Name: At_Germinating_Seeds_cDNA_P Parameter: Age (day) Value: 2 vs. 0
  misc_feature: MA Experiment 108462 PARAMETER Experiment Name: At_Germinating_Seeds_cDNA_P Parameter: Tissue Value: Germinating Seeds
  misc_feature: MA Experiment ID: 108463 Result: Up-regulated in Transcription
  misc_feature: MA Experiment 108463 PARAMETER Experiment Name: At_Germinating_Seeds_cDNA_P Parameter: Age (day) Value: 3 vs. 0
  misc_feature: MA Experiment 108463 PARAMETER Experiment Name: At_Germinating_Seeds_cDNA_P Parameter: Tissue Value: Germinating Seeds
  misc_feature: MA Experiment ID: 108464 Result: Up-regulated in Transcription
  misc_feature: MA Experiment 108464 PARAMETER Experiment Name: At_Germinating_Seeds_cDNA_P Parameter: Age (day) Value: 4 vs. 0
  misc_feature: MA Experiment 108464 PARAMETER Experiment Name: At_Germinating_Seeds_cDNA_P Parameter: Tissue Value: Germinating Seeds
  misc_feature: MA Experiment ID: 108488 Result: Down-regulated in Transcription
  misc_feature: MA Experiment ID: 108489 Result: Up-regulated in Transcription
  misc_feature: MA Experiment ID: 108573 Result: Up-regulated in Transcription
  misc_feature: MA Experiment 108573 PARAMETER Experiment Name: At_Drought_cDNA_P Parameter: Timepoint (hr) Value: 6
  misc_feature: MA Experiment 108573 PARAMETER Experiment Name: At_Drought_cDNA_P Parameter: Tissue Value: Aerial
  misc_feature: MA Experiment 108573 PARAMETER Experiment Name: At_Drought_cDNA_P Parameter: Treatment Value: Drought vs. No Drought
  misc_feature: MA Experiment ID: 108574 Result: Up-regulated in Transcription
  misc_feature: MA Experiment 108574 PARAMETER Experiment Name: At_Wounding__cDNA_P Parameter: Timepoint (hr) Value: 1
  misc_feature: MA Experiment 108574 PARAMETER Experiment Name: At_Wounding__cDNA_P Parameter: Tissue Value: Aerial
  misc_feature: MA Experiment 108574 PARAMETER Experiment Name: At_Wounding__cDNA_P Parameter: Treatment Value: Wounding vs. No Wounding
  misc_feature: MA Experiment ID: 108577 Result: Down-regulated in Transcription
  misc_feature: MA Experiment 108577 PARAMETER Experiment Name: At_42deg_Heat_cDNA_P Parameter: Temperature (deg C) Value: 42 vs. 22
  misc_feature: MA Experiment 108577 PARAMETER Experiment Name: At_42deg_Heat_cDNA_P Parameter: Timepoint (hr) Value: 6
  misc_feature: MA Experiment 108577 PARAMETER Experiment Name: At_42deg_Heat_cDNA_P Parameter: Tissue Value: Aerial
  misc_feature: MA Experiment ID: 108579 Result: Up-regulated in Transcription
  misc_feature: MA Experiment 108579 PARAMETER Experiment Name: At_4deg_Cold_cDNA_P Parameter: Temperature (deg C) Value: 4 vs. 22
  misc_feature: MA Experiment 108579 PARAMETER Experiment Name: At_4deg_Cold_cDNA_P Parameter: Timepoint (hr) Value: 6
  misc_feature: MA Experiment 108579 PARAMETER Experiment Name: At_4deg_Cold_cDNA_P Parameter: Tissue Value: Aerial
  misc_feature: MA Experiment ID: 108585 Result: Up-regulated in Transcription
  misc_feature: MA Experiment 108585 PARAMETER Experiment Name: At_5mM_NaNP_cDNA_P Parameter: Timepoint (hr) Value: 6
  misc_feature: MA Experiment 108585 PARAMETER Experiment Name: At_5mM_NaNP_cDNA_P Parameter: Tissue Value: Aerial
  misc_feature: MA Experiment 108585 PARAMETER Experiment Name: At_5mM_NaNP_cDNA_P Parameter: Treatment Value: null
  misc_feature: MA Experiment ID: 108595 Result: Up-regulated in Transcription
  misc_feature: MA Experiment 108595 PARAMETER Experiment Name: At_Ler-pi_Ovule_cDNA_P Parameter: Plant Line Value: null
  misc_feature: MA Experiment ID: 108605 Result: Up-regulated in Transcription
  misc_feature: MA Experiment 108605 PARAMETER Experiment Name: At_100uM_ABA_cDNA_P Parameter: Timepoint (hr) Value: 6
  misc_feature: MA Experiment 108605 PARAMETER Experiment Name: At_100uM_ABA_cDNA_P Parameter: Tissue Value: Aerial
  misc_feature: MA Experiment 108605 PARAMETER Experiment Name: At_100uM_ABA_cDNA_P Parameter: Treatment Value: 100uM ABA vs. No Treatment
  misc_feature: MA Experiment ID: 108607 Result: Up-regulated in Transcription
  misc_feature: MA Experiment 108607 PARAMETER Experiment Name: At_100uM_ABA_cDNA_P Parameter: Timepoint (hr) Value: 4
  misc_feature: MA Experiment 108607 PARAMETER Experiment Name: At_100uM_ABA_cDNA_P Parameter: Tissue Value: Aerial
  misc_feature: MA Experiment 108607 PARAMETER Experiment Name: At_100uM_ABA_cDNA_P Parameter: Treatment Value: 100uM ABA vs. No Treatment
  misc_feature: MA Experiment ID: 108608 Result: Up-regulated in Transcription
  misc_feature: MA Experiment 108608 PARAMETER Experiment Name: At_100uM_ABA_cDNA_P Parameter: Timepoint (hr) Value: 1
  misc_feature: MA Experiment 108608 PARAMETER Experiment Name: At_100uM_ABA_cDNA_P Parameter: Tissue Value: Aerial
  misc_feature: MA Experiment 108608 PARAMETER Experiment Name: At_100uM_ABA_cDNA_P Parameter: Treatment Value: 100uM ABA vs. No Treatment
  misc_feature: MA Experiment ID: 108609 Result: Up-regulated in Transcription
  misc_feature: MA Experiment 108609 PARAMETER Experiment Name: At_100uM_ABA_cDNA_P Parameter: Timepoint (hr) Value: 24
  misc_feature: MA Experiment 108609 PARAMETER Experiment Name: At_100uM_ABA_cDNA_P Parameter: Tissue Value: Aerial
  misc_feature: MA Experiment 108609 PARAMETER Experiment Name: At_100uM_ABA_cDNA_P Parameter: Treatment Value: 100uM ABA vs. No Treatment
  misc_feature: MA Experiment ID: 108667 Result: Up-regulated in Transcription
  misc_feature: MA Experiment 108667 PARAMETER Experiment Name: At_2mM_SA_cDNA_P Parameter: Plant Line Value: WS
  misc_feature: MA Experiment 108667 PARAMETER Experiment Name: At_2mM_SA_cDNA_P Parameter: Timepoint (hr) Value: 1
  misc_feature: MA Experiment 108667 PARAMETER Experiment Name: At_2mM_SA_cDNA_P Parameter: Treatment Value: 2mM SA vs. No Treatment
  misc_feature: MA Experiment ID: 20000069 Result: Up-regulated in Transcription
  misc_feature: MA Experiment 20000069 PARAMETER Experiment Name: At_100uM_ABA_Mutants_cDNA_P Parameter: Plant Line Value: CS23
  misc_feature: MA Experiment 20000069 PARAMETER Experiment Name: At_100uM_ABA_Mutants_cDNA_P Parameter: Timepoint (hr) Value: 6
  misc_feature: MA Experiment 20000069 PARAMETER Experiment Name: At_100uM_ABA_Mutants_cDNA_P Parameter: Tissue Value: Aerial
  misc_feature: MA Experiment 20000069 PARAMETER Experiment Name: At_100uM_ABA_Mutants_cDNA_P Parameter: Treatment Value: 100uM ABA vs. No Treatment
  misc_feature: MA Experiment ID: 20000070 Result: Up-regulated in Transcription
  misc_feature: MA Experiment 20000070 PARAMETER Experiment Name: At_100uM_ABA_Mutants_cDNA_P Parameter: Plant Line Value: CS24
  misc_feature: MA Experiment 20000070 PARAMETER Experiment Name: At_100uM_ABA_Mutants_cDNA_P Parameter: Timepoint (hr) Value: 6
  misc_feature: MA Experiment 20000070 PARAMETER Experiment Name: At_100uM_ABA_Mutants_cDNA_P Parameter: Tissue Value: Aerial
  misc_feature: MA Experiment 20000070 PARAMETER Experiment Name: At_100uM_ABA_Mutants_cDNA_P Parameter: Treatment Value: 100uM ABA vs. No Treatment
  misc_feature: MA Experiment ID: 20000071 Result: Up-regulated in Transcription
  misc_feature: MA Experiment 20000071 PARAMETER Experiment Name: At_100uM_ABA_Mutants_cDNA_P Parameter: Plant Line Value: CS8104
  misc_feature: MA Experiment 20000071 PARAMETER Experiment Name: At_100uM_ABA_Mutants_cDNA_P Parameter: Timepoint (hr) Value: 6
  misc_feature: MA Experiment 20000071 PARAMETER Experiment Name: At_100uM_ABA_Mutants_cDNA_P Parameter: Tissue Value: Aerial
  misc_feature: MA Experiment 20000071 PARAMETER Experiment Name: At_100uM_ABA_Mutants_cDNA_P Parameter: Treatment Value: 100uM ABA vs. No Treatment
  misc_feature: MA Experiment ID: 20000072 Result: Up-regulated in Transcription
  misc_feature: MA Experiment 20000072 PARAMETER Experiment Name: At_100uM_ABA_Mutants_cDNA_P Parameter: Plant Line Value: CS8105
  misc_feature: MA Experiment 20000072 PARAMETER Experiment Name: At_100uM_ABA_Mutants_cDNA_P Parameter: Timepoint (hr) Value: 6
  misc_feature: MA Experiment 20000072 PARAMETER Experiment Name: At_100uM_ABA_Mutants_cDNA_P Parameter: Tissue Value: Aerial
  misc_feature: MA Experiment 20000072 PARAMETER Experiment Name: At_100uM_ABA_Mutants_cDNA_P Parameter: Treatment Value: 100uM ABA vs. No Treatment
  misc_feature: MA Experiment ID: 20000086 Result: Up-regulated in Transcription
  misc_feature: MA Experiment 20000086 PARAMETER Experiment Name: At_100uM_ABA_Mutants_cDNA_P Parameter: Plant Line Value: CS22
  misc_feature: MA Experiment 20000086 PARAMETER Experiment Name: At_100uM_ABA_Mutants_cDNA_P Parameter: Timepoint (hr) Value: 6
  misc_feature: MA Experiment 20000086 PARAMETER Experiment Name: At_100uM_ABA_Mutants_cDNA_P Parameter: Tissue Value: Aerial
  misc_feature: MA Experiment 20000086 PARAMETER Experiment Name: At_100uM_ABA_Mutants_cDNA_P Parameter: Treatment Value: 100uM ABA vs. No Treatment
  misc_feature: MA Experiment ID: 20000087 Result: Up-regulated in Transcription
  misc_feature: MA Experiment 20000087 PARAMETER Experiment Name: At_100uM_ABA_Mutants_cDNA_P Parameter: Plant Line Value: WS
  misc_feature: MA Experiment 20000087 PARAMETER Experiment Name: At_100uM_ABA_Mutants_cDNA_P Parameter: Timepoint (hr) Value: 6
  misc_feature: MA Experiment 20000087 PARAMETER Experiment Name: At_100uM_ABA_Mutants_cDNA_P Parameter: Tissue Value: Aerial
  misc_feature: MA Experiment 20000087 PARAMETER Experiment Name: At_100uM_ABA_Mutants_cDNA_P Parameter: Treatment Value: 100uM ABA vs. No Treatment
  misc_feature: MA Experiment ID: 20000088 Result: Up-regulated in Transcription
  misc_feature: MA Experiment 20000088 PARAMETER Experiment Name: At_100uM_ABA_Mutants_cDNA_P Parameter: Plant Line Value: Landsberg
  misc_feature: MA Experiment 20000088 PARAMETER Experiment Name: At_100uM_ABA_Mutants_cDNA_P Parameter: Timepoint (hr) Value: 6
  misc_feature: MA Experiment 20000088 PARAMETER Experiment Name: At_100uM_ABA_Mutants_cDNA_P Parameter: Tissue Value: Aerial
  misc_feature: MA Experiment 20000088 PARAMETER Experiment Name: At_100uM_ABA_Mutants_cDNA_P Parameter: Treatment Value: 100uM ABA vs. No Treatment
  misc_feature: MA Experiment ID: 20000090 Result: Up-regulated in Transcription
  misc_feature: MA Experiment ID: 20000111 Result: Down-regulated in Transcription
  misc_feature: MA Experiment 20000111 PARAMETER Experiment Name: At_42deg_Heat_cDNA_P Parameter: Temperature (deg C) Value: 42 vs. 22
  misc_feature: MA Experiment 20000111 PARAMETER Experiment Name: At_42deg_Heat_cDNA_P Parameter: Timepoint (hr) Value: 6
  misc_feature: MA Experiment 20000111 PARAMETER Experiment Name: At_42deg_Heat_cDNA_P Parameter: Tissue Value: Aerial
  misc_feature: MA Experiment ID: 20000113 Result: Down-regulated in Transcription
  misc_feature: MA Experiment 20000113 PARAMETER Experiment Name: At_42deg_Heat_cDNA_P Parameter: Temperature (deg C) Value: 42 vs. 22
  misc_feature: MA Experiment 20000113 PARAMETER Experiment Name: At_42deg_Heat_cDNA_P Parameter: Timepoint (hr) Value: 8
  misc_feature: MA Experiment 20000113 PARAMETER Experiment Name: At_42deg_Heat_cDNA_P Parameter: Tissue Value: Aerial
  misc_feature: MA Experiment ID: 20000117 Result: Up-regulated in Transcription
  misc_feature: MA Experiment 20000117 PARAMETER Experiment Name: At_100uM_ABA_Mutants_cDNA_P Parameter: Plant Line Value: Columbia
  misc_feature: MA Experiment 20000117 PARAMETER Experiment Name: At_100uM_ABA_Mutants_cDNA_P Parameter: Timepoint (hr) Value: 6
  misc_feature: MA Experiment 20000117 PARAMETER Experiment Name: At_100uM_ABA_Mutants_cDNA_P Parameter: Tissue Value: Aerial
  misc_feature: MA Experiment 20000117 PARAMETER Experiment Name: At_100uM_ABA_Mutants_cDNA_P Parameter: Treatment Value: 100uM ABA vs. No Treatment
  misc_feature: MA Experiment ID: 20000166 Result: Up-regulated in Transcription
  misc_feature: MA Experiment 20000166 PARAMETER Experiment Name: At_100uM_ABA_P Parameter: Age (day) Value: 14
  misc_feature: MA Experiment 20000166 PARAMETER Experiment Name: At_100uM_ABA_P Parameter: Organism Value: A. thaliana
  misc_feature: MA Experiment 20000166 PARAMETER Experiment Name: At_100uM_ABA_P Parameter: Plant Line Value: WS
  misc_feature: MA Experiment 20000166 PARAMETER Experiment Name: At_100uM_ABA_P Parameter: Timepoint (hr) Value: 1
  misc_feature: MA Experiment 20000166 PARAMETER Experiment Name: At_100uM_ABA_P Parameter: Tissue Value: Aerial
  misc_feature: MA Experiment 20000166 PARAMETER Experiment Name: At_100uM_ABA_P Parameter: Treatment Value: 100uM ABA vs. No Treatment
  misc_feature: MA Experiment ID: 20000169 Result: Up-regulated in Transcription
  misc_feature: MA Experiment 20000169 PARAMETER Experiment Name: At_100uM_ABA_P Parameter: Age (day) Value: 14
  misc_feature: MA Experiment 20000169 PARAMETER Experiment Name: At_100uM_ABA_P Parameter: Organism Value: A. thaliana
  misc_feature: MA Experiment 20000169 PARAMETER Experiment Name: At_100uM_ABA_P Parameter: Plant Line Value: WS
  misc_feature: MA Experiment 20000169 PARAMETER Experiment Name: At_100uM_ABA_P Parameter: Timepoint (hr) Value: 6
  misc_feature: MA Experiment 20000169 PARAMETER Experiment Name: At_100uM_ABA_P Parameter: Tissue Value: Aerial
  misc_feature: MA Experiment 20000169 PARAMETER Experiment Name: At_100uM_ABA_P Parameter: Treatment Value: 100uM ABA vs. No Treatment
  misc_feature: MA Experiment ID: 20000171 Result: Down-regulated in Transcription
  misc_feature: MA Experiment 20000171 PARAMETER Experiment Name: At_42deg_Heat_P Parameter: Age (day) Value: 14
  misc_feature: MA Experiment 20000171 PARAMETER Experiment Name: At_42deg_Heat_P Parameter: Organism Value: A. thaliana
  misc_feature: MA Experiment 20000171 PARAMETER Experiment Name: At_42deg_Heat_P Parameter: Plant Line Value: WS
  misc_feature: MA Experiment 20000171 PARAMETER Experiment Name: At_42deg_Heat_P Parameter: Temperature (deg C) Value: 42 vs. 22
  misc_feature: MA Experiment 20000171 PARAMETER Experiment Name: At_42deg_Heat_P Parameter: Timepoint (hr) Value: 1
  misc_feature: MA Experiment 20000171 PARAMETER Experiment Name: At_42deg_Heat_P Parameter: Tissue Value: Aerial
  misc_feature: MA Experiment ID: 20000173 Result: Down-regulated in Transcription
  misc_feature: MA Experiment 20000173 PARAMETER Experiment Name: At_42deg_Heat_P Parameter: Age (day) Value: 14
  misc_feature: MA Experiment 20000173 PARAMETER Experiment Name: At_42deg_Heat_P Parameter: Organism Value: A. thaliana
  misc_feature: MA Experiment 20000173 PARAMETER Experiment Name: At_42deg_Heat_P Parameter: Plant Line Value: WS
  misc_feature: MA Experiment 20000173 PARAMETER Experiment Name: At_42deg_Heat_P Parameter: Temperature (deg C) Value: 42 vs. 22
  misc_feature: MA Experiment 20000173 PARAMETER Experiment Name: At_42deg_Heat_P Parameter: Timepoint (hr) Value: 6
  misc_feature: MA Experiment 20000173 PARAMETER Experiment Name: At_42deg_Heat_P Parameter: Tissue Value: Aerial
  misc_feature: MA Experiment ID: 20000182 Result: Up-regulated in Transcription
  misc_feature: MA Experiment 20000182 PARAMETER Experiment Name: At_2mM_SA_P Parameter: Age (day) Value: 14
  misc_feature: MA Experiment 20000182 PARAMETER Experiment Name: At_2mM_SA_P Parameter: Organism Value: A. thaliana
  misc_feature: MA Experiment 20000182 PARAMETER Experiment Name: At_2mM_SA_P Parameter: Plant Line Value: WS
  misc_feature: MA Experiment 20000182 PARAMETER Experiment Name: At_2mM_SA_P Parameter: Timepoint (hr) Value: 6
  misc_feature: MA Experiment 20000182 PARAMETER Experiment Name: At_2mM_SA_P Parameter: Tissue Value: Aerial
  misc_feature: MA Experiment 20000182 PARAMETER Experiment Name: At_2mM_SA_P Parameter: Treatment Value: 2mM SA vs. No Treatment
  misc_feature: MA Experiment ID: 20000184 Result: Down-regulated in Transcription
  misc_feature: MA Experiment 20000184 PARAMETER Experiment Name: At_Shoots__P Parameter: Age (day) Value: 7
  misc_feature: MA Experiment 20000184 PARAMETER Experiment Name: At_Shoots__P Parameter: Tissue Value: Shoots vs. Whole Plant
  misc_feature: MA Experiment ID: 20000185 Result: Down-regulated in Transcription
  misc_feature: MA Experiment 20000185 PARAMETER Experiment Name: At_Roots__P Parameter: Age (day) Value: 7 vs. 21
  misc_feature: MA Experiment 20000185 PARAMETER Experiment Name: At_Roots__P Parameter: Organism Value: A. thaliana
  misc_feature: MA Experiment 20000185 PARAMETER Experiment Name: At_Roots__P Parameter: Tissue Value: Roots vs. Whole Plant
  misc_feature: MA Experiment ID: 20000234 Result: Down-regulated in Transcription
  misc_feature: MA Experiment 20000234 PARAMETER Experiment Name: At_Siliques_P Parameter: Age (day) Value: 21
  misc_feature: MA Experiment 20000234 PARAMETER Experiment Name: At_Siliques_P Parameter: Organism Value: A. thaliana
  misc_feature: MA Experiment 20000234 PARAMETER Experiment Name: At_Siliques_P Parameter: Plant Line Value: WS
  misc_feature: MA Experiment 20000234 PARAMETER Experiment Name: At_Siliques_P Parameter: Tissue Value: Less Than 5mm Siliques vs. Whole Plant
  misc_feature: MA Experiment ID: 20000235 Result: Down-regulated in Transcription
  misc_feature: MA Experiment 20000235 PARAMETER Experiment Name: At_Siliques_P Parameter: Age (day) Value: 21
  misc_feature: MA Experiment 20000235 PARAMETER Experiment Name: At_Siliques_P Parameter: Organism Value: A. thaliana
  misc_feature: MA Experiment 20000235 PARAMETER Experiment Name: At_Siliques_P Parameter: Plant Line Value: WS
  misc_feature: MA Experiment 20000235 PARAMETER Experiment Name: At_Siliques_P Parameter: Tissue Value: 5-10mm Siliques vs. Whole Plant
  misc_feature: MA Experiment ID: 20000264 Result: Down-regulated in Transcription
  misc_feature: MA Experiment 20000264 PARAMETER Experiment Name: At_Open_Flower_P Parameter: Age (day) Value: 21
  misc_feature: MA Experiment 20000264 PARAMETER Experiment Name: At_Open_Flower_P Parameter: Plant Line Value: WS
  misc_feature: MA Experiment 20000264 PARAMETER Experiment Name: At_Open_Flower_P Parameter: Tissue Value: Open Flower vs. Whole Plant
  misc_feature: MA Experiment ID: 20000265 Result: Down-regulated in Transcription
  misc_feature: MA Experiment 20000265 PARAMETER Experiment Name: At_Open_Flower_P Parameter: Age (day) Value: 21
  misc_feature: MA Experiment 20000265 PARAMETER Experiment Name: At_Open_Flower_P Parameter: Plant Line Value: WS
  misc_feature: MA Experiment 20000265 PARAMETER Experiment Name: At_Open_Flower_P Parameter: Tissue Value: Closed Flower vs. Whole Plant
  misc_feature: MA Experiment ID: 20000267 Result: Up-regulated in Transcription
  misc_feature: MA Experiment 20000267 PARAMETER Experiment Name: At_Drought_P Parameter: Age (day) Value: 7
  misc_feature: MA Experiment 20000267 PARAMETER Experiment Name: At_Drought_P Parameter: Organism Value: A. thaliana
  misc_feature: MA Experiment 20000267 PARAMETER Experiment Name: At_Drought_P Parameter: Plant Line Value: WS
  misc_feature: MA Experiment 20000267 PARAMETER Experiment Name: At_Drought_P Parameter: Timepoint (hr) Value: 6
  misc_feature: MA Experiment 20000267 PARAMETER Experiment Name: At_Drought_P Parameter: Tissue Value: Whole Plant
  misc_feature: MA Experiment 20000267 PARAMETER Experiment Name: At_Drought_P Parameter: Treatment Value: Drought vs. No Drought
  misc_feature: MA Experiment ID: 20000286 Result: Down-regulated in Transcription
  misc_feature: MA Experiment 20000286 PARAMETER Experiment Name: At_Open_Flower_P Parameter: Age (day) Value: 21
  misc_feature: MA Experiment 20000286 PARAMETER Experiment Name: At_Open_Flower_P Parameter: Plant Line Value: WS
  misc_feature: MA Experiment 20000286 PARAMETER Experiment Name: At_Open_Flower_P Parameter: Tissue Value: Half Open vs. Whole Plant
  misc_feature: MA Experiment ID: 20000437 Result: Up-regulated in Transcription
  misc_feature: MA Experiment 20000437 PARAMETER Experiment Name: At_Drought_P Parameter: Age (day) Value: 8
  misc_feature: MA Experiment 20000437 PARAMETER Experiment Name: At_Drought_P Parameter: Organism Value: A. thaliana
  misc_feature: MA Experiment 20000437 PARAMETER Experiment Name: At_Drought_P Parameter: Plant Line Value: WS
  misc_feature: MA Experiment 20000437 PARAMETER Experiment Name: At_Drought_P Parameter: Timepoint (hr) Value: 24
  misc_feature: MA Experiment 20000437 PARAMETER Experiment Name: At_Drought_P Parameter: Tissue Value: Whole Plant
  misc_feature: MA Experiment 20000437 PARAMETER Experiment Name: At_Drought_P Parameter: Treatment Value: Drought vs. No Drought
  misc_feature: MA Experiment ID: 20000438 Result: Down-regulated in Transcription
  misc_feature: MA Experiment 20000438 PARAMETER Experiment Name: At_Shoots__P Parameter: Age (day) Value: 14
  misc_feature: MA Experiment 20000438 PARAMETER Experiment Name: At_Shoots__P Parameter: Tissue Value: Shoots vs. Whole Plant
  misc_feature: MA Experiment ID: 20000439 Result: Down-regulated in Transcription
  misc_feature: MA Experiment 20000439 PARAMETER Experiment Name: At_Roots__P Parameter: Age (day) Value: 14 vs. 21
  misc_feature: MA Experiment 20000439 PARAMETER Experiment Name: At_Roots__P Parameter: Organism Value: A. thaliana
  misc_feature: MA Experiment 20000439 PARAMETER Experiment Name: At_Roots__P Parameter: Tissue Value: Roots vs. Whole Plant
  misc_feature: MA Experiment ID: 20000453 Result: Up-regulated in Transcription
  misc_feature: MA Experiment 20000453 PARAMETER Experiment Name: At_100uM_ABA_P Parameter: Age (day) Value: 15
  misc_feature: MA Experiment 20000453 PARAMETER Experiment Name: At_100uM_ABA_P Parameter: Organism Value: A. thaliana
  misc_feature: MA Experiment 20000453 PARAMETER Experiment Name: At_100uM_ABA_P Parameter: Plant Line Value: WS
  misc_feature: MA Experiment 20000453 PARAMETER Experiment Name: At_100uM_ABA_P Parameter: Timepoint (hr) Value: 24
  misc_feature: MA Experiment 20000453 PARAMETER Experiment Name: At_100uM_ABA_P Parameter: Tissue Value: Aerial
  misc_feature: MA Experiment 20000453 PARAMETER Experiment Name: At_100uM_ABA_P Parameter: Treatment Value: 100uM ABA vs. No Treatment
  misc_feature: MA Experiment ID: 20000460 Result: Up-regulated in Transcription
  misc_feature: MA Experiment 20000460 PARAMETER Experiment Name: At_10percent_PEG_P Parameter: Age (day) Value: 12
  misc_feature: MA Experiment 20000460 PARAMETER Experiment Name: At_10percent_PEG_P Parameter: Organism Value: A. thaliana
  misc_feature: MA Experiment 20000460 PARAMETER Experiment Name: At_10percent_PEG_P Parameter: Plant Line Value: WS
  misc_feature: MA Experiment 20000460 PARAMETER Experiment Name: At_10percent_PEG_P Parameter: Timepoint (day) Value: 12
  misc_feature: MA Experiment 20000460 PARAMETER Experiment Name: At_10percent_PEG_P Parameter: Tissue Value: Whole Plant
  misc_feature: MA Experiment 20000460 PARAMETER Experiment Name: At_10percent_PEG_P Parameter: Treatment Value: 10percent PEG vs. No Treatment
  misc_feature: MA Experiment ID: 20000495 Result: Down-regulated in Transcription
  misc_feature: MA Experiment 20000495 PARAMETER Experiment Name: At_Guard_Cells_P Parameter: Harvest Date Value: 8/2/2002
  misc_feature: MA Experiment 20000495 PARAMETER Experiment Name: At_Guard_Cells_P Parameter: Organism Value: A. thaliana
  misc_feature: MA Experiment 20000495 PARAMETER Experiment Name: At_Guard_Cells_P Parameter: Tissue Value: Guard Cells vs. Leaves
  misc_feature: MA Experiment ID: 20000573 Result: Down-regulated in Transcription
  misc_feature: MA Experiment 20000573 PARAMETER Experiment Name: At_100uM_ABA_Mutants__P Parameter: Organism Value: A. thaliana
  misc_feature: MA Experiment 20000573 PARAMETER Experiment Name: At_100uM_ABA_Mutants__P Parameter: Plant Line Value: CS22 vs. Ler wt
  misc_feature: MA Experiment 20000573 PARAMETER Experiment Name: At_100uM_ABA_Mutants__P Parameter: Timepoint (hr) Value: N/A
  misc_feature: MA Experiment 20000573 PARAMETER Experiment Name: At_100uM_ABA_Mutants__P Parameter: Tissue Value: Whole Plant
  misc_feature: MA Experiment 20000573 PARAMETER Experiment Name: At_100uM_ABA_Mutants__P Parameter: Treatment Value: None
  misc_feature: MA Experiment ID: 20000574 Result: Down-regulated in Transcription
  misc_feature: MA Experiment 20000574 PARAMETER Experiment Name: At_100uM_ABA_Mutants__P Parameter: Organism Value: A. thaliana
  misc_feature: MA Experiment 20000574 PARAMETER Experiment Name: At_100uM_ABA_Mutants__P Parameter: Plant Line Value: CS23 vs. Ler wt
  misc_feature: MA Experiment 20000574 PARAMETER Experiment Name: At_100uM_ABA_Mutants__P Parameter: Timepoint (hr) Value: N/A
  misc_feature: MA Experiment 20000574 PARAMETER Experiment Name: At_100uM_ABA_Mutants__P Parameter: Tissue Value: Whole Plant
  misc_feature: MA Experiment 20000574 PARAMETER Experiment Name: At_100uM_ABA_Mutants__P Parameter: Treatment Value: None
  misc_feature: MA Experiment ID: 20000794 Result: Down-regulated in Transcription
  misc_feature: MA Experiment 20000794 PARAMETER Experiment Name: At_Petals_P Parameter: Age (day) Value: 23-25 days
  misc_feature: MA Experiment 20000794 PARAMETER Experiment Name: At_Petals_P Parameter: Plant Line Value: WS
  misc_feature: MA Experiment 20000794 PARAMETER Experiment Name: At_Petals_P Parameter: Tissue Value: Petals vs. Whole plant
  misc_feature: MA Experiment ID: 20001557 Result: Up-regulated in Transcription
  misc_feature: MA Experiment 20001557 PARAMETER Experiment Name: At_Drought_Soil_Dry_P Parameter: Age (day) Value: 27
  misc_feature: MA Experiment 20001557 PARAMETER Experiment Name: At_Drought_Soil_Dry_P Parameter: Organism Value: A. thaliana
  misc_feature: MA Experiment 20001557 PARAMETER Experiment Name: At_Drought_Soil_Dry_P Parameter: Plant Line Value: WS
  misc_feature: MA Experiment 20001557 PARAMETER Experiment Name: At_Drought_Soil_Dry_P Parameter: Post Timepoint (hr) Value: 3
  misc_feature: MA Experiment 20001557 PARAMETER Experiment Name: At_Drought_Soil_Dry_P Parameter: Post-Treatment Value: Re-Water vs. No Drought
  misc_feature: MA Experiment 20001557 PARAMETER Experiment Name: At_Drought_Soil_Dry_P Parameter: Timepoint (day) Value: 13
  misc_feature: MA Experiment 20001557 PARAMETER Experiment Name: At_Drought_Soil_Dry_P Parameter: Treatment Value: Drought vs. No Drought
  misc_feature: MA Experiment ID: 20001770 Result: Up-regulated in Transcription
  misc_feature: MA Experiment 20001770 PARAMETER Experiment Name: At_Far-red-enriched-adult_P Parameter: Age (day) Value: 28
  misc_feature: MA Experiment 20001770 PARAMETER Experiment Name: At_Far-red-enriched-adult_P Parameter: Light Value: Far-red enriched vs. White
  misc_feature: MA Experiment 20001770 PARAMETER Experiment Name: At_Far-red-enriched-adult_P Parameter: Organism Value: A. thaliana
  misc_feature: MA Experiment 20001770 PARAMETER Experiment Name: At_Far-red-enriched-adult_P Parameter: Plant Line Value: Columbia
  misc_feature: MA Experiment 20001770 PARAMETER Experiment Name: At_Far-red-enriched-adult_P Parameter: Timepoint (hr) Value: 8
  misc_feature: MA Experiment 20001770 PARAMETER Experiment Name: At_Far-red-enriched-adult_P Parameter: Tissue Value: Aerial
aaatctcaccttctctctccctctctataacaaacattaatacacacaccaaaaaaaaaacctgtttatgtctcaaagatctctgattcctcattcttcttctatagcttttggtctccattctcatctcttaatctccagtgagatcagctccaattctaactggtctctctaaataaaaaacagaaataaaaatccaacctttttcaattttcgttcaattttcccggaaaaaaaagcgatccttttgatttttcgatttctccaagtaacaattcaaaatgggtctaaagggttttgctgaaggaggaatagcttcgattgttgcgggttgttcgacccacccgcttgatctaatcaaggtccgaatgcaacttcaaggcgaatcagctccgattcaaaccaatctccgaccagctcttgcttttcagacttcgaccaccgtcaacgcgcctcctctacgtgttggtgtaatcggagtcggatctcgtttaataagagaagaaggcatgcgtgctctgttttccggcgtctccgccaccgttcttcgtcaaactctgtattcaacgactcgtatgggtttatacgacatcatcaaaggagaatggaccgacccggaaacaaaaacgatgcctttaatgaaaaaaatcggtgccggagccatcgccggagcaatcggagccgccgttgggaatcctgctgacgtggcgatggtgaggatgcaagccgatggtcgtttaccgttgactgatagaagaaactacaaaagcgttttagacgcgatcacgcaaatgattcgcggtgaaggcgttacgtcgttgtggagaggatcgtctttgacgataaacagagcaatgcttgtgacgtcatcgcagttggcttcgtatgattctgttaaagagacgattttggagaaagggttgttgaaagatgggcttgggactcatgtgtcggcgagtttcgcggcggggtttgttgcgagcgttgcgagtaatcctgttgatgtgattaagacgagagtgatgaatatgaaggtggtggctggagttgctccgccgtataaaggagcggttgattgtgctttgaaaacggtgaaagcggaagggattatgtctttgtataaaggttttatcccgacggtttcgagacaagcaccgttcacggtggttttgtttgttacgcttgaacaagttaagaagttgttcaaggactatgacttttgaaaaaaacaagagttgaattatgttgaagaagatgaatgatggtggcgacaataagcttctctttttttctggttataattttcttttgattatttgagtagttttaaattgtttcccatttgttggaatagatctatgatatgataattcttctcatggagaagaaagaaagaaagaaacagttcatttgatcc

SEQ ID NO: 34731 - protein, 313 aa, Arabidopsis thaliana
  peptide (1)..(313): Ceres Seq. ID no. 12396118
  misc_feature (6)..(34): Homolog of NCBI NO: 24657951 NR Description: CG18418-PA [Drosophila melanogaster]
  misc_feature (69)..(311): Homolog of NCBI NO: 24657951 NR Description: CG18418-PA [Drosophila melanogaster]
  misc_feature (9)..(33): Homolog of NCBI NO: 17568881 NR Description: Mitochondrial carrier protein (32.0 kD)
  misc_feature (60)..(308): Homolog of NCBI NO: 17568881 NR Description: Mitochondrial carrier protein (32.0 kD)
  misc_feature (1)..(55): Homolog of NCBI NO: 15242423 NR Description: mitochondrial carrier protein family; protein id:
  misc_feature (67)..(313): Homolog of NCBI NO: 15242423 NR Description: mitochondrial carrier protein family; protein id:
  misc_feature (1)..(311): Homolog of NCBI NO: 15233884 NR Description: mitochondrial carrier protein family
  misc_feature (1)..(313): Homolog of NCBI NO: 21554157 NR Description: putative mitochondrial dicarboxylate carrier
  misc_feature (1)..(313): Homolog of NCBI NO: 13878155 NR Description: putative mitochondrial dicarboxylate carrier
  misc_feature (1)..(313): Homolog of NCBI NO: 15227225 NR Description: mitochondrial carrier protein family
MGLKGFAEGGIASIVAGCSTHPLDLIKVRMQLQGESAPIQTNLRPALAFQTSTTVNAPPLRVGVIGVGSRLIREEGMRALFSGVSATVLRQTLYSTTRMGLYDIIKGEWTDPETKTMPLMKKIGAGAIAGAIGAAVGNPADVAMVRMQADGRLPLTDRRNYKSVLDAITQMIRGEGVTSLWRGSSLTINRAMLVTSSQLASYDSVKETILEKGLLKDGLGTHVSASFAAGFVASVASNPVDVIKTRVMNMKVVAGVAPPYKGAVDCALKTVKAEGIMSLYKGFIPTVSRQAPFTVVLFVTLEQVKKLFKDYDF

SEQ ID NO: 34732 - protein, 284 aa, Arabidopsis thaliana
  peptide (1)..(284): Ceres Seq. ID no. 12396119
  misc_feature (21)..(284): Homolog of NCBI NO: 39586904 NR Description: Hypothetical protein CBG07018 [Caenorhabditis
  misc_feature (40)..(282): Homolog of NCBI NO: 20151395 NR Description: GH11346p [Drosophila melanogaster]
  misc_feature (40)..(282): Homolog of NCBI NO: 24657951 NR Description: CG18418-PA [Drosophila melanogaster]
  misc_feature (31)..(279): Homolog of NCBI NO: 17568881 NR Description: Mitochondrial carrier protein (32.0 kD)
  misc_feature (1)..(26): Homolog of NCBI NO: 15242423 NR Description: mitochondrial carrier protein family; protein id:
  misc_feature (38)..(284): Homolog of NCBI NO: 15242423 NR Description: mitochondrial carrier protein family; protein id:
  misc_feature (1)..(282): Homolog of NCBI NO: 15233884 NR Description: mitochondrial carrier protein family
  misc_feature (1)..(284): Homolog of NCBI NO: 21554157 NR Description: putative mitochondrial dicarboxylate carrier
  misc_feature (1)..(284): Homolog of NCBI NO: 13878155 NR Description: putative mitochondrial dicarboxylate carrier
  misc_feature (1)..(284): Homolog of NCBI NO: 15227225 NR Description: mitochondrial carrier protein family
MQLQGESAPIQTNLRPALAFQTSTTVNAPPLRVGVIGVGSRLIREEGMRALFSGVSATVLRQTLYSTTRMGLYDIIKGEWTDPETKTMPLMKKIGAGAIAGAIGAAVGNPADVAMVRMQADGRLPLTDRRNYKSVLDAITQMIRGEGVTSLWRGSSLTINRAMLVTSSQLASYDSVKETILEKGLLKDGLGTHVSASFAAGFVASVASNPVDVIKTRVMNMKVVAGVAPPYKGAVDCALKTVKAEGIMSLYKGFIPTVSRQAPFTVVLFVTLEQVKKLFKDYDF

SEQ ID NO: 34733 - protein, 237 aa, Arabidopsis thaliana
  peptide (1)..(237): Ceres Seq. ID no. 12396120
  misc_feature (1)..(233): Homolog of NCBI NO: 40739448 NR Description: hypothetical protein AN6254.2 [Aspergillus
  misc_feature (1)..(237): Homolog of NCBI NO: 39586904 NR Description: Hypothetical protein CBG07018 [Caenorhabditis
  misc_feature (1)..(235): Homolog of NCBI NO: 20151395 NR Description: GH11346p [Drosophila melanogaster]
  misc_feature (1)..(235): Homolog of NCBI NO: 24657951 NR Description: CG18418-PA [Drosophila melanogaster]
  misc_feature (1)..(232): Homolog of NCBI NO: 17568881 NR Description: Mitochondrial carrier protein (32.0 kD)
  misc_feature (1)..(237): Homolog of NCBI NO: 15242423 NR Description: mitochondrial carrier protein family; protein id:
  misc_feature (1)..(235): Homolog of NCBI NO: 15233884 NR Description: mitochondrial carrier protein family
  misc_feature (1)..(237): Homolog of NCBI NO: 21554157 NR Description: putative mitochondrial dicarboxylate carrier
  misc_feature (1)..(237): Homolog of NCBI NO: 13878155 NR Description: putative mitochondrial dicarboxylate carrier
  misc_feature (1)..(237): Homolog of NCBI NO: 15227225 NR Description: mitochondrial carrier protein family
MRALFSGVSATVLRQTLYSTTRMGLYDIIKGEWTDPETKTMPLMKKIGAGAIAGAIGAAVGNPADVAMVRMQADGRLPLTDRRNYKSVLDAITQMIRGEGVTSLWRGSSLTINRAMLVTSSQLASYDSVKETILEKGLLKDGLGTHVSASFAAGFVASVASNPVDVIKTRVMNMKVVAGVAPPYKGAVDCALKTVKAEGIMSLYKGFIPTVSRQAPFTVVLFVTLEQVKKLFKDYDF

SEQ ID NO: 34734 - DNA, 1467 bp, Arabidopsis thaliana
  misc_feature (1)..(1467): Ceres Seq. ID no. 12396346
  misc_feature: MA Experiment ID: 108434 Result: Down-regulated in Transcription
  misc_feature: MA Experiment 108434 PARAMETER Experiment Name: At_Root_Tips_cDNA_P Parameter: Tissue Value: Root Tips
  misc_feature: MA Experiment ID: 108462 Result: Up-regulated in Transcription
  misc_feature: MA Experiment 108462 PARAMETER Experiment Name: At_Germinating_Seeds_cDNA_P Parameter: Age (day) Value: 2 vs. 0
  misc_feature: MA Experiment 108462 PARAMETER Experiment Name: At_Germinating_Seeds_cDNA_P Parameter: Tissue Value: Germinating Seeds
  misc_feature: MA Experiment ID: 108463 Result: Up-regulated in Transcription
  misc_feature: MA Experiment 108463 PARAMETER Experiment Name: At_Germinating_Seeds_cDNA_P Parameter: Age (day) Value: 3 vs. 0
  misc_feature: MA Experiment 108463 PARAMETER Experiment Name: At_Germinating_Seeds_cDNA_P Parameter: Tissue Value: Germinating Seeds
  misc_feature: MA Experiment ID: 108464 Result: Up-regulated in Transcription
  misc_feature: MA Experiment 108464 PARAMETER Experiment Name: At_Germinating_Seeds_cDNA_P Parameter: Age (day) Value: 4 vs. 0
  misc_feature: MA Experiment 108464 PARAMETER Experiment Name: At_Germinating_Seeds_cDNA_P Parameter: Tissue Value: Germinating Seeds
  misc_feature: MA Experiment ID: 108488 Result: Down-regulated in Transcription
  misc_feature: MA Experiment ID: 108573 Result: Up-regulated in Transcription
  misc_feature: MA Experiment 108573 PARAMETER Experiment Name: At_Drought_cDNA_P Parameter: Timepoint (hr) Value: 6
  misc_feature: MA Experiment 108573 PARAMETER Experiment Name: At_Drought_cDNA_P Parameter: Tissue Value: Aerial
  misc_feature: MA Experiment 108573 PARAMETER Experiment Name: At_Drought_cDNA_P Parameter: Treatment Value: Drought vs. No Drought
  misc_feature: MA Experiment ID: 108579 Result: Down-regulated in Transcription
  misc_feature: MA Experiment 108579 PARAMETER Experiment Name: At_4deg_Cold_cDNA_P Parameter: Temperature (deg C) Value: 4 vs. 22
  misc_feature: MA Experiment 108579 PARAMETER Experiment Name: At_4deg_Cold_cDNA_P Parameter: Timepoint (hr) Value: 6
  misc_feature: MA Experiment 108579 PARAMETER Experiment Name: At_4deg_Cold_cDNA_P Parameter: Tissue Value: Aerial
  misc_feature: MA Experiment ID: 108595 Result: Down-regulated in Transcription
  misc_feature: MA Experiment 108595 PARAMETER Experiment Name: At_Ler-pi_Ovule_cDNA_P Parameter: Plant Line Value: null
  misc_feature: MA Experiment ID: 20000030 Result: Down-regulated in Transcription
  misc_feature: MA Experiment 20000030 PARAMETER Experiment Name: At_CS6630_Roots_cDNA_P Parameter: Plant Line Value: CS6630 vs. WS
  misc_feature: MA Experiment 20000030 PARAMETER Experiment Name: At_CS6630_Roots_cDNA_P Parameter: Tissue Value: Roots
  misc_feature: MA Experiment ID: 20000071 Result: Up-regulated in Transcription
  misc_feature: MA Experiment 20000071 PARAMETER Experiment Name: At_100uM_ABA_Mutants_cDNA_P Parameter: Plant Line Value: CS8104
  misc_feature: MA Experiment 20000071 PARAMETER Experiment Name: At_100uM_ABA_Mutants_cDNA_P Parameter: Timepoint (hr) Value: 6
  misc_feature: MA Experiment 20000071 PARAMETER Experiment Name: At_100uM_ABA_Mutants_cDNA_P Parameter: Tissue Value: Aerial
  misc_feature: MA Experiment 20000071 PARAMETER Experiment Name: At_100uM_ABA_Mutants_cDNA_P Parameter: Treatment Value: 100uM ABA vs. No Treatment
  misc_feature: MA Experiment ID: 20000180 Result: Up-regulated in Transcription
  misc_feature: MA Experiment 20000180 PARAMETER Experiment Name: At_Germinating_Seeds_P Parameter: Age (hr) Value: 24 vs. 0
  misc_feature: MA Experiment 20000180 PARAMETER Experiment Name: At_Germinating_Seeds_P Parameter: Tissue Value: Germinating Seeds
  misc_feature: MA Experiment ID: 20000437 Result: Up-regulated in Transcription
  misc_feature: MA Experiment 20000437 PARAMETER Experiment Name: At_Drought_P Parameter: Age (day) Value: 8
  misc_feature: MA Experiment 20000437 PARAMETER Experiment Name: At_Drought_P Parameter: Organism Value: A. thaliana
  misc_feature: MA Experiment 20000437 PARAMETER Experiment Name: At_Drought_P Parameter: Plant Line Value: WS
  misc_feature: MA Experiment 20000437 PARAMETER Experiment Name: At_Drought_P Parameter: Timepoint (hr) Value: 24
  misc_feature: MA Experiment 20000437 PARAMETER Experiment Name: At_Drought_P Parameter: Tissue Value: Whole Plant
  misc_feature: MA Experiment 20000437 PARAMETER Experiment Name: At_Drought_P Parameter: Treatment Value: Drought vs. No Drought
  misc_feature: MA Experiment ID: 20000794 Result: Up-regulated in Transcription
  misc_feature: MA Experiment 20000794 PARAMETER Experiment Name: At_Petals_P Parameter: Age (day) Value: 23-25 days
  misc_feature: MA Experiment 20000794 PARAMETER Experiment Name: At_Petals_P Parameter: Plant Line Value: WS
  misc_feature: MA Experiment 20000794 PARAMETER Experiment Name: At_Petals_P Parameter: Tissue Value: Petals vs. Whole plant
  misc_feature: MA Experiment ID: 20001247 Result: Up-regulated in Transcription
  misc_feature: MA Experiment 20001247 PARAMETER Experiment Name: At_Far-red-induction_P Parameter: Age (day) Value: 7
  misc_feature: MA Experiment 20001247 PARAMETER Experiment Name: At_Far-red-induction_P Parameter: Light Value: Far-red vs. White
  misc_feature: MA Experiment 20001247 PARAMETER Experiment Name: At_Far-red-induction_P Parameter: Organism Value: A. thaliana
  misc_feature: MA Experiment 20001247 PARAMETER Experiment Name: At_Far-red-induction_P Parameter: Plant Line Value: Columbia
  misc_feature: MA Experiment 20001247 PARAMETER Experiment Name: At_Far-red-induction_P Parameter: Timepoint (hr) Value: 1
  misc_feature: MA Experiment 20001247 PARAMETER Experiment Name: At_Far-red-induction_P Parameter: Tissue Value: Whole Plant
  misc_feature: MA Experiment ID: 20001757 Result: Down-regulated in Transcription
  misc_feature: MA Experiment 20001757 PARAMETER Experiment Name: At_50mM_NH4NO3_L-to-H_P Parameter: Timepoint (hr) Value: 6
  misc_feature: MA Experiment 20001757 PARAMETER Experiment Name: At_50mM_NH4NO3_L-to-H_P Parameter: Tissue Value: Leaf
  misc_feature: MA Experiment 20001757 PARAMETER Experiment Name: At_50mM_NH4NO3_L-to-H_P Parameter: Treatment Value: 50mM NH4NO3 vs 100mM Mannitol
  misc_feature: MA Experiment ID: 20001904 Result: Up-regulated in Transcription
  misc_feature: MA Experiment 20001904 PARAMETER Experiment Name: At_Drought_Reproduction_P Parameter: Age (day) Value: 37
  misc_feature: MA Experiment 20001904 PARAMETER Experiment Name: At_Drought_Reproduction_P Parameter: Organism Value: A. thaliana
  misc_feature: MA Experiment 20001904 PARAMETER Experiment Name: At_Drought_Reproduction_P Parameter: Plant Line Value: WS
  misc_feature: MA Experiment 20001904 PARAMETER Experiment Name: At_Drought_Reproduction_P Parameter: Timepoint (day) Value: 7
  misc_feature: MA Experiment 20001904 PARAMETER Experiment Name: At_Drought_Reproduction_P Parameter: Tissue Value: Rosettes
  misc_feature: MA Experiment 20001904 PARAMETER Experiment Name: At_Drought_Reproduction_P Parameter: Treatment Value: Drought vs. No Drought
  misc_feature: MA Experiment ID: 20001905 Result: Up-regulated in Transcription
  misc_feature: MA Experiment 20001905 PARAMETER Experiment Name: At_Drought_Reproduction_P Parameter: Age (day) Value: 40
  misc_feature: MA Experiment 20001905 PARAMETER Experiment Name: At_Drought_Reproduction_P Parameter: Organism Value: A. thaliana
  misc_feature: MA Experiment 20001905 PARAMETER Experiment Name: At_Drought_Reproduction_P Parameter: Plant Line Value: WS
  misc_feature: MA Experiment 20001905 PARAMETER Experiment Name: At_Drought_Reproduction_P Parameter: Timepoint (day) Value: 10
  misc_feature: MA Experiment 20001905 PARAMETER Experiment Name: At_Drought_Reproduction_P Parameter: Tissue Value: Rosettes
  misc_feature: MA Experiment 20001905 PARAMETER Experiment Name: At_Drought_Reproduction_P Parameter: Treatment Value: Drought vs. No Drought
  misc_feature: MA Experiment ID: 20001906 Result: Up-regulated in Transcription
  misc_feature: MA Experiment 20001906 PARAMETER Experiment Name: At_Drought_Reproduction_P Parameter: Age (day) Value: 35
  misc_feature: MA Experiment 20001906 PARAMETER Experiment Name: At_Drought_Reproduction_P Parameter: Organism Value: A. thaliana
  misc_feature: MA Experiment 20001906 PARAMETER Experiment Name: At_Drought_Reproduction_P Parameter: Plant Line Value: WS
  misc_feature: MA Experiment 20001906 PARAMETER Experiment Name: At_Drought_Reproduction_P Parameter: Timepoint (day) Value: 5
  misc_feature: MA Experiment 20001906 PARAMETER Experiment Name: At_Drought_Reproduction_P Parameter: Tissue Value: Siliques
  misc_feature: MA Experiment 20001906 PARAMETER Experiment Name: At_Drought_Reproduction_P Parameter: Treatment Value: Drought vs. No Drought
  misc_feature: MA Experiment ID: 20001908 Result: Up-regulated in Transcription
  misc_feature: MA Experiment 20001908 PARAMETER Experiment Name: At_Drought_Reproduction_P Parameter: Age (day) Value: 40
  misc_feature: MA Experiment 20001908 PARAMETER Experiment Name: At_Drought_Reproduction_P Parameter: Organism Value: A. thaliana
  misc_feature: MA Experiment 20001908 PARAMETER Experiment Name: At_Drought_Reproduction_P Parameter: Plant Line Value: WS
  misc_feature: MA Experiment 20001908 PARAMETER Experiment Name: At_Drought_Reproduction_P Parameter: Timepoint (day) Value: 10
  misc_feature: MA Experiment 20001908 PARAMETER Experiment Name: At_Drought_Reproduction_P Parameter: Tissue Value: Siliques
  misc_feature: MA Experiment 20001908 PARAMETER Experiment Name: At_Drought_Reproduction_P Parameter: Treatment Value: Drought vs. No Drought
aaaattcatcgatgacggatcctcccagacccgacccgtttcctgttacccgactcgattccgacgccggtgctctcttcgtcctccaatcaaaaggcgagtggtggcacgccggatttcatctaacgacggcgattgttggtccgacgatattgacattaccatatgcgtttagaggattaggatggtggttagggtttgtttgtttaacgacgatgggactcgttactttctacgcttattacctcatgtctaaggttcttgatcactgtgaaaaatccggccgccgtcacatccgtttccgggaactcgccgccgatgttcttggatctggattgatgttttatgtagtgatctttattcaaacagctatcaacactggaattggtattggcgccattctacttgcaggtcaatgtcttgatataatgtattcgagtcttttcccgcaaggaacgttgaagctttacgagttcattgctatggtgactgttgtgatgatggttctctcacagcttccaagttttcactctcttagacacattaactgtgcgtctctgcttctcagcttaggatatactttcctcgtcgttggggcttgtatcaacctaggtttgtcgaaaaacgctcctaaacgtgagtattctctagagcattcggattcagggaaagtttttagtgccttcacatcaatttcgatcatagctgctattttcggaaatggaatcttacccgaaatacaggcaactcttgctccaccagccacagggaagatgttgaaaggactattgttgtgttatagtgtgatcttcttcacgttttactctgctgcaatttcgggatattgggtttttggtaacaattcgagctctaatatcctcaagaacttaatgcctgatgaaggaccgactctggctcctatcgtggtgattggcttagctgtcatctttgtccttcttcagcttttcgccattggccttgtgtattctcaagttgcgtatgaaataatggagaagaaatcagcggatacaacaaaagggatattctcaaaacgcaaccttgtgccgcgtttgatactaagaacactatatatggcgttttgcgggttcatggcagcgatgctaccgttctttggggatataaacgcggtggtaggagcgtttgggtttatcccactcgatttcgtgctgccaatgcttctatacaacatgacctataagccaaccagacggagcttcacgtattggataaacatgacgataatggttgtgttcacttgtgcaggactcatgggagctttctcctccattaggaaacttgttcttgatgctaataagttcaagttgtttagcagtgaagttgttgattagatggttttgatagtgtgataaaaacataaacaatacttgttttgtggttacacttgtacatgaatttctcgagttgattcattatcacacaaaatgc

SEQ ID NO: 34735 - protein, 455 aa, Arabidopsis thaliana
  peptide (1)..(455): Ceres Seq. ID no. 12396347
  misc_feature (259)..(397): Homolog of NCBI NO: 3021344 NR Description: hypothetical protein [Cicer arietinum]
  misc_feature (123)..(450): Homolog of NCBI NO: 30680565 NR Description: amino acid transporter family [Arabidopsis
  misc_feature (55)..(450): Homolog of NCBI NO: 6579208 NR Description: T23G18.9 [Arabidopsis thaliana]
  misc_feature (21)..(451): Homolog of NCBI NO: 34908432 NR Description: OJ1402_H07.15 [Oryza sativa (japonica
  misc_feature (8)..(109): Homolog of NCBI NO: 34912776 NR Description: P0407B12.25 [Oryza sativa (japonica
  misc_feature (110)..(455): Homolog of NCBI NO: 34912776 NR Description: P0407B12.25 [Oryza sativa (japonica
  misc_feature (4)..(43): Homolog of NCBI NO: 10177364 NR Description: amino acid permease-like protein
  misc_feature (55)..(455): Homolog of NCBI NO: 10177364 NR Description: amino acid permease-like protein
  misc_feature (4)..(455): Homolog of NCBI NO: 21554158 NR Description: amino acid permease-like protein [Arabidopsis
  misc_feature (4)..(455): Homolog of NCBI NO: 18422139 NR Description: amino acid permease-like protein
NSSMTDPPRPDPFPVTRLDSDAGALFVLQSKGEWWHAGFHLTTAIVGPTILTLPYAFRGLGWWLGFVCLTTMGLVTFYAYYLMSKVLDHCEKSGRRHIRFRELAADVLGSGLMFYVVIFIQTAINTGIGIGAILLAGQCLDIMYSSLFPQGTLKLYEFIAMVTVVMMVLSQLPSFHSLRHINCASLLLSLGYTFLVVGACINLGLSKNAPKREYSLEHSDSGKVFSAFTSISIIAAIFGNGILPEIQATLAPPATGKMLKGLLLCYSVIFFTFYSAAISGYWVFGNNSSSNILKNLMPDEGPTLAPIVVIGLAVIFVLLQLFAIGLVYSQVAYEIMEKKSADTTKGIFSKRNLVPRLILRTLYMAFCGFMAAMLPFFGDINAVVGAFGFIPLDFVLPMLLYNMTYKPTRRSFTYWINMTIMVVFTCAGLMGAFSSIRKLVLDANKFKLFSSEVVD

SEQ ID NO: 34736 - protein, 452 aa, Arabidopsis thaliana
  peptide (1)..(452): Ceres Seq. ID no. 12396348
  misc_feature (256)..(394): Homolog of NCBI NO: 3021344 NR Description: hypothetical protein [Cicer arietinum]
  misc_feature (120)..(447): Homolog of NCBI NO: 30680565 NR Description: amino acid transporter family [Arabidopsis
  misc_feature (52)..(447): Homolog of NCBI NO: 6579208 NR Description: T23G18.9 [Arabidopsis thaliana]
  misc_feature (18)..(448): Homolog of NCBI NO: 34908432 NR Description: OJ1402_H07.15 [Oryza sativa (japonica
  misc_feature (5)..(106): Homolog of NCBI NO: 34912776 NR Description: P0407B12.25 [Oryza sativa (japonica
  misc_feature (107)..(452): Homolog of NCBI NO: 34912776 NR Description: P0407B12.25 [Oryza sativa (japonica
  misc_feature (1)..(40): Homolog of NCBI NO: 10177364 NR Description: amino acid permease-like protein
  misc_feature (52)..(452): Homolog of NCBI NO: 10177364 NR Description: amino acid permease-like protein
  misc_feature (1)..(452): Homolog of NCBI NO: 21554158 NR Description: amino acid permease-like protein [Arabidopsis
  misc_feature (1)..(452): Homolog of NCBI NO: 18422139 NR Description: amino acid permease-like protein
MTDPPRPDPFPVTRLDSDAGALFVLQSKGEWWHAGFHLTTAIVGPTILTLPYAFRGLGWWLGFVCLTTMGLVTFYAYYLMSKVLDHCEKSGRRHIRFRELAADVLGSGLMFYVVIFIQTAINTGIGIGAILLAGQCLDIMYSSLFPQGTLKLYEFIAMVTVVMMVLSQLPSFHSLRHINCASLLLSLGYTFLVVGACINLGLSKNAPKREYSLEHSDSGKVFSAFTSISIIAAIFGNGILPEIQATLAPPATGKMLKGLLLCYSVIFFTFYSAAISGYWVFGNNSSSNILKNLMPDEGPTLAPIVVIGLAVIFVLLQLFAIGLVYSQVAYEIMEKKSADTTKGIFSKRNLVPRLILRTLYMAFCGFMAAMLPFFGDINAVVGAFGFIPLDFVLPMLLYNMTYKPTRRSFTYWINMTIMVVFTCAGLMGAFSSIRKLVLDANKFKLFSSEVVD

SEQ ID NO: 34737 - protein, 384 aa, Arabidopsis thaliana
  peptide (1)..(384): Ceres Seq. ID no. 12396349
  misc_feature (1)..(379): Homolog of NCBI NO: 30409136 NR Description: histidine amino acid transporter
  misc_feature (188)..(326): Homolog of NCBI NO: 3021344 NR Description: hypothetical protein [Cicer arietinum]
  misc_feature (52)..(379): Homolog of NCBI NO: 30680565 NR Description: amino acid transporter family [Arabidopsis
  misc_feature (1)..(379): Homolog of NCBI NO: 6579208 NR Description: T23G18.9 [Arabidopsis thaliana]
  misc_feature (1)..(380): Homolog of NCBI NO: 34908432 NR Description: OJ1402_H07.15 [Oryza sativa (japonica
  misc_feature (1)..(38): Homolog of NCBI NO: 34912776 NR Description: P0407B12.25 [Oryza sativa (japonica
  misc_feature (39)..(384): Homolog of NCBI NO: 34912776 NR Description: P0407B12.25 [Oryza sativa (japonica
  misc_feature (1)..(384): Homolog of NCBI NO: 10177364 NR Description: amino acid permease-like protein
  misc_feature (1)..(384): Homolog of NCBI NO: 21554158 NR Description: amino acid permease-like protein [Arabidopsis
  misc_feature (1)..(384): Homolog of NCBI NO: 18422139 NR Description: amino acid permease-like protein
MGLVTFYAYYLMSKVLDHCEKSGRRHIRFRELAADVLGSGLMFYVVIFIQTAINTGIGIGAILLAGQCLDIMYSSLFPQGTLKLYEFIAMVTVVMMVLSQLPSFHSLRHINCASLLLSLGYTFLVVGACINLGLSKNAPKREYSLEHSDSGKVFSAFTSISIIAAIFGNGILPEIQATLAPPATGKMLKGLLLCYSVIFFTFYSAAISGYWVFGNNSSSNILKNLMPDEGPTLAPIVVIGLAVIFVLLQLFAIGLVYSQVAYEIMEKKSADTTKGIFSKRNLVPRLILRTLYMAFCGFMAAMLPFFGDINAVVGAFGFIPLDFVLPMLLYNMTYKPTRRSFTYWINMTIMVVFTCAGLMGAFSSIRKLVLDANKFKLFSSEVVD

SEQ ID NO: 34738 - DNA, 1421 bp, Arabidopsis thaliana
  misc_feature (1)..(1421): Ceres Seq. ID no. 12331119
  misc_feature: MA Experiment ID: 108462 Result: Down-regulated in Transcription
  misc_feature: MA Experiment 108462 PARAMETER Experiment Name: At_Germinating_Seeds_cDNA_P Parameter: Age (day) Value: 2 vs. 0
  misc_feature: MA Experiment 108462 PARAMETER Experiment Name: At_Germinating_Seeds_cDNA_P Parameter: Tissue Value: Germinating Seeds
  misc_feature: MA Experiment ID: 108463 Result: Down-regulated in Transcription
  misc_feature: MA Experiment 108463 PARAMETER Experiment Name: At_Germinating_Seeds_cDNA_P Parameter: Age (day) Value: 3 vs. 0
  misc_feature: MA Experiment 108463 PARAMETER Experiment Name: At_Germinating_Seeds_cDNA_P Parameter: Tissue Value: Germinating Seeds
aaccaatcatctttttttattcccaggagtcgagagatatattcattcataatcagcccccggattctttctctcgatcgccgatgtcgaaaagaatcctttgtaaattctttgctcacggtgcatgcttgaaaggggagcactgtgaattttctcatgactggaaggatcctacaaataatatttgcacctactaccagaaaggaatctgctcttacggaagtcgatgcaggtacgaacatgtcaaagcttccaggcctcatccatctgcttcatcttcgtccgctgtgcctcggccatctcctgcttcagcttccaacactcttgcctgtgcttttcttcctggtgtcgcggaaagagatttgagcccagttccttcttcatctttaaaaccaacgtggaatttggattctcttcaccaggattccgtagacgaggtcaaaacttctaaccctggtacagtcaaacctgaagaactacccatttgctcatttgctgctgctggtgattgcccacgtgggaatgaatgccctcacatccatggaactatttgcccaacttgtgggaaatgttgcttgcatcctttcagacccgacgaaagagaggagcacaagaaagtttgtgaaaaaaagcacaagcaacttgaagcattaaaacttagccaagagatcgagtgttgtgtctgtttggaacgtgtattgtctaaggcaactccagctgaacgcaagttcgggttactcactgaatgtgatcatgctttctgcattgcatgtatcaggaattggcggagcagttctccttccactgggatggatgtcaatagcacactaagggcttgccccatatgccgcaagttatcgtattttgttgttcctagtgtaatctggttttcagctccagaagagaaaaaagaaattatggataactacagggaaaagctcaggtcaatcgattgtaaacactttagttttggagatgggaattgtccattcgggacaagttgcttctacaagcatgcgtatcatgatggtcgtttggaggaagtggttttgcggcatctggatgcagaagatgggcagactgtgatagcaaaggatataaggttgtccgacttccttgagaacatgcacatatgaacagagtctctcttagcacaataagggagaaggcaaagatgttgtgatgacatctttttttctttcttcctggggtgtttcccattcattgtaacgatttgatttgagttggaagattatgtcttagaccccaacgcattatgacttgcgttaagaggggatcattttattaattttgtatttttaacaaatatcactacttcctgcaaatcaacgcacatgagctatacggatgtagtaacgtggggctataatatttatcaaaatcctttggattgcttacct

SEQ ID NO: 34739 - protein, 377 aa, Arabidopsis thaliana
  peptide (1)..(377): Ceres Seq. ID no. 12331120
  misc_feature (225)..(282): Pfam Name: Zinc finger, C3HC4 type (RING finger) Pfam Description: Zinc finger, C3HC4 type (RING finger)
  misc_feature (29)..(347): Homolog of NCBI NO: 22255324 NR Description: gene encoding protein featuring ring-finger
  misc_feature (29)..(84): Homolog of NCBI NO: 17368847 NR Description: Makorin 2 (Zinc-finger protein YGHLC3HC4)
  misc_feature (29)..(84): Homolog of NCBI NO: 14587778 NR Description: zinc finger protein YGHLC3HC4 [Seriola
  misc_feature (149)..(373): Homolog of NCBI NO: 17368847 NR Description: Makorin 2 (Zinc-finger protein YGHLC3HC4)
  misc_feature (149)..(373): Homolog of NCBI NO: 14587778 NR Description: zinc finger protein YGHLC3HC4 [Seriola
  misc_feature (29)..(84): Homolog of NCBI NO: 4972326 NR Description: YGHL2 [Seriola quinqueradiata]
  misc_feature (149)..(373): Homolog of NCBI NO: 4972326 NR Description: YGHL2 [Seriola quinqueradiata]
  misc_feature (29)..(101): Homolog of NCBI NO: 17017225 NR Description: makorin-2 [Gallus gallus]
  misc_feature (129)..(374): Homolog of NCBI NO: 17017225 NR Description: makorin-2 [Gallus gallus]
  misc_feature (61)..(377): Homolog of NCBI NO: 30680549 NR Description: zinc finger domain-containing protein
PIIFFYSQESRDIFIHNQPPDSFSRSPMSKRILCKFFAHGACLKGEHCEFSHDWKDPTNNICTYYQKGICSYGSRCRYEHVKASRPHPSASSSSAVPRPSPASASNTLACAFLPGVAERDLSPVPSSSLKPTWNLDSLHQDSVDEVKTSNPGTVKPEELPICSFAAAGDCPRGNECPHIHGTICPTCGKCCLHPFRPDEREEHKKVCEKKHKQLEALKLSQEIECCVCLERVLSKATPAERKFGLLTECDHAFCIACIRNWRSSSPSTGMDVNSTLRACPICRKLSYFVVPSVIWFSAPEEKKEIMDNYREKLRSIDCKHFSFGDGNCPFGTSCFYKHAYHDGRLEEVVLRHLDAEDGQTVIAKDIRLSDFLENMHI

SEQ ID NO: 34740 - protein, 350 aa, Arabidopsis thaliana
  peptide (1)..(350): Ceres Seq. ID no. 12331121
  misc_feature (198)..(255): Pfam Name: Zinc finger, C3HC4 type (RING finger) Pfam Description: Zinc finger, C3HC4 type (RING finger)
  misc_feature (2)..(320): Homolog of NCBI NO: 22255324 NR Description: gene encoding protein featuring ring-finger
  misc_feature (2)..(57): Homolog of NCBI NO: 17368847 NR Description: Makorin 2 (Zinc-finger protein YGHLC3HC4)
  misc_feature (2)..(57): Homolog of NCBI NO: 14587778 NR Description: zinc finger protein YGHLC3HC4 [Seriola
  misc_feature (122)..(346): Homolog of NCBI NO: 17368847 NR Description: Makorin 2 (Zinc-finger protein YGHLC3HC4)
  misc_feature (122)..(346): Homolog of NCBI NO: 14587778 NR Description: zinc finger protein YGHLC3HC4 [Seriola
  misc_feature (2)..(57): Homolog of NCBI NO: 4972326 NR Description: YGHL2 [Seriola quinqueradiata]
  misc_feature (122)..(346): Homolog of NCBI NO: 4972326 NR Description: YGHL2 [Seriola quinqueradiata]
  misc_feature (2)..(74): Homolog of NCBI NO: 17017225 NR Description: makorin-2 [Gallus gallus]
  misc_feature (102)..(347): Homolog of NCBI NO: 17017225 NR Description: makorin-2 [Gallus gallus]
  misc_feature (34)..(350): Homolog of NCBI NO: 30680549 NR Description: zinc finger domain-containing protein
MSKRILCKFFAHGACLKGEHCEFSHDWKDPTNNICTYYQKGICSYGSRCRYEHVKASRPHPSASSSSAVPRPSPASASNTLACAFLPGVAERDLSPVPSSSLKPTWNLDSLHQDSVDEVKTSNPGTVKPEELPICSFAAAGDCPRGNECPHIHGTICPTCGKCCLHPFRPDEREEHKKVCEKKHKQLEALKLSQEIECCVCLERVLSKATPAERKFGLLTECDHAFCIACIRNWRSSSPSTGMDVNSTLRACPICRKLSYFVVPSVIWFSAPEEKKEIMDNYREKLRSIDCKHFSFGDGNCPFGTSCFYKHAYHDGRLEEVVLRHLDAEDGQTVIAKDIRLSDFLENMHI

SEQ ID NO: 34741 - DNA, 1312 bp, Arabidopsis thaliana
  misc_feature (1)..(1312): Ceres Seq. ID no. 12334457
  misc_feature: MA Experiment ID: 108461 Result: Up-regulated in Transcription
  misc_feature: MA Experiment 108461 PARAMETER Experiment Name: At_Germinating_Seeds_cDNA_P Parameter: Age (day) Value: 1 vs. 0
  misc_feature: MA Experiment 108461 PARAMETER Experiment Name: At_Germinating_Seeds_cDNA_P Parameter: Tissue Value: Germinating Seeds
  misc_feature: MA Experiment ID: 108462 Result: Up-regulated in Transcription
  misc_feature: MA Experiment 108462 PARAMETER Experiment Name: At_Germinating_Seeds_cDNA_P Parameter: Age (day) Value: 2 vs. 0
  misc_feature: MA Experiment 108462 PARAMETER Experiment Name: At_Germinating_Seeds_cDNA_P Parameter: Tissue Value: Germinating Seeds
  misc_feature: MA Experiment ID: 108463 Result: Up-regulated in Transcription
  misc_feature: MA Experiment 108463 PARAMETER Experiment Name: At_Germinating_Seeds_cDNA_P Parameter: Age (day) Value: 3 vs. 0
  misc_feature: MA Experiment 108463 PARAMETER Experiment Name: At_Germinating_Seeds_cDNA_P Parameter: Tissue Value: Germinating Seeds
  misc_feature: MA Experiment ID: 108464 Result: Up-regulated in Transcription
  misc_feature: MA Experiment 108464 PARAMETER Experiment Name: At_Germinating_Seeds_cDNA_P Parameter: Age (day) Value: 4 vs. 0
  misc_feature: MA Experiment 108464 PARAMETER Experiment Name: At_Germinating_Seeds_cDNA_P Parameter: Tissue Value: Germinating Seeds
  misc_feature: MA Experiment ID: 108595 Result: Down-regulated in Transcription
  misc_feature: MA Experiment 108595 PARAMETER Experiment Name: At_Ler-pi_Ovule_cDNA_P Parameter: Plant Line Value: null
  misc_feature: MA Experiment ID: 20000069 Result: Down-regulated in Transcription
  misc_feature: MA Experiment 20000069 PARAMETER Experiment Name: At_100uM_ABA_Mutants_cDNA_P Parameter: Plant Line Value: CS23
  misc_feature: MA Experiment 20000069 PARAMETER Experiment Name: At_100uM_ABA_Mutants_cDNA_P Parameter: Timepoint (hr) Value: 6
  misc_feature: MA Experiment 20000069 PARAMETER Experiment Name: At_100uM_ABA_Mutants_cDNA_P Parameter: Tissue Value: Aerial
  misc_feature: MA Experiment 20000069 PARAMETER Experiment Name: At_100uM_ABA_Mutants_cDNA_P Parameter: Treatment Value: 100uM ABA vs. No Treatment
  misc_feature: MA Experiment ID: 20000070 Result: Down-regulated in Transcription
  misc_feature: MA Experiment 20000070 PARAMETER Experiment Name: At_100uM_ABA_Mutants_cDNA_P Parameter: Plant Line Value: CS24
  misc_feature: MA Experiment 20000070 PARAMETER Experiment Name: At_100uM_ABA_Mutants_cDNA_P Parameter: Timepoint (hr) Value: 6
  misc_feature: MA Experiment 20000070 PARAMETER Experiment Name: At_100uM_ABA_Mutants_cDNA_P Parameter: Tissue Value: Aerial
  misc_feature: MA Experiment 20000070 PARAMETER Experiment Name: At_100uM_ABA_Mutants_cDNA_P Parameter: Treatment Value: 100uM ABA vs. No Treatment
  misc_feature: MA Experiment ID: 20000071 Result: Down-regulated in Transcription
  misc_feature: MA Experiment 20000071 PARAMETER Experiment Name: At_100uM_ABA_Mutants_cDNA_P Parameter: Plant Line Value: CS8104
  misc_feature: MA Experiment 20000071 PARAMETER Experiment Name: At_100uM_ABA_Mutants_cDNA_P Parameter: Timepoint (hr) Value: 6
  misc_feature: MA Experiment 20000071 PARAMETER Experiment Name: At_100uM_ABA_Mutants_cDNA_P Parameter: Tissue Value: Aerial
  misc_feature: MA Experiment 20000071 PARAMETER Experiment Name: At_100uM_ABA_Mutants_cDNA_P Parameter: Treatment Value: 100uM ABA vs. No Treatment
  misc_feature: MA Experiment ID: 20000072 Result: Down-regulated in Transcription
  misc_feature: MA Experiment 20000072 PARAMETER Experiment Name: At_100uM_ABA_Mutants_cDNA_P Parameter: Plant Line Value: CS8105
  misc_feature: MA Experiment 20000072 PARAMETER Experiment Name: At_100uM_ABA_Mutants_cDNA_P Parameter: Timepoint (hr) Value: 6
  misc_feature: MA Experiment 20000072 PARAMETER Experiment Name: At_100uM_ABA_Mutants_cDNA_P Parameter: Tissue Value: Aerial
  misc_feature: MA Experiment 20000072 PARAMETER Experiment Name: At_100uM_ABA_Mutants_cDNA_P Parameter: Treatment Value: 100uM ABA vs. No Treatment
  misc_feature: MA Experiment ID: 20000086 Result: Down-regulated in Transcription
  misc_feature: MA Experiment 20000086 PARAMETER Experiment Name: At_100uM_ABA_Mutants_cDNA_P Parameter: Plant Line Value: CS22
  misc_feature: MA Experiment 20000086 PARAMETER Experiment Name: At_100uM_ABA_Mutants_cDNA_P Parameter: Timepoint (hr) Value: 6
  misc_feature: MA Experiment 20000086 PARAMETER Experiment Name: At_100uM_ABA_Mutants_cDNA_P Parameter: Tissue Value: Aerial
  misc_feature: MA Experiment 20000086 PARAMETER Experiment Name: At_100uM_ABA_Mutants_cDNA_P Parameter: Treatment Value: 100uM ABA vs. No Treatment
  misc_feature: MA Experiment ID: 20000087 Result: Down-regulated in Transcription
  misc_feature: MA Experiment 20000087 PARAMETER Experiment Name: At_100uM_ABA_Mutants_cDNA_P Parameter: Plant Line Value: WS
  misc_feature: MA Experiment 20000087 PARAMETER Experiment Name: At_100uM_ABA_Mutants_cDNA_P Parameter: Timepoint (hr) Value: 6
  misc_feature: MA Experiment 20000087 PARAMETER Experiment Name: At_100uM_ABA_Mutants_cDNA_P Parameter: Tissue Value: Aerial
  misc_feature: MA Experiment 20000087 PARAMETER Experiment Name: At_100uM_ABA_Mutants_cDNA_P Parameter: Treatment Value: 100uM ABA vs. No Treatment
  misc_feature: MA Experiment ID: 20000088 Result: Down-regulated in Transcription
  misc_feature: MA Experiment 20000088 PARAMETER Experiment Name: At_100uM_ABA_Mutants_cDNA_P Parameter: Plant Line Value: Landsberg
  misc_feature: MA Experiment 20000088 PARAMETER Experiment Name: At_100uM_ABA_Mutants_cDNA_P Parameter: Timepoint (hr) Value: 6
  misc_feature: MA Experiment 20000088 PARAMETER Experiment Name: At_100uM_ABA_Mutants_cDNA_P Parameter: Tissue Value: Aerial
  misc_feature: MA Experiment 20000088 PARAMETER Experiment Name: At_100uM_ABA_Mutants_cDNA_P Parameter: Treatment Value: 100uM ABA vs. No Treatment
  misc_feature: MA Experiment ID: 20000089 Result: Down-regulated in Transcription
  misc_feature: MA Experiment ID: 20000090 Result: Down-regulated in Transcription
  misc_feature: MA Experiment ID: 20000117 Result: Down-regulated in Transcription
  misc_feature: MA Experiment 20000117 PARAMETER Experiment Name: At_100uM_ABA_Mutants_cDNA_P Parameter: Plant Line Value: Columbia
  misc_feature: MA Experiment 20000117 PARAMETER Experiment Name: At_100uM_ABA_Mutants_cDNA_P Parameter: Timepoint (hr) Value: 6
  misc_feature: MA Experiment 20000117 PARAMETER Experiment Name: At_100uM_ABA_Mutants_cDNA_P Parameter: Tissue Value: Aerial
  misc_feature: MA Experiment 20000117 PARAMETER Experiment Name: At_100uM_ABA_Mutants_cDNA_P Parameter: Treatment Value: 100uM ABA vs. No Treatment
  misc_feature: MA Experiment ID: 20000234 Result: Up-regulated in Transcription
  misc_feature: MA Experiment 20000234 PARAMETER Experiment Name: At_Siliques_P Parameter: Age (day) Value: 21
  misc_feature: MA Experiment 20000234 PARAMETER Experiment Name: At_Siliques_P Parameter: Organism Value: A. thaliana
  misc_feature: MA Experiment 20000234 PARAMETER Experiment Name: At_Siliques_P Parameter: Plant Line Value: WS
  misc_feature: MA Experiment 20000234 PARAMETER Experiment Name: At_Siliques_P Parameter: Tissue Value: Less Than 5mm Siliques vs. Whole Plant
  misc_feature: MA Experiment ID: 20000264 Result: Up-regulated in Transcription
  misc_feature: MA Experiment 20000264 PARAMETER Experiment Name: At_Open_Flower_P Parameter: Age (day) Value: 21
  misc_feature: MA Experiment 20000264 PARAMETER Experiment Name: At_Open_Flower_P Parameter: Plant Line Value: WS
  misc_feature: MA Experiment 20000264 PARAMETER Experiment Name: At_Open_Flower_P Parameter: Tissue Value: Open Flower vs. Whole Plant
  misc_feature: MA Experiment ID: 20000265 Result: Up-regulated in Transcription
  misc_feature: MA Experiment 20000265 PARAMETER Experiment Name: At_Open_Flower_P Parameter: Age (day) Value: 21
  misc_feature: MA Experiment 20000265 PARAMETER Experiment Name: At_Open_Flower_P Parameter: Plant Line Value: WS
  misc_feature: MA Experiment 20000265 PARAMETER Experiment Name: At_Open_Flower_P Parameter: Tissue Value: Closed Flower vs. Whole Plant
  misc_feature: MA Experiment ID: 20000438 Result: Up-regulated in Transcription
  misc_feature: MA Experiment 20000438 PARAMETER Experiment Name: At_Shoots__P Parameter: Age (day) Value: 14
  misc_feature: MA Experiment 20000438 PARAMETER Experiment Name: At_Shoots__P Parameter: Tissue Value: Shoots vs. Whole Plant
  misc_feature: MA Experiment ID: 20000496 Result: Up-regulated in Transcription
  misc_feature: MA Experiment 20000496 PARAMETER Experiment Name: At_Guard_Cells_P Parameter: Harvest Date Value: 7/19/2002
  misc_feature: MA Experiment 20000496 PARAMETER Experiment Name: At_Guard_Cells_P Parameter: Organism Value: Canola
  misc_feature: MA Experiment 20000496 PARAMETER Experiment Name: At_Guard_Cells_P Parameter: Tissue Value: Guard Cells vs. Leaves
  misc_feature: MA Experiment ID: 20001248 Result: Down-regulated in Transcription
  misc_feature: MA Experiment 20001248 PARAMETER Experiment Name: At_Far-red-induction_P Parameter: Age (day) Value: 7
  misc_feature: MA Experiment 20001248 PARAMETER Experiment Name: At_Far-red-induction_P Parameter: Light Value: Far-red vs. White
  misc_feature: MA Experiment 20001248 PARAMETER Experiment Name: At_Far-red-induction_P Parameter: Organism Value: A. thaliana
  misc_feature: MA Experiment 20001248 PARAMETER Experiment Name: At_Far-red-induction_P Parameter: Plant Line Value: Columbia
  misc_feature: MA Experiment 20001248 PARAMETER Experiment Name: At_Far-red-induction_P Parameter: Timepoint (hr) Value: 4
  misc_feature: MA Experiment 20001248 PARAMETER Experiment Name: At_Far-red-induction_P Parameter: Tissue Value: Whole Plant
  misc_feature: MA Experiment ID: 20001450 Result: Down-regulated in Transcription
  misc_feature: MA Experiment 20001450 PARAMETER Experiment Name: At_Far-red-induction_P Parameter: Age (day) Value: 7
  misc_feature: MA Experiment 20001450 PARAMETER Experiment Name: At_Far-red-induction_P Parameter: Light Value: Far-red vs. White
  misc_feature: MA Experiment 20001450 PARAMETER Experiment Name: At_Far-red-induction_P Parameter: Organism Value: A. thaliana
  misc_feature: MA Experiment 20001450 PARAMETER Experiment Name: At_Far-red-induction_P Parameter: Plant Line Value: Columbia
  misc_feature: MA Experiment 20001450 PARAMETER Experiment Name: At_Far-red-induction_P Parameter: Timepoint (hr) Value: 8
  misc_feature: MA Experiment 20001450 PARAMETER Experiment Name: At_Far-red-induction_P Parameter: Tissue Value: Whole Plant
tgagttcagatgaaacaatggaaactggttcttaccctgaacgaccaggagagcctgattgttcttattacataagaactggtctttgtagatttggctctacttgtcggttcaaccatcctcgtgatcgggaactggttatagctactgcaaggatgagaggagaataccctgaaaggattggtcagcctgaatgcgagtactatttgaagacaggaacctgcaagtttggagtaacatgtaagtttcatcatccaaggaacaaagctgggattgctggaagagtctctctcaatatgttaggctatcctctacgctcgaatgaggttgattgtgcttatttcctaagaaccggacactttaaatttggtggtacttgtaaattcaaccaccctcagcctcaaccaaccaacatgatggttcctacctcagggcaacagtcttatccttggtcaagagcttcttttattgccagccctcgttggcaagatccgtctagctacgcttccttaatcatgcctcaaggagttgtcccggttcaaggatggaacccttacagtggtcagctcggctcagtttctccttcaggtaccggaaatgatcaaaactacagaaatttacagcagaacgagacaatagagtcaggctctcagtctcaaggatcattctcgggttacaatccgggatcctctgttccgctaggagggtattatgcattgccgagggaaaatgtgttcccggagagaccaggacaacccgaatgccaattctacatgaagacaggtgactgcaaatttggcacagtttgcaaatttcaccatcctagagacagacaagctcctcctcctgattgtctcttaagttccattggcctccccttacgcccgggagaaccgttgtgtgtgttctatacacgctatggaatctgcaaatttggtccaagctgtaaatttgatcacccaatgcgagtattcacatacgacaacacagcttcagagacagatgaggtagtggaaacatcaacagggaaatctagaagactctctgtgtctgaaacaagacaagcagcaacaacatcctctggtaaagacactaccattgataatacacagcagtgaagaaacaaaggaagaagaagaagagcttttaaacaagagcttttgatttttcaaaagaggaatctgtaaattctcattttcatttagtctctcaagcatttattaataatgtatagaggtgatttatacaactgatcttgatcttgatctgatcgccattgttgtaatattcttttggcgaatcaggttcaatg

SEQ ID NO: 34742 - protein, 371 aa, Arabidopsis thaliana
  peptide (1)..(371): Ceres Seq. ID no. 12334458
  misc_feature (249)..(275): Pfam Name: Zinc finger C-x8-C-x5-C-x3-H type (and similar) Pfam Description: Zinc finger C-x8-C-x5-C-x3-H type (and similar)
  misc_feature (10)..(321): Homolog of NCBI NO: 15238861 NR Description: zinc finger -like protein; protein id:
  misc_feature (2)..(274): Homolog of NCBI NO: 22326848 NR Description: zinc finger protein 3 (gb|AAD27875.1)
  misc_feature (49)..(367): Homolog of NCBI NO: 30685903 NR Description: zinc finger protein 3 (gb|AAD27875.1)
  misc_feature (49)..(367): Homolog of NCBI NO: 21536865 NR Description: zinc finger protein 3 [Arabidopsis thaliana]
  misc_feature (4)..(334): Homolog of NCBI NO: 34902926 NR Description: putative zinc finger protein
  misc_feature (10)..(331): Homolog of NCBI NO: 30690809 NR Description: expressed protein [Arabidopsis thaliana]
  misc_feature (2)..(371): Homolog of NCBI NO: 11288368 NR Description: zinc finger protein [imported] - garden pea
  misc_feature (1)..(371): Homolog of NCBI NO: 18396338 NR Description: zinc finger protein 1 (zfn1)
  misc_feature (1)..(371): Homolog of NCBI NO: 6728979 NR Description: zinc finger protein 1 (zfn1) [Arabidopsis
  misc_feature (1)..(371): Homolog of NCBI NO: 11288371 NR Description: zinc finger protein 1 [imported] - Arabidopsis
SSDETMETGSYPERPGEPDCSYYIRTGLCRFGSTCRFNHPRDRELVIATARMRGEYPERIGQPECEYYLKTGTCKFGVTCKFHHPRNKAGIAGRVSLNMLGYPLRSNEVDCAYFLRTGHFKFGGTCKFNHPQPQPTNMMVPTSGQQSYPWSRASFIASPRWQDPSSYASLIMPQGVVPVQGWNPYSGQLGSVSPSGTGNDQNYRNLQQNETIESGSQSQGSFSGYNPGSSVPLGGYYALPRENVFPERPGQPECQFYMKTGDCKFGTVCKFHHPRDRQAPPPDCLLSSIGLPLRPGEPLCVFYTRYGICKFGPSCKFDHPMRVFTYDNTASETDEVVETSTGKSRRLSVSETRQAATTSSGKDTTIDNTQQ

SEQ ID NO: 34743 - protein, 366 aa, Arabidopsis thaliana
  peptide (1)..(366): Ceres Seq. ID no. 12334459
  misc_feature (244)..(270): Pfam Name: Zinc finger C-x8-C-x5-C-x3-H type (and similar) Pfam Description: Zinc finger C-x8-C-x5-C-x3-H type (and similar)
  misc_feature (5)..(316): Homolog of NCBI NO: 15238861 NR Description: zinc finger -like protein; protein id:
  misc_feature (1)..(269): Homolog of NCBI NO: 22326848 NR Description: zinc finger protein 3 (gb|AAD27875.1)
  misc_feature (44)..(362): Homolog of NCBI NO: 30685903 NR Description: zinc finger protein 3 (gb|AAD27875.1)
  misc_feature (44)..(362): Homolog of NCBI NO: 21536865 NR Description: zinc finger protein 3 [Arabidopsis thaliana]
  misc_feature (1)..(329): Homolog of NCBI NO: 34902926 NR Description: putative zinc finger protein
  misc_feature (5)..(326): Homolog of NCBI NO: 30690809 NR Description: expressed protein [Arabidopsis thaliana]
  misc_feature (1)..(366): Homolog of NCBI NO: 11288368 NR Description: zinc finger protein [imported] - garden pea
  misc_feature (1)..(366): Homolog of NCBI NO: 18396338 NR Description: zinc finger protein 1 (zfn1)
  misc_feature (1)..(366): Homolog of NCBI NO: 6728979 NR Description: zinc finger protein 1 (zfn1) [Arabidopsis
  misc_feature (1)..(366): Homolog of NCBI NO: 11288371 NR Description: zinc finger protein 1 [imported] - Arabidopsis
METGSYPERPGEPDCSYYIRTGLCRFGSTCRFNHPRDRELVIATARMRGEYPERIGQPECEYYLKTGTCKFGVTCKFHHPRNKAGIAGRVSLNMLGYPLRSNEVDCAYFLRTGHFKFGGTCKFNHPQPQPTNMMVPTSGQQSYPWSRASFIASPRWQDPSSYASLIMPQGVVPVQGWNPYSGQLGSVSPSGTGNDQNYRNLQQNETIESGSQSQGSFSGYNPGSSVPLGGYYALPRENVFPERPGQPECQFYMKTGDCKFGTVCKFHHPRDRQAPPPDCLLSSIGLPLRPGEPLCVFYTRYGICKFGPSCKFDHPMRVFTYDNTASETDEVVETSTGKSRRLSVSETRQAATTSSGKDTTIDNTQQ

SEQ ID NO: 34744 - protein, 320 aa, Arabidopsis thaliana
  peptide (1)..(320): Ceres Seq. ID no. 12334460
  misc_feature (198)..(224): Pfam Name: Zinc finger C-x8-C-x5-C-x3-H type (and similar) Pfam Description: Zinc finger C-x8-C-x5-C-x3-H type (and similar)
  misc_feature (1)..(270): Homolog of NCBI NO: 15238861 NR Description: zinc finger -like protein; protein id:
  misc_feature (1)..(223): Homolog of NCBI NO: 22326848 NR Description: zinc finger protein 3 (gb|AAD27875.1)
  misc_feature (1)..(316): Homolog of NCBI NO: 30685903 NR Description: zinc finger protein 3 (gb|AAD27875.1)
  misc_feature (1)..(316): Homolog of NCBI NO: 21536865 NR Description: zinc finger protein 3 [Arabidopsis thaliana]
  misc_feature (1)..(283): Homolog of NCBI NO: 34902926 NR Description: putative zinc finger protein
  misc_feature (1)..(280): Homolog of NCBI NO: 30690809 NR Description: expressed protein [Arabidopsis thaliana]
  misc_feature (1)..(320): Homolog of NCBI NO: 11288368 NR Description: zinc finger protein [imported] - garden pea
  misc_feature (1)..(320): Homolog of NCBI NO: 18396338 NR Description: zinc finger protein 1 (zfn1)
  misc_feature (1)..(320): Homolog of NCBI NO: 6728979 NR Description: zinc finger protein 1 (zfn1) [Arabidopsis
  misc_feature (1)..(320): Homolog of NCBI NO: 11288371 NR Description: zinc finger protein 1 [imported] - Arabidopsis
MRGEYPERIGQPECEYYLKTGTCKFGVTCKFHHPRNKAGIAGRVSLNMLGYPLRSNEVDCAYFLRTGHFKFGGTCKFNHPQPQPTNMMVPTSGQQSYPWSRASFIASPRWQDPSSYASLIMPQGVVPVQGWNPYSGQLGSVSPSGTGNDQNYRNLQQNETIESGSQSQGSFSGYNPGSSVPLGGYYALPRENVFPERPGQPECQFYMKTGDCKFGTVCKFHHPRDRQAPPPDCLLSSIGLPLRPGEPLCVFYTRYGICKFGPSCKFDHPMRVFTYDNTASETDEVVETSTGKSRRLSVSETRQAATTSSGKDTTIDNTQQ

SEQ ID NO: 34745 - DNA, 1309 bp, Arabidopsis thaliana
  misc_feature (1)..(1309): Ceres Seq. ID no. 12579944
  misc_feature: MA Experiment ID: 108435 Result: Up-regulated in Transcription
  misc_feature: MA Experiment 108435 PARAMETER Experiment Name: At_stm_Mutants_cDNA_P Parameter: Plant Line Value: wt Landsburg vs stm
  misc_feature: MA Experiment 108435 PARAMETER Experiment Name: At_stm_Mutants_cDNA_P Parameter: Tissue Value: Shoot Apical Meristem Region
  misc_feature: MA Experiment ID: 108474 Result: Down-regulated in Transcription
  misc_feature: MA Experiment 108474 PARAMETER Experiment Name: At_Drought_Flowers_cDNA_P Parameter: Timepoint (hr) Value: null
  misc_feature: MA Experiment 108474 PARAMETER Experiment Name: At_Drought_Flowers_cDNA_P Parameter: Treatment Value: Drought vs. No Drought
  misc_feature: MA Experiment ID: 108574 Result: Down-regulated in Transcription
  misc_feature: MA Experiment 108574 PARAMETER Experiment Name: At_Wounding__cDNA_P Parameter: Timepoint (hr) Value: 1
  misc_feature: MA Experiment 108574 PARAMETER Experiment Name: At_Wounding__cDNA_P Parameter: Tissue Value: Aerial
  misc_feature: MA Experiment 108574 PARAMETER Experiment Name: At_Wounding__cDNA_P Parameter: Treatment Value: Wounding vs. No Wounding
  misc_feature: MA Experiment ID: 108594 Result: Down-regulated in Transcription
  misc_feature: MA Experiment 108594 PARAMETER Experiment Name: At_Ler-rhl_Root_cDNA_P Parameter: Plant Line Value: null
  misc_feature: MA Experiment ID: 20000173 Result: Down-regulated in Transcription
  misc_feature: MA Experiment 20000173 PARAMETER Experiment Name: At_42deg_Heat_P Parameter: Age (day) Value: 14
  misc_feature: MA Experiment 20000173 PARAMETER Experiment Name: At_42deg_Heat_P Parameter: Organism Value: A. thaliana
  misc_feature: MA Experiment 20000173 PARAMETER Experiment Name: At_42deg_Heat_P Parameter: Plant Line Value: WS
  misc_feature: MA Experiment 20000173 PARAMETER Experiment Name: At_42deg_Heat_P Parameter: Temperature (deg C) Value: 42 vs. 22
  misc_feature: MA Experiment 20000173 PARAMETER Experiment Name: At_42deg_Heat_P Parameter: Timepoint (hr) Value: 6
  misc_feature: MA Experiment 20000173 PARAMETER Experiment Name: At_42deg_Heat_P Parameter: Tissue Value: Aerial
  misc_feature: MA Experiment ID: 20000179 Result: Up-regulated in Transcription
  misc_feature: MA Experiment 20000179 PARAMETER Experiment Name: At_Germinating_Seeds_P Parameter: Age (hr) Value: 6 vs. 0
  misc_feature: MA Experiment 20000179 PARAMETER Experiment Name: At_Germinating_Seeds_P Parameter: Tissue Value: Germinating Seeds
  misc_feature: MA Experiment ID: 20000180 Result: Up-regulated in Transcription
  misc_feature: MA Experiment 20000180 PARAMETER Experiment Name: At_Germinating_Seeds_P Parameter: Age (hr) Value: 24 vs. 0
  misc_feature: MA Experiment 20000180 PARAMETER Experiment Name: At_Germinating_Seeds_P Parameter: Tissue Value: Germinating Seeds
  misc_feature: MA Experiment ID: 20000185 Result: Up-regulated in Transcription
  misc_feature: MA Experiment 20000185 PARAMETER Experiment Name: At_Roots__P Parameter: Age (day) Value: 7 vs. 21
  misc_feature: MA Experiment 20000185 PARAMETER Experiment Name: At_Roots__P Parameter: Organism Value: A. thaliana
  misc_feature: MA Experiment 20000185 PARAMETER Experiment Name: At_Roots__P Parameter: Tissue Value: Roots vs. Whole Plant
  misc_feature: MA Experiment ID: 20000227 Result: Down-regulated in Transcription
  misc_feature: MA Experiment 20000227 PARAMETER Experiment Name: At_Root-Tips-vs-Tops_P Parameter: Tissue Value: Root Tips vs. Root Tops
  misc_feature: MA Experiment ID: 20000234 Result: Down-regulated in Transcription
  misc_feature: MA Experiment 20000234 PARAMETER Experiment Name: At_Siliques_P Parameter: Age (day) Value: 21
  misc_feature: MA Experiment 20000234 PARAMETER Experiment Name: At_Siliques_P Parameter: Organism Value: A. thaliana
  misc_feature: MA Experiment 20000234 PARAMETER Experiment Name: At_Siliques_P Parameter: Plant Line Value: WS
  misc_feature: MA Experiment 20000234 PARAMETER Experiment Name: At_Siliques_P Parameter: Tissue Value: Less Than 5mm Siliques vs. Whole Plant
  misc_feature: MA Experiment ID: 20000264 Result: Up-regulated in Transcription
  misc_feature: MA Experiment 20000264 PARAMETER Experiment Name: At_Open_Flower_P Parameter: Age (day) Value: 21
  misc_feature: MA Experiment 20000264 PARAMETER Experiment Name: At_Open_Flower_P Parameter: Plant Line Value: WS
  misc_feature: MA Experiment 20000264 PARAMETER Experiment Name: At_Open_Flower_P Parameter: Tissue Value: Open Flower vs. Whole Plant
  misc_feature: MA Experiment ID: 20000306 Result: Up-regulated in Transcription
  misc_feature: MA Experiment 20000306 PARAMETER Experiment Name: At_Germinating_Seeds_Sub_P Parameter: Age (hr) Value: 6 vs. 0
  misc_feature: MA Experiment 20000306 PARAMETER Experiment Name: At_Germinating_Seeds_Sub_P Parameter: Organism Value: A. thaliana
  misc_feature: MA Experiment 20000306 PARAMETER Experiment Name: At_Germinating_Seeds_Sub_P Parameter: Plant Line Value: WS
  misc_feature: MA Experiment 20000306 PARAMETER Experiment Name: At_Germinating_Seeds_Sub_P Parameter: Tissue Value: Germinating Seeds
  misc_feature: MA Experiment ID: 20000307 Result: Up-regulated in Transcription
  misc_feature: MA Experiment 20000307 PARAMETER Experiment Name: At_Germinating_Seeds_Sub_P Parameter: Age (hr) Value: 24 vs. 0
  misc_feature: MA Experiment 20000307 PARAMETER Experiment Name: At_Germinating_Seeds_Sub_P Parameter: Organism Value: A. thaliana
  misc_feature: MA Experiment 20000307 PARAMETER Experiment Name: At_Germinating_Seeds_Sub_P Parameter: Plant Line Value: WS
  misc_feature: MA Experiment 20000307 PARAMETER Experiment Name: At_Germinating_Seeds_Sub_P Parameter: Tissue Value: Germinating Seeds
  misc_feature: MA Experiment ID: 20000314 Result: Up-regulated in Transcription
  misc_feature: MA Experiment 20000314 PARAMETER Experiment Name: At_14day_Shoots-Roots_Sub_P Parameter: Age (day) Value: 14
  misc_feature: MA Experiment 20000314 PARAMETER Experiment Name: At_14day_Shoots-Roots_Sub_P Parameter: Organism Value: A. thaliana
  misc_feature: MA Experiment 20000314 PARAMETER Experiment Name: At_14day_Shoots-Roots_Sub_P Parameter: Plant Line Value: WS
  misc_feature: MA Experiment 20000314 PARAMETER Experiment Name: At_14day_Shoots-Roots_Sub_P Parameter: Tissue Value: Roots vs. Whole Plant
  misc_feature: MA Experiment ID: 20000327 Result: Down-regulated in Transcription
  misc_feature: MA Experiment 20000327 PARAMETER Experiment Name: At_42deg_Heat_Sub_P Parameter: Age (day) Value: 14
  misc_feature: MA Experiment 20000327 PARAMETER Experiment Name: At_42deg_Heat_Sub_P Parameter: Organism Value: A. thaliana
  misc_feature: MA Experiment 20000327 PARAMETER Experiment Name: At_42deg_Heat_Sub_P Parameter: Plant Line Value: WS
  misc_feature: MA Experiment 20000327 PARAMETER Experiment Name: At_42deg_Heat_Sub_P Parameter: Temperature (deg C) Value: 42 vs. 22
  misc_feature: MA Experiment 20000327 PARAMETER Experiment Name: At_42deg_Heat_Sub_P Parameter: Timepoint (hr) Value: 1
  misc_feature: MA Experiment 20000327 PARAMETER Experiment Name: At_42deg_Heat_Sub_P Parameter: Tissue Value: Aerial
  misc_feature: MA Experiment ID: 20000355 Result: Down-regulated in Transcription
  misc_feature: MA Experiment 20000355 PARAMETER Experiment Name: At_Siliques_Sub_P Parameter: Age (day) Value: 21
  misc_feature: MA Experiment 20000355 PARAMETER Experiment Name: At_Siliques_Sub_P Parameter: Organism Value: A. thaliana
  misc_feature: MA Experiment 20000355 PARAMETER Experiment Name: At_Siliques_Sub_P Parameter: Plant Line Value: WS
  misc_feature: MA Experiment 20000355 PARAMETER Experiment Name: At_Siliques_Sub_P Parameter: Tissue Value: Less Than 5mm Siliques vs. Whole Plant
  misc_feature: MA Experiment ID: 20000495 Result: Up-regulated in Transcription
  misc_feature: MA Experiment 20000495 PARAMETER Experiment Name: At_Guard_Cells_P Parameter: Harvest Date Value: 8/2/2002
  misc_feature: MA Experiment 20000495 PARAMETER Experiment Name: At_Guard_Cells_P Parameter: Organism Value: A. thaliana
  misc_feature: MA Experiment 20000495 PARAMETER Experiment Name: At_Guard_Cells_P Parameter: Tissue Value: Guard Cells vs. Leaves
  misc_feature: MA Experiment ID: 20000709 Result: Down-regulated in Transcription
  misc_feature: MA Experiment 20000709 PARAMETER Experiment Name: At_15mM_NH4NO3_L-to-H_P Parameter: Age (hr) Value: 14
  misc_feature: MA Experiment 20000709 PARAMETER Experiment Name: At_15mM_NH4NO3_L-to-H_P Parameter: Organism Value: A. thaliana
  misc_feature: MA Experiment 20000709 PARAMETER Experiment Name: At_15mM_NH4NO3_L-to-H_P Parameter: Plant Line Value: WS
  misc_feature: MA Experiment 20000709 PARAMETER Experiment Name: At_15mM_NH4NO3_L-to-H_P Parameter: Timepoint (hr) Value: 4
  misc_feature: MA Experiment 20000709 PARAMETER Experiment Name: At_15mM_NH4NO3_L-to-H_P Parameter: Tissue Value: Aerial
  misc_feature: MA Experiment 20000709 PARAMETER Experiment Name: At_15mM_NH4NO3_L-to-H_P Parameter: Treatment Value: 15mM NH4NO3 vs. 30mM Mannitol
  misc_feature: MA Experiment ID: 20000794 Result: Up-regulated in Transcription
  misc_feature: MA Experiment 20000794 PARAMETER Experiment Name: At_Petals_P Parameter: Age (day) Value: 23-25 days
  misc_feature: MA Experiment 20000794 PARAMETER Experiment Name: At_Petals_P Parameter: Plant Line Value: WS
  misc_feature: MA Experiment 20000794 PARAMETER Experiment Name: At_Petals_P Parameter: Tissue Value: Petals vs. Whole plant
  misc_feature: MA Experiment ID: 20001248 Result: Down-regulated in Transcription
  misc_feature: MA Experiment 20001248 PARAMETER Experiment Name: At_Far-red-induction_P Parameter: Age (day) Value: 7
  misc_feature: MA Experiment 20001248 PARAMETER Experiment Name: At_Far-red-induction_P Parameter: Light Value: Far-red vs. White
  misc_feature: MA Experiment 20001248 PARAMETER Experiment Name: At_Far-red-induction_P Parameter: Organism Value: A. thaliana
  misc_feature: MA Experiment 20001248 PARAMETER Experiment Name: At_Far-red-induction_P Parameter: Plant Line Value: Columbia
  misc_feature: MA Experiment 20001248 PARAMETER Experiment Name: At_Far-red-induction_P Parameter: Timepoint (hr) Value: 4
  misc_feature: MA Experiment 20001248 PARAMETER Experiment Name: At_Far-red-induction_P Parameter: Tissue Value: Whole Plant
  misc_feature: MA Experiment ID: 20001555 Result: Up-regulated in Transcription
  misc_feature: MA Experiment 20001555 PARAMETER Experiment Name: At_Drought_Soil_Dry_P Parameter: Age (day) Value: 24
  misc_feature: MA Experiment 20001555 PARAMETER Experiment Name: At_Drought_Soil_Dry_P Parameter: Organism Value: A. thaliana
  misc_feature: MA Experiment 20001555 PARAMETER Experiment Name: At_Drought_Soil_Dry_P Parameter: Plant Line Value: WS
  misc_feature: MA Experiment 20001555 PARAMETER Experiment Name: At_Drought_Soil_Dry_P Parameter: Post Timepoint (hr) Value: None
  misc_feature: MA Experiment 20001555 PARAMETER Experiment Name: At_Drought_Soil_Dry_P Parameter: Post-Treatment Value: None
  misc_feature: MA Experiment 20001555 PARAMETER Experiment Name: At_Drought_Soil_Dry_P Parameter: Timepoint (day) Value: 10
  misc_feature: MA Experiment 20001555 PARAMETER Experiment Name: At_Drought_Soil_Dry_P Parameter: Treatment Value: Drought vs. No Drought
  misc_feature: MA Experiment ID: 20001757 Result: Down-regulated in Transcription
  misc_feature: MA Experiment 20001757 PARAMETER Experiment Name: At_50mM_NH4NO3_L-to-H_P Parameter: Timepoint (hr) Value: 6
  misc_feature: MA Experiment 20001757 PARAMETER Experiment Name: At_50mM_NH4NO3_L-to-H_P Parameter: Tissue Value: Leaf
  misc_feature: MA Experiment 20001757 PARAMETER Experiment Name: At_50mM_NH4NO3_L-to-H_P Parameter: Treatment Value: 50mM NH4NO3 vs 100mM Mannitol
  misc_feature: MA Experiment ID: 20001807 Result: Down-regulated in Transcription
  misc_feature: MA Experiment 20001807 PARAMETER Experiment Name: At_50mM_NH4NO3_L-to-H_Sub_P Parameter: Timepoint (hr) Value: 6
  misc_feature: MA Experiment 20001807 PARAMETER Experiment Name: At_50mM_NH4NO3_L-to-H_Sub_P Parameter: Tissue Value: Leaf
  misc_feature: MA Experiment 20001807 PARAMETER Experiment Name: At_50mM_NH4NO3_L-to-H_Sub_P Parameter: Treatment Value: 50mM NH4NO3 vs 100mM Mannitol
  misc_feature: MA Experiment ID: 20001904 Result: Up-regulated in Transcription
  misc_feature: MA Experiment 20001904 PARAMETER Experiment Name: At_Drought_Reproduction_P Parameter: Age (day) Value: 37
  misc_feature: MA Experiment 20001904 PARAMETER Experiment Name: At_Drought_Reproduction_P Parameter: Organism Value: A. thaliana
  misc_feature: MA Experiment 20001904 PARAMETER Experiment Name: At_Drought_Reproduction_P Parameter: Plant Line Value: WS
  misc_feature: MA Experiment 20001904 PARAMETER Experiment Name: At_Drought_Reproduction_P Parameter: Timepoint (day) Value: 7
  misc_feature: MA Experiment 20001904 PARAMETER Experiment Name: At_Drought_Reproduction_P Parameter: Tissue Value: Rosettes
  misc_feature: MA Experiment 20001904 PARAMETER Experiment Name: At_Drought_Reproduction_P Parameter: Treatment Value: Drought vs. No Drought
  misc_feature: MA Experiment ID: 20001905 Result: Up-regulated in Transcription
  misc_feature: MA Experiment 20001905 PARAMETER Experiment Name: At_Drought_Reproduction_P Parameter: Age (day) Value: 40
  misc_feature: MA Experiment 20001905 PARAMETER Experiment Name: At_Drought_Reproduction_P Parameter: Organism Value: A. thaliana
  misc_feature: MA Experiment 20001905 PARAMETER Experiment Name: At_Drought_Reproduction_P Parameter: Plant Line Value: WS
  misc_feature: MA Experiment 20001905 PARAMETER Experiment Name: At_Drought_Reproduction_P Parameter: Timepoint (day) Value: 10
  misc_feature: MA Experiment 20001905 PARAMETER Experiment Name: At_Drought_Reproduction_P Parameter: Tissue Value: Rosettes
  misc_feature: MA Experiment 20001905 PARAMETER Experiment Name: At_Drought_Reproduction_P Parameter: Treatment Value: Drought vs. No Drought
aaagcacattggggcttatctctctctaagtaatacacacaaaaataactcacatatagagagagatatggctggagatatgcaaggagtgagagtagtagaaaaatattcaccggtcatagtgatggtgatgtcaaatgtagcgatgggttcggtgaatgcacttgtgaagaaagctcttgatgttggtgtgaaccatatggtcattggtgcttatcgaatggctatttccgctttaagtttggttccctttgcctatgtcttggaaaggaaaacaagaccacaaataacgtttaggctaatggtcgatcatttcgtcagtggccttctcggggcgagtttgatgcagtttttctttttgcttggtctgtcgtacacgtcagcaactgtttcgtgtgctttggtaagcatgttgcctgcaatcaccttcgctttggcccttattttcaggactgaaaatgtgaagattctaaagaccaaagcaggaatgttgaaggtgattggaactttgatctgtataagtggagctttgttcttaacattttacaaaggcccacaaatatcaaactctcactctcactctcacggtggggcttcccacaaaacaacgatcaagacaaggccaataattggcttcttggatgtctttatttaaccataggaacagtgttgctatctctatggatgttgtttcaagggactttaagtattaagtacccttgcaaatactcgagcacttgtcttatgtcaattttcgcggcatttcaatgtgctctcttgagcctttacaagagcagagacgttaatgattggatcatagatgatagattcgttatcaccgtcatcatatacgctggagtggtaggacaagcaatgacgacggttgcaacaacatgggggattaaaaaattaggagctgtgttcgcatcggcgtttttcccacttactctcatttcggctactctatttgatttcctcattttacacactcctttataccttggaagtgtgattggatcactagtgaccataacgggtctctacatgttcttgtgggggaagaacaaagaaacggaatcatcaactgcattgtcttcaggaatggataacgaagctcaatatactactcctaataaggataacgactctaagtcgcccgtttaatttaattatattgttgttaatgtatgtttcaaataactgttatgtcctagttaatgtttaaggagaggtaatgagagataaaattttataattccaaacatcaacgtagagatttgtgaaatatttaaatccggtttgtttggtt

SEQ ID NO: 34746 - protein, 217 aa, Arabidopsis thaliana
  peptide (1)..(217): Ceres Seq. ID no. 12579945
  misc_feature (35)..(205): Homolog of NCBI NO: 15234185 NR Description: unknown protein; protein id: At4g01450.1
  misc_feature (34)..(125): Homolog of NCBI NO: 7486354 NR Description: hypothetical protein F3D13.4 - Arabidopsis
  misc_feature (35)..(216): Homolog of NCBI NO: 15234182 NR Description: hypothetical protein
  misc_feature (112)..(193): Homolog of NCBI NO: 7486354 NR Description: hypothetical protein F3D13.4 - Arabidopsis
  misc_feature (115)..(202): Homolog of NCBI NO: 30682241 NR Description: nodulin MtN21 family protein [Arabidopsis
  misc_feature (23)..(130): Homolog of NCBI NO: 25406714 NR Description: protein T25K16.7 [imported] - Arabidopsis
  misc_feature (34)..(193): Homolog of NCBI NO: 15234179 NR Description: unknown protein
  misc_feature (23)..(193): Homolog of NCBI NO: 15220389 NR Description: hypothetical protein; protein id: At1g11460.1
  misc_feature (100)..(200): Homolog of NCBI NO: 25406714 NR Description: protein T25K16.7 [imported] - Arabidopsis
  misc_feature (23)..(200): Homolog of NCBI NO: 18378792 NR Description: expressed protein
KHIGAYLSLSNTHKNNSHIERDMAGDMQGVRVVEKYSPVIVMVMSNVAMGSVNALVKKALDVGVNHMVIGAYRMAISALSLVPFAYVLERKTRPQITFRLMVDHFVSGLLGASLMQFFFLLGLSYTSATVSCALVSMLPAITFALALIFRTENVKILKTKAGMLKVIGTLICISGALFLTFYKGPQISNSHSHSHGGASHKTTIKTRPIIGFLDVFI

SEQ ID NO: 34747 - protein, 195 aa, Arabidopsis thaliana
  peptide (1)..(195): Ceres Seq. ID no. 12579946
  misc_feature (13)..(183): Homolog of NCBI NO: 15234185 NR Description: unknown protein; protein id: At4g01450.1
  misc_feature (12)..(103): Homolog of NCBI NO: 7486354 NR Description: hypothetical protein F3D13.4 - Arabidopsis
  misc_feature (13)..(194): Homolog of NCBI NO: 15234182 NR Description: hypothetical protein
  misc_feature (90)..(171): Homolog of NCBI NO: 7486354 NR Description: hypothetical protein F3D13.4 - Arabidopsis
  misc_feature (93)..(180): Homolog of NCBI NO: 30682241 NR Description: nodulin MtN21 family protein [Arabidopsis
  misc_feature (1)..(108): Homolog of NCBI NO: 25406714 NR Description: protein T25K16.7 [imported] - Arabidopsis
  misc_feature (12)..(171): Homolog of NCBI NO: 15234179 NR Description: unknown protein
  misc_feature (1)..(171): Homolog of NCBI NO: 15220389 NR Description: hypothetical protein; protein id: At1g11460.1
  misc_feature (78)..(178): Homolog of NCBI NO: 25406714 NR Description: protein T25K16.7 [imported] - Arabidopsis
  misc_feature (1)..(178): Homolog of NCBI NO: 18378792 NR Description: expressed protein
MAGDMQGVRVVEKYSPVIVMVMSNVAMGSVNALVKKALDVGVNHMVIGAYRMAISALSLVPFAYVLERKTRPQITFRLMVDHFVSGLLGASLMQFFFLLGLSYTSATVSCALVSMLPAITFALALIFRTENVKILKTKAGMLKVIGTLICISGALFLTFYKGPQISNSHSHSHGGASHKTTIKTRPIIGFLDVFI

SEQ ID NO: 34748 - protein, 191 aa, Arabidopsis thaliana
  peptide (1)..(191): Ceres Seq. ID no. 12579947
  misc_feature (9)..(179): Homolog of NCBI NO: 15234185 NR Description: unknown protein; protein id: At4g01450.1
  misc_feature (8)..(99): Homolog of NCBI NO: 7486354 NR Description: hypothetical protein F3D13.4 - Arabidopsis
  misc_feature (9)..(190): Homolog of NCBI NO: 15234182 NR Description: hypothetical protein
  misc_feature (86)..(167): Homolog of NCBI NO: 7486354 NR Description: hypothetical protein F3D13.4 - Arabidopsis
  misc_feature (89)..(176): Homolog of NCBI NO: 30682241 NR Description: nodulin MtN21 family protein [Arabidopsis
  misc_feature (1)..(104): Homolog of NCBI NO: 25406714 NR Description: protein T25K16.7 [imported] - Arabidopsis
  misc_feature (8)..(167): Homolog of NCBI NO: 15234179 NR Description: unknown protein
  misc_feature (1)..(167): Homolog of NCBI NO: 15220389 NR Description: hypothetical protein; protein id: At1g11460.1
  misc_feature (74)..(174): Homolog of NCBI NO: 25406714 NR Description: protein T25K16.7 [imported] - Arabidopsis
  misc_feature (1)..(174): Homolog of NCBI NO: 18378792 NR Description: expressed protein
MQGVRVVEKYSPVIVMVMSNVAMGSVNALVKKALDVGVNHMVIGAYRMAISALSLVPFAYVLERKTRPQITFRLMVDHFVSGLLGASLMQFFFLLGLSYTSATVSCALVSMLPAITFALALIFRTENVKILKTKAGMLKVIGTLICISGALFLTFYKGPQISNSHSHSHGGASHKTTIKTRPIIGFLDVFI

SEQ ID NO: 34749 - DNA, 985 bp, Arabidopsis thaliana
  misc_feature (1)..(985): Ceres Seq. ID no. 12394889
  misc_feature: MA Experiment ID: 20000794 Result: Down-regulated in Transcription
  misc_feature: MA Experiment 20000794 PARAMETER Experiment Name: At_Petals_P Parameter: Age (day) Value: 23-25 days
  misc_feature: MA Experiment 20000794 PARAMETER Experiment Name: At_Petals_P Parameter: Plant Line Value: WS
  misc_feature: MA Experiment 20000794 PARAMETER Experiment Name: At_Petals_P Parameter: Tissue Value: Petals vs. Whole plant
agatatactctgatagagaagaagaagaagaagaagagatcagctgagcaacaatggccaccgcgatacctctcttcgcctctttcaagtatgccgatagtctcaccgtcgttggaatctctttctgcacggcgttggtctgcgaagcaatctcatggatcctaatctatcgcacaagctcttacaaatcgttgaaatcttccattgacaaagcctctaagaagcttgagacgatgaagacagataatccttcctcgaagctaacaaacaagaaatcgaagacgaagaagatagatcgcgttgaatccagcttaaaggaatcgagcagagatctatcactcttcaagtttaaatctggtgccgttgtggctttggttctctttgtcgtgtttggattgttgaattcgcttttcgaagggaaagtggtagcgaagcttccgtttcatccgattacgattgtgaggaagatgagtcatagaggattgaaaggcgatgattccactgattgttccatggcttttctttatctgctttgttctattagtataaggactaatctgcagaagttcttgggtttctctccacctagaggagctgctggtgctggtggtttgttcccaatgcctgatccaaagaccaattgatcaggtttgatctgatgatgaattggattctggattcttagctcgttgttactctgaaattttcatagataacttcaatgctctgatgtagtggtgttgttttcagttcgtttgatgagaaacactttcaaagtttcgagttttgagttttcttctagtatgaggtttggatttggatcccttaacatgatctactccttttcaaattcagtcttgattattgtgtgttcaagtccttttcatatgctttgacatctttctaatcatttgtacaccaaaaggcttgagttttcatgcgtatggattgtttggagactgaaatgagaggttagtgaaagatg

SEQ ID NO: 34750 - protein, 196 aa, Arabidopsis thaliana
  peptide (1)..(196): Ceres Seq. ID no. 12394890
  misc_feature (15)..(182): Homolog of NCBI NO: 17533405 NR Description: Putative protein, with a coiled coil domain, of
  misc_feature (19)..(193): Homolog of NCBI NO: 33328806 NR Description: meg-2-like protein [Rattus norvegicus]
  misc_feature (13)..(191): Homolog of NCBI NO: 24585112 NR Description: CG10470-PA [Drosophila melanogaster]
  misc_feature (14)..(182): Homolog of NCBI NO: 39587169 NR Description: Hypothetical protein CBG00622 [Caenorhabditis
  misc_feature (10)..(193): Homolog of NCBI NO: 23956188 NR Description: RIKEN cDNA 1190006A08 [Mus musculus]
  misc_feature (10)..(193): Homolog of NCBI NO: 3283893 NR Description: unknown [Homo sapiens]
  misc_feature (1)..(196): Homolog of NCBI NO: 21553820 NR Description: unknown [Arabidopsis thaliana]
  misc_feature (1)..(196): Homolog of NCBI NO: 18399454 NR Description: expressed protein
  misc_feature (1)..(196): Homolog of NCBI NO: 21554161 NR Description: unknown [Arabidopsis thaliana]
  misc_feature (1)..(196): Homolog of NCBI NO: 15240119 NR Description: putative protein
MATAIPLFASFKYADSLTVVGISFCTALVCEAISWILIYRTSSYKSLKSSIDKASKKLETMKTDNPSSKLTNKKSKTKKIDRVESSLKESSRDLSLFKFKSGAVVALVLFVVFGLLNSLFEGKVVAKLPFHPITIVRKMSHRGLKGDDSTDCSMAFLYLLCSISIRTNLQKFLGFSPPRGAAGAGGLFPMPDPKTN

SEQ ID NO: 34751 - protein, 136 aa, Arabidopsis thaliana
  peptide (1)..(136): Ceres Seq. ID no. 12394891
  misc_feature (1)..(122): Homolog of NCBI NO: 17533405 NR Description: Putative protein, with a coiled coil domain, of
  misc_feature (1)..(133): Homolog of NCBI NO: 33328806 NR Description: meg-2-like protein [Rattus norvegicus]
  misc_feature (1)..(131): Homolog of NCBI NO: 24585112 NR Description: CG10470-PA [Drosophila melanogaster]
  misc_feature (1)..(122): Homolog of NCBI NO: 39587169 NR Description: Hypothetical protein CBG00622 [Caenorhabditis
  misc_feature (1)..(133): Homolog of NCBI NO: 23956188 NR Description: RIKEN cDNA 1190006A08 [Mus musculus]
  misc_feature (1)..(133): Homolog of NCBI NO: 3283893 NR Description: unknown [Homo sapiens]
  misc_feature (1)..(136): Homolog of NCBI NO: 21553820 NR Description: unknown [Arabidopsis thaliana]
  misc_feature (1)..(136): Homolog of NCBI NO: 18399454 NR Description: expressed protein
  misc_feature (1)..(136): Homolog of NCBI NO: 21554161 NR Description: unknown [Arabidopsis thaliana]
  misc_feature (1)..(136): Homolog of NCBI NO: 15240119 NR Description: putative protein
MKTDNPSSKLTNKKSKTKKIDRVESSLKESSRDLSLFKFKSGAVVALVLFVVFGLLNSLFEGKVVAKLPFHPITIVRKMSHRGLKGDDSTDCSMAFLYLLCSISIRTNLQKFLGFSPPRGAAGAGGLFPMPDPKTN

SEQ ID NO: 34752 - DNA, 900 bp, Arabidopsis thaliana
  misc_feature (1)..(900): Ceres Seq. ID no. 12334449
  misc_feature: MA Experiment ID: 108462 Result: Down-regulated in Transcription
  misc_feature: MA Experiment 108462 PARAMETER Experiment Name: At_Germinating_Seeds_cDNA_P Parameter: Age (day) Value: 2 vs. 0
  misc_feature: MA Experiment 108462 PARAMETER Experiment Name: At_Germinating_Seeds_cDNA_P Parameter: Tissue Value: Germinating Seeds
  misc_feature: MA Experiment ID: 20000072 Result: Down-regulated in Transcription
  misc_feature: MA Experiment 20000072 PARAMETER Experiment Name: At_100uM_ABA_Mutants_cDNA_P Parameter: Plant Line Value: CS8105
  misc_feature: MA Experiment 20000072 PARAMETER Experiment Name: At_100uM_ABA_Mutants_cDNA_P Parameter: Timepoint (hr) Value: 6
  misc_feature: MA Experiment 20000072 PARAMETER Experiment Name: At_100uM_ABA_Mutants_cDNA_P Parameter: Tissue Value: Aerial
  misc_feature: MA Experiment 20000072 PARAMETER Experiment Name: At_100uM_ABA_Mutants_cDNA_P Parameter: Treatment Value: 100uM ABA vs. No Treatment
  misc_feature: MA Experiment ID: 20000093 Result: Up-regulated in Transcription
  misc_feature: MA Experiment 20000093 PARAMETER Experiment Name: At_42deg_Heat_cDNA_P Parameter: Temperature (deg C) Value: 42 vs. 22
  misc_feature: MA Experiment 20000093 PARAMETER Experiment Name: At_42deg_Heat_cDNA_P Parameter: Timepoint (hr) Value: 0.5
  misc_feature: MA Experiment 20000093 PARAMETER Experiment Name: At_42deg_Heat_cDNA_P Parameter: Tissue Value: Aerial
  misc_feature: MA Experiment ID: 20000111 Result: Up-regulated in Transcription
  misc_feature: MA Experiment 20000111 PARAMETER Experiment Name: At_42deg_Heat_cDNA_P Parameter: Temperature (deg C) Value: 42 vs. 22
  misc_feature: MA Experiment 20000111 PARAMETER Experiment Name: At_42deg_Heat_cDNA_P Parameter: Timepoint (hr) Value: 6
  misc_feature: MA Experiment 20000111 PARAMETER Experiment Name: At_42deg_Heat_cDNA_P Parameter: Tissue Value: Aerial
  misc_feature: MA Experiment ID: 20000113 Result: Up-regulated in Transcription
  misc_feature: MA Experiment 20000113 PARAMETER Experiment Name: At_42deg_Heat_cDNA_P Parameter: Temperature (deg C) Value: 42 vs. 22
  misc_feature: MA Experiment 20000113 PARAMETER Experiment Name: At_42deg_Heat_cDNA_P Parameter: Timepoint (hr) Value: 8
  misc_feature: MA Experiment 20000113 PARAMETER Experiment Name: At_42deg_Heat_cDNA_P Parameter: Tissue Value: Aerial
  misc_feature: MA Experiment ID: 20000171 Result: Up-regulated in Transcription
  misc_feature: MA Experiment 20000171 PARAMETER Experiment Name: At_42deg_Heat_P Parameter: Age (day) Value: 14
  misc_feature: MA Experiment 20000171 PARAMETER Experiment Name: At_42deg_Heat_P Parameter: Organism Value: A. thaliana
  misc_feature: MA Experiment 20000171 PARAMETER Experiment Name: At_42deg_Heat_P Parameter: Plant Line Value: WS
  misc_feature: MA Experiment 20000171 PARAMETER Experiment Name: At_42deg_Heat_P Parameter: Temperature (deg C) Value: 42 vs. 22
  misc_feature: MA Experiment 20000171 PARAMETER Experiment Name: At_42deg_Heat_P Parameter: Timepoint (hr) Value: 1
  misc_feature: MA Experiment 20000171 PARAMETER Experiment Name: At_42deg_Heat_P Parameter: Tissue Value: Aerial
  misc_feature: MA Experiment ID: 20000173 Result: Up-regulated in Transcription
  misc_feature: MA Experiment 20000173 PARAMETER Experiment Name: At_42deg_Heat_P Parameter: Age (day) Value: 14
  misc_feature: MA Experiment 20000173 PARAMETER Experiment Name: At_42deg_Heat_P Parameter: Organism Value: A. thaliana
  misc_feature: MA Experiment 20000173 PARAMETER Experiment Name: At_42deg_Heat_P Parameter: Plant Line Value: WS
  misc_feature: MA Experiment 20000173 PARAMETER Experiment Name: At_42deg_Heat_P Parameter: Temperature (deg C) Value: 42 vs. 22
  misc_feature: MA Experiment 20000173 PARAMETER Experiment Name: At_42deg_Heat_P Parameter: Timepoint (hr) Value: 6
  misc_feature: MA Experiment 20000173 PARAMETER Experiment Name: At_42deg_Heat_P Parameter: Tissue Value: Aerial
ccctctttgcactttcttcttcccgtcgctaccgaaagcttctgtctctctcactcgcagggttctctggaactttctgaacgatgccgaggtattactgtgattattgcgatacttatctcactcacgattccccatcagtaaggaagcagcacaatgctggttacaaacacaaggcgaatgtgagaatatactatccaatttgaggaacaacaaacccaaagtttgattgatcagagaattaaggaacatcttggccaaactggagggtatcaacaggttggtgctgtgtttaatcagcatatgcttgcaagacctcgccctcccatgatgctaccacctggaagtatgcctatgggtatgcgacctcctgttctgcctagacccatgatgcctcctcaaggttatatgcctcctccaggagtaccacagatgatggcaccgcctggtgctcctctacctccacctccacaaaatggtattctgaggccaccaggaatggctcccataccaggtcaaggtggcggaccaccaggaatggctcccataccaggtcaaggtggcggaccacctcccaattataatggactacctcctcctcctccttatcatacaaatccagctgctccaccaagtggtaatttcaacaatccaaacctcaacaatccgaatcccagtgctgaatctcctgaaagcaatgagtagagttagtaggtctgaatgaatcatttttctcctgccaaaaaattctcagagctcttgtttaacacaatatcctaccttttctactccaatttttatgaagaggtttagaactaacgtatgtgaaatgagttttatgtgttagatgattgtatccattagagtcatgaaaaggaaaatctgaggtttcttatctct

SEQ ID NO: 34753 - protein, 133 aa, Arabidopsis thaliana
  peptide (1)..(133): Ceres Seq. ID no. 12334450
  misc_feature (5)..(129): Pfam Name: Extensin-like region Pfam Description: Extensin-like region
  misc_feature (1)..(80): Homolog of NCBI NO: 548881 NR Description: U1 small nuclear ribonucleoprotein C (U1-C)
  misc_feature (30)..(109): Homolog of NCBI NO: 6755596 NR Description: U1 small nuclear ribonucleoprotein 1C [Mus
  misc_feature (30)..(109): Homolog of NCBI NO: 4507127 NR Description: small nuclear ribonucleoprotein polypeptide C
  misc_feature (11)..(106): Homolog of NCBI NO: 17539712 NR Description: Small nuclear ribonucleoprotein polypeptide C
  misc_feature (30)..(109): Homolog of NCBI NO: 34852241 NR Description: similar to U1 snRNP-specific protein C [Rattus
  misc_feature (11)..(82): Homolog of NCBI NO: 39580999 NR Description: Hypothetical protein CBG19656 [Caenorhabditis
  misc_feature (1)..(122): Homolog of NCBI NO: 38111701 NR Description: hypothetical protein MG08209.4 [Magnaporthe
  misc_feature (1)..(34): Homolog of NCBI NO: 25295939 NR Description: probable C-type U1 snRNP [imported] - Arabidopsis
  misc_feature (1)..(133): Homolog of NCBI NO: 28466929 NR Description: At4g03120 [Arabidopsis thaliana]
  misc_feature (1)..(133): Homolog of NCBI NO: 18412147 NR Description: putative C-type U1 snRNP
MLARPRPPMMLPPGSMPMGMRPPVLPRPMMPPQGYMPPPGVPQMMAPPGAPLPPPPQNGILRPPGMAPIPGQGGGPPGMAPIPGQGGGPPPNYNGLPPPPPYHTNPAAPPSGNFNNPNLNNPNPSAESPESNE

SEQ ID NO: 34754 - protein, 125 aa, Arabidopsis thaliana
  peptide (1)..(125): Ceres Seq. ID no. 12334451
  misc_feature (1)..(121): Pfam Name: Extensin-like region Pfam Description: Extensin-like region
  misc_feature (1)..(72): Homolog of NCBI NO: 548881 NR Description: U1 small nuclear ribonucleoprotein C (U1-C)
  misc_feature (22)..(101): Homolog of NCBI NO: 6755596 NR Description: U1 small nuclear ribonucleoprotein 1C [Mus
  misc_feature (22)..(101): Homolog of NCBI NO: 4507127 NR Description: small nuclear ribonucleoprotein polypeptide C
  misc_feature (3)..(98): Homolog of NCBI NO: 17539712 NR Description: Small nuclear ribonucleoprotein polypeptide C
  misc_feature (22)..(101): Homolog of NCBI NO: 34852241 NR Description: similar to U1 snRNP-specific protein C [Rattus
  misc_feature (3)..(74): Homolog of NCBI NO: 39580999 NR Description: Hypothetical protein CBG19656 [Caenorhabditis
  misc_feature (1)..(114): Homolog of NCBI NO: 38111701 NR Description: hypothetical protein MG08209.4 [Magnaporthe
  misc_feature (1)..(26): Homolog of NCBI NO: 25295939 NR Description: probable C-type U1 snRNP [imported] - Arabidopsis
  misc_feature (1)..(125): Homolog of NCBI NO: 28466929 NR Description: At4g03120 [Arabidopsis thaliana]
  misc_feature (1)..(125): Homolog of NCBI NO: 18412147 NR Description: putative C-type U1 snRNP
MMLPPGSMPMGMRPPVLPRPMMPPQGYMPPPGVPQMMAPPGAPLPPPPQNGILRPPGMAPIPGQGGGPPGMAPIPGQGGGPPPNYNGLPPPPPYHTNPAAPPSGNFNNPNLNNPNPSAESPESNE

SEQ ID NO: 34755 - protein, 124 aa, Arabidopsis thaliana
  peptide (1)..(124): Ceres Seq. ID no. 12334452
  misc_feature (1)..(120): Pfam Name: Extensin-like region Pfam Description: Extensin-like region
  misc_feature (1)..(71): Homolog of NCBI NO: 548881 NR Description: U1 small nuclear ribonucleoprotein C (U1-C)
  misc_feature (21)..(100): Homolog of NCBI NO: 6755596 NR Description: U1 small nuclear ribonucleoprotein 1C [Mus
  misc_feature (21)..(100): Homolog of NCBI NO: 4507127 NR Description: small nuclear ribonucleoprotein polypeptide C
  misc_feature (2)..(97): Homolog of NCBI NO: 17539712 NR Description: Small nuclear ribonucleoprotein polypeptide C
  misc_feature (21)..(100): Homolog of NCBI NO: 34852241 NR Description: similar to U1 snRNP-specific protein C [Rattus
  misc_feature (2)..(73): Homolog of NCBI NO: 39580999 NR Description: Hypothetical protein CBG19656 [Caenorhabditis
  misc_feature (1)..(113): Homolog of NCBI NO: 38111701 NR Description: hypothetical protein MG08209.4 [Magnaporthe
  misc_feature (1)..(25): Homolog of NCBI NO: 25295939 NR Description: probable C-type U1 snRNP [imported] - Arabidopsis
  misc_feature (1)..(124): Homolog of NCBI NO: 28466929 NR Description: At4g03120 [Arabidopsis thaliana]
  misc_feature (1)..(124): Homolog of NCBI NO: 18412147 NR Description: putative C-type U1 snRNP
MLPPGSMPMGMRPPVLPRPMMPPQGYMPPPGVPQMMAPPGAPLPPPPQNGILRPPGMAPIPGQGGGPPGMAPIPGQGGGPPPNYNGLPPPPPYHTNPAAPPSGNFNNPNLNNPNPSAESPESNE

SEQ ID NO: 34756 - DNA, 1387 bp, Arabidopsis thaliana
  misc_feature (1)..(1387): Ceres Seq. ID no. 13509801
  misc_feature: MA Experiment ID: 108461 Result: Up-regulated in Transcription
  misc_feature: MA Experiment 108461 PARAMETER Experiment Name: At_Germinating_Seeds_cDNA_P Parameter: Age (day) Value: 1 vs. 0
  misc_feature: MA Experiment 108461 PARAMETER Experiment Name: At_Germinating_Seeds_cDNA_P Parameter: Tissue Value: Germinating Seeds
  misc_feature: MA Experiment ID: 108462 Result: Up-regulated in Transcription
  misc_feature: MA Experiment 108462 PARAMETER Experiment Name: At_Germinating_Seeds_cDNA_P Parameter: Age (day) Value: 2 vs. 0
  misc_feature: MA Experiment 108462 PARAMETER Experiment Name: At_Germinating_Seeds_cDNA_P Parameter: Tissue Value: Germinating Seeds
  misc_feature: MA Experiment ID: 108463 Result: Up-regulated in Transcription
  misc_feature: MA Experiment 108463 PARAMETER Experiment Name: At_Germinating_Seeds_cDNA_P Parameter: Age (day) Value: 3 vs. 0
  misc_feature: MA Experiment 108463 PARAMETER Experiment Name: At_Germinating_Seeds_cDNA_P Parameter: Tissue Value: Germinating Seeds
  misc_feature: MA Experiment ID: 108464 Result: Up-regulated in Transcription
  misc_feature: MA Experiment 108464 PARAMETER Experiment Name: At_Germinating_Seeds_cDNA_P Parameter: Age (day) Value: 4 vs. 0
  misc_feature: MA Experiment 108464 PARAMETER Experiment Name: At_Germinating_Seeds_cDNA_P Parameter: Tissue Value: Germinating Seeds
  misc_feature: MA Experiment ID: 108488 Result: Up-regulated in Transcription
  misc_feature: MA Experiment ID: 108577 Result: Down-regulated in Transcription
  misc_feature: MA Experiment 108577 PARAMETER Experiment Name: At_42deg_Heat_cDNA_P Parameter: Temperature (deg C) Value: 42 vs. 22
  misc_feature: MA Experiment 108577 PARAMETER Experiment Name: At_42deg_Heat_cDNA_P Parameter: Timepoint (hr) Value: 6
  misc_feature: MA Experiment 108577 PARAMETER Experiment Name: At_42deg_Heat_cDNA_P Parameter: Tissue Value: Aerial
  misc_feature: MA Experiment ID: 108594 Result: Down-regulated in Transcription
  misc_feature: MA Experiment 108594 PARAMETER Experiment Name: At_Ler-rhl_Root_cDNA_P Parameter: Plant Line Value: null
  misc_feature: MA Experiment ID: 108609 Result: Up-regulated in Transcription
  misc_feature: MA Experiment 108609 PARAMETER Experiment Name: At_100uM_ABA_cDNA_P Parameter: Timepoint (hr) Value: 24
  misc_feature: MA Experiment 108609 PARAMETER Experiment Name: At_100uM_ABA_cDNA_P Parameter: Tissue Value: Aerial
  misc_feature: MA Experiment 108609 PARAMETER Experiment Name: At_100uM_ABA_cDNA_P Parameter: Treatment Value: 100uM ABA vs. No Treatment
  misc_feature: MA Experiment ID: 20000070 Result: Up-regulated in Transcription
  misc_feature: MA Experiment 20000070 PARAMETER Experiment Name: At_100uM_ABA_Mutants_cDNA_P Parameter: Plant Line Value: CS24
  misc_feature: MA Experiment 20000070 PARAMETER Experiment Name: At_100uM_ABA_Mutants_cDNA_P Parameter: Timepoint (hr) Value: 6
  misc_feature: MA Experiment 20000070 PARAMETER Experiment Name: At_100uM_ABA_Mutants_cDNA_P Parameter: Tissue Value: Aerial
  misc_feature: MA Experiment 20000070 PARAMETER Experiment Name: At_100uM_ABA_Mutants_cDNA_P Parameter: Treatment Value: 100uM ABA vs. No Treatment
  misc_feature: MA Experiment ID: 20000112 Result: Down-regulated in Transcription
  misc_feature: MA Experiment 20000112 PARAMETER Experiment Name: At_42deg_Heat_cDNA_P Parameter: Temperature (deg C) Value: 42 vs. 22
  misc_feature: MA Experiment 20000112 PARAMETER Experiment Name: At_42deg_Heat_cDNA_P Parameter: Timepoint (hr) Value: 2
  misc_feature: MA Experiment 20000112 PARAMETER Experiment Name: At_42deg_Heat_cDNA_P Parameter: Tissue Value: Aerial
  misc_feature: MA Experiment ID: 20000113 Result: Down-regulated in Transcription
  misc_feature: MA Experiment 20000113 PARAMETER Experiment Name: At_42deg_Heat_cDNA_P Parameter: Temperature (deg C) Value: 42 vs. 22
  misc_feature: MA Experiment 20000113 PARAMETER Experiment Name: At_42deg_Heat_cDNA_P Parameter: Timepoint (hr) Value: 8
  misc_feature: MA Experiment 20000113 PARAMETER Experiment Name: At_42deg_Heat_cDNA_P Parameter: Tissue Value: Aerial
  misc_feature: MA Experiment ID: 20000173 Result: Down-regulated in Transcription
  misc_feature: MA Experiment 20000173 PARAMETER Experiment Name: At_42deg_Heat_P Parameter: Age (day) Value: 14
  misc_feature: MA Experiment 20000173 PARAMETER Experiment Name: At_42deg_Heat_P Parameter: Organism Value: A. thaliana
  misc_feature: MA Experiment 20000173 PARAMETER Experiment Name: At_42deg_Heat_P Parameter: Plant Line Value: WS
  misc_feature: MA Experiment 20000173 PARAMETER Experiment Name: At_42deg_Heat_P Parameter: Temperature (deg C) Value: 42 vs. 22
  misc_feature: MA Experiment 20000173 PARAMETER Experiment Name: At_42deg_Heat_P Parameter: Timepoint (hr) Value: 6
  misc_feature: MA Experiment 20000173 PARAMETER Experiment Name: At_42deg_Heat_P Parameter: Tissue Value: Aerial
  misc_feature: MA Experiment ID: 20000180 Result: Up-regulated in Transcription
  misc_feature: MA Experiment 20000180 PARAMETER Experiment Name: At_Germinating_Seeds_P Parameter: Age (hr) Value: 24 vs. 0
  misc_feature: MA Experiment 20000180 PARAMETER Experiment Name: At_Germinating_Seeds_P Parameter: Tissue Value: Germinating Seeds
  misc_feature: MA Experiment ID: 20000224 Result: Up-regulated in Transcription
  misc_feature: MA Experiment ID: 20000264 Result: Down-regulated in Transcription
  misc_feature: MA Experiment 20000264 PARAMETER Experiment Name: At_Open_Flower_P Parameter: Age (day) Value: 21
  misc_feature: MA Experiment 20000264 PARAMETER Experiment Name: At_Open_Flower_P Parameter: Plant Line Value: WS
  misc_feature: MA Experiment 20000264 PARAMETER Experiment Name: At_Open_Flower_P Parameter: Tissue Value: Open Flower vs. Whole Plant
  misc_feature: MA Experiment ID: 20000265 Result: Down-regulated in Transcription
  misc_feature: MA Experiment 20000265 PARAMETER Experiment Name: At_Open_Flower_P Parameter: Age (day) Value: 21
  misc_feature: MA Experiment 20000265 PARAMETER Experiment Name: At_Open_Flower_P Parameter: Plant Line Value: WS
  misc_feature: MA Experiment 20000265 PARAMETER Experiment Name: At_Open_Flower_P Parameter: Tissue Value: Closed Flower vs. Whole Plant
  misc_feature: MA Experiment ID: 20000286 Result: Down-regulated in Transcription
  misc_feature: MA Experiment 20000286 PARAMETER Experiment Name: At_Open_Flower_P Parameter: Age (day) Value: 21
  misc_feature: MA Experiment 20000286 PARAMETER Experiment Name: At_Open_Flower_P Parameter: Plant Line Value: WS
  misc_feature: MA Experiment 20000286 PARAMETER Experiment Name: At_Open_Flower_P Parameter: Tissue Value: Half Open vs. Whole Plant
  misc_feature: MA Experiment ID: 20000452 Result: Up-regulated in Transcription
  misc_feature: MA Experiment 20000452 PARAMETER Experiment Name: At_CS6879_Shoots-Roots_P Parameter: Age (day) Value: 14
  misc_feature: MA Experiment 20000452 PARAMETER Experiment Name: At_CS6879_Shoots-Roots_P Parameter: Organism Value: A. thaliana
  misc_feature: MA Experiment 20000452 PARAMETER Experiment Name: At_CS6879_Shoots-Roots_P Parameter: Plant Line Value: CS6879 vs. WS
  misc_feature: MA Experiment 20000452 PARAMETER Experiment Name: At_CS6879_Shoots-Roots_P Parameter: Tissue Value: Shoots
  misc_feature: MA Experiment ID: 20000453 Result: Up-regulated in Transcription
  misc_feature: MA Experiment 20000453 PARAMETER Experiment Name: At_100uM_ABA_P Parameter: Age (day) Value: 15
  misc_feature: MA Experiment 20000453 PARAMETER Experiment Name: At_100uM_ABA_P Parameter: Organism Value: A. thaliana
  misc_feature: MA Experiment 20000453 PARAMETER Experiment Name: At_100uM_ABA_P Parameter: Plant Line Value: WS
  misc_feature: MA Experiment 20000453 PARAMETER Experiment Name: At_100uM_ABA_P Parameter: Timepoint (hr) Value: 24
  misc_feature: MA Experiment 20000453 PARAMETER Experiment Name: At_100uM_ABA_P Parameter: Tissue Value: Aerial
  misc_feature: MA Experiment 20000453 PARAMETER Experiment Name: At_100uM_ABA_P Parameter: Treatment Value: 100uM ABA vs. No Treatment
  misc_feature: MA Experiment ID: 20000527 Result: Down-regulated in Transcription
  misc_feature: MA Experiment 20000527 PARAMETER Experiment Name: At_10percent_PEG_P Parameter: Age (day) Value: 20
  misc_feature: MA Experiment 20000527 PARAMETER Experiment Name: At_10percent_PEG_P Parameter: Organism Value: A. thaliana
  misc_feature: MA Experiment 20000527 PARAMETER Experiment Name: At_10percent_PEG_P Parameter: Plant Line Value: WS
  misc_feature: MA Experiment 20000527 PARAMETER Experiment Name: At_10percent_PEG_P Parameter: Timepoint (day) Value: 20
  misc_feature: MA Experiment 20000527 PARAMETER Experiment Name: At_10percent_PEG_P Parameter: Tissue Value: Whole Plant
  misc_feature: MA Experiment 20000527 PARAMETER Experiment Name: At_10percent_PEG_P Parameter: Treatment Value: 10percent PEG vs. No Treatment
  misc_feature: MA Experiment ID: 20000794 Result: Down-regulated in Transcription
  misc_feature: MA Experiment 20000794 PARAMETER Experiment Name: At_Petals_P Parameter: Age (day) Value: 23-25 days
  misc_feature: MA Experiment 20000794 PARAMETER Experiment Name: At_Petals_P Parameter: Plant Line Value: WS
  misc_feature: MA Experiment 20000794 PARAMETER Experiment Name: At_Petals_P Parameter: Tissue Value: Petals vs. Whole plant
  misc_feature: MA Experiment ID: 20001451 Result: Down-regulated in Transcription
  misc_feature: MA Experiment 20001451 PARAMETER Experiment Name: At_Far-red-induction_P Parameter: Age (day) Value: 7
  misc_feature: MA Experiment 20001451 PARAMETER Experiment Name: At_Far-red-induction_P Parameter: Light Value: Far-red vs. White
  misc_feature: MA Experiment 20001451 PARAMETER Experiment Name: At_Far-red-induction_P Parameter: Organism Value: A. thaliana
  misc_feature: MA Experiment 20001451 PARAMETER Experiment Name: At_Far-red-induction_P Parameter: Plant Line Value: Columbia
  misc_feature: MA Experiment 20001451 PARAMETER Experiment Name: At_Far-red-induction_P Parameter: Timepoint (hr) Value: 24
  misc_feature: MA Experiment 20001451 PARAMETER Experiment Name: At_Far-red-induction_P Parameter: Tissue Value: Whole Plant
  misc_feature: MA Experiment ID: 20001557 Result: Down-regulated in Transcription
  misc_feature: MA Experiment 20001557 PARAMETER Experiment Name: At_Drought_Soil_Dry_P Parameter: Age (day) Value: 27
  misc_feature: MA Experiment 20001557 PARAMETER Experiment Name: At_Drought_Soil_Dry_P Parameter: Organism Value: A. thaliana
  misc_feature: MA Experiment 20001557 PARAMETER Experiment Name: At_Drought_Soil_Dry_P Parameter: Plant Line Value: WS
  misc_feature: MA Experiment 20001557 PARAMETER Experiment Name: At_Drought_Soil_Dry_P Parameter: Post Timepoint (hr) Value: 3
  misc_feature: MA Experiment 20001557 PARAMETER Experiment Name: At_Drought_Soil_Dry_P Parameter: Post-Treatment Value: Re-Water vs. No Drought
  misc_feature: MA Experiment 20001557 PARAMETER Experiment Name: At_Drought_Soil_Dry_P Parameter: Timepoint (day) Value: 13
  misc_feature: MA Experiment 20001557 PARAMETER Experiment Name: At_Drought_Soil_Dry_P Parameter: Treatment Value: Drought vs. No Drought
  misc_feature: MA Experiment ID: 20001558 Result: Down-regulated in Transcription
  misc_feature: MA Experiment 20001558 PARAMETER Experiment Name: At_Drought_Soil_Dry_P Parameter: Age (day) Value: 27
  misc_feature: MA Experiment 20001558 PARAMETER Experiment Name: At_Drought_Soil_Dry_P Parameter: Organism Value: A. thaliana
  misc_feature: MA Experiment 20001558 PARAMETER Experiment Name: At_Drought_Soil_Dry_P Parameter: Plant Line Value: WS
  misc_feature: MA Experiment 20001558 PARAMETER Experiment Name: At_Drought_Soil_Dry_P Parameter: Post Timepoint (hr) Value: 6
  misc_feature: MA Experiment 20001558 PARAMETER Experiment Name: At_Drought_Soil_Dry_P Parameter: Post-Treatment Value: Re-Water vs. No Drought
  misc_feature: MA Experiment 20001558 PARAMETER Experiment Name: At_Drought_Soil_Dry_P Parameter: Timepoint (day) Value: 13
  misc_feature: MA Experiment 20001558 PARAMETER Experiment Name: At_Drought_Soil_Dry_P Parameter: Treatment Value: Drought vs. No Drought
  misc_feature: MA Experiment ID: 20001560 Result: Down-regulated in Transcription
  misc_feature: MA Experiment 20001560 PARAMETER Experiment Name: At_Drought_Soil_Dry_P Parameter: Age (day) Value: 28
  misc_feature: MA Experiment 20001560 PARAMETER Experiment Name: At_Drought_Soil_Dry_P Parameter: Organism Value: A. thaliana
  misc_feature: MA Experiment 20001560 PARAMETER Experiment Name: At_Drought_Soil_Dry_P Parameter: Plant Line Value: WS
  misc_feature: MA Experiment 20001560 PARAMETER Experiment Name: At_Drought_Soil_Dry_P Parameter: Post Timepoint (hr) Value: None
  misc_feature: MA Experiment 20001560 PARAMETER Experiment Name: At_Drought_Soil_Dry_P Parameter: Post-Treatment Value: None
  misc_feature: MA Experiment 20001560 PARAMETER Experiment Name: At_Drought_Soil_Dry_P Parameter: Timepoint (day) Value: 14
  misc_feature: MA Experiment 20001560 PARAMETER Experiment Name: At_Drought_Soil_Dry_P Parameter: Treatment Value: Drought vs. No Drought
  misc_feature: MA Experiment ID: 20001904 Result: Down-regulated in Transcription
  misc_feature: MA Experiment 20001904 PARAMETER Experiment Name: At_Drought_Reproduction_P Parameter: Age (day) Value: 37
  misc_feature: MA Experiment 20001904 PARAMETER Experiment Name: At_Drought_Reproduction_P Parameter: Organism Value: A. thaliana
  misc_feature: MA Experiment 20001904 PARAMETER Experiment Name: At_Drought_Reproduction_P Parameter: Plant Line Value: WS
  misc_feature: MA Experiment 20001904 PARAMETER Experiment Name: At_Drought_Reproduction_P Parameter: Timepoint (day) Value: 7
  misc_feature: MA Experiment 20001904 PARAMETER Experiment Name: At_Drought_Reproduction_P Parameter: Tissue Value: Rosettes
  misc_feature: MA Experiment 20001904 PARAMETER Experiment Name: At_Drought_Reproduction_P Parameter: Treatment Value: Drought vs. No Drought
  misc_feature: MA Experiment ID: 20001905 Result: Down-regulated in Transcription
  misc_feature: MA Experiment 20001905 PARAMETER Experiment Name: At_Drought_Reproduction_P Parameter: Age (day) Value: 40
  misc_feature: MA Experiment 20001905 PARAMETER Experiment Name: At_Drought_Reproduction_P Parameter: Organism Value: A. thaliana
  misc_feature: MA Experiment 20001905 PARAMETER Experiment Name: At_Drought_Reproduction_P Parameter: Plant Line Value: WS
  misc_feature: MA Experiment 20001905 PARAMETER Experiment Name: At_Drought_Reproduction_P Parameter: Timepoint (day) Value: 10
  misc_feature: MA Experiment 20001905 PARAMETER Experiment Name: At_Drought_Reproduction_P Parameter: Tissue Value: Rosettes
  misc_feature: MA Experiment 20001905 PARAMETER Experiment Name: At_Drought_Reproduction_P Parameter: Treatment Value: Drought vs. No Drought
gactcaactcaagagtggtgtagtgagagaagaaagatagagaaaaaaaatgggaggcaaaggtgtgatgatggtggcgatactttgcctttgggcactctctgcaacatctgaagcagtaacagaggctgagccaggtttgatgatgaacttctacaaggacacgtgtcctcaggccgaagacatcgtccgtgaacaagtcaaactcctctacaaacgccacaagaacaccgctttctcttggctccgtaacatcttccatgactgcgccgttgagtcatgtgatgcgtcgcttttgctggattcgacaagaagagagctaggagagaaagaacacgacaggagcttcggacttagaaactttaggtacatcgaggagatcaaggaagctctcgagagggagtgtcctggtgttgtctcatgttctgacattctcgtcttgtccgcaagagaaggcatcgaagcagtaggaggaccttatattcctttgaagacaggaaggagagatggacttaaaagcaggacggatatgctcgagtcatatcttcccgaccacaacgagagtatctccgtcgttcttgaaaagttcaaatccatcggtatcgacactcccggcctcgtcgccctcctagggtcacacagcgtgggaagaactcactgtgtcaagctggtccatcgtttgtaccctgaggtggacccgtccttaaacccggaccacgtccctcacatgctacacaagtgtcctgactcgatccctgacccaaaggcggtccagtacgtgcgtaacgaccgtggcacccccatggtgctagacaacaattactaccgtaacatcctagacaacaagggtttgctccttgtggaccatcagctcgcacacgacaaacgaaccagaccaatcgttaagaagatggctaaggaccaggcctacttcttcaaggagttcactagggcaatccagatcttatccgagaacaaccccttgactggctctaagggtgagatcaggaagcaatgtaatctcgcaaacaagaaccattgaagttggaaaaagtgagaaagacaggggctctggtgtgttgagttctctgcttggtacgaaccaagatgaataaaaaaatcttttaagttaaatcaaagaaagggtgatgatgaatacatcatggtagtgaccacctccttcttttgtgtgttcagccttaatgctttaattatgatgttagtggctttgagttatttaatctaaatgttggctcttcgttgattttgggtttgtggtgggggtgatataatgataatggaaaggatgtatgatatgatggatggtgttgggtatcatgtatgacgatgtaatgataagtaaacatgtccgaatcttttgataatt

SEQ ID NO: 34757 - protein, 330 aa, Arabidopsis thaliana
  peptide (1)..(330): Ceres Seq. ID no. 13509802
  misc_feature (1)..(330): Homolog of NCBI NO: 7433087 NR Description: peroxidase (EC 1.11.1.7) - upland cotton
  misc_feature (8)..(330): Homolog of NCBI NO: 7433096 NR Description: peroxidase (EC 1.11.1.7) prxr1 - Arabidopsis
  misc_feature (1)..(330): Homolog of NCBI NO: 1403136 NR Description: peroxidase ATP1a [Arabidopsis thaliana]
  misc_feature (1)..(330): Homolog of NCBI NO: 18415810 NR Description: peroxidase, putative [Arabidopsis thaliana]
  misc_feature (1)..(330): Homolog of NCBI NO: 7433087 NR Description: peroxidase (EC 1.11.1.7) - upland cotton
  misc_feature (8)..(330): Homolog of NCBI NO: 7433096 NR Description: peroxidase (EC 1.11.1.7) prxr1 - Arabidopsis
  misc_feature (1)..(330): Homolog of NCBI NO: 1403136 NR Description: peroxidase ATP1a [Arabidopsis thaliana]
  misc_feature (1)..(330): Homolog of NCBI NO: 18415810 NR Description: peroxidase, putative [Arabidopsis thaliana]
MGGKGVMMVAILCLWALSATSEAVTEAEPGLMMNFYKDTCPQAEDIVREQVKLLYKRHKNTAFSWLRNIFHDCAVESCDASLLLDSTRRELGEKEHDRSFGLRNFRYIEEIKEALERECPGVVSCSDILVLSAREGIEAVGGPYIPLKTGRRDGLKSRTDMLESYLPDHNESISVVLEKFKSIGIDTPGLVALLGSHSVGRTHCVKLVHRLYPEVDPSLNPDHVPHMLHKCPDSIPDPKAVQYVRNDRGTPMVLDNNYYRNILDNKGLLLVDHQLAHDKRTRPIVKKMAKDQAYFFKEFTRAIQILSENNPLTGSKGEIRKQCNLANKNH

SEQ ID NO: 34758 - protein, 324 aa, Arabidopsis thaliana
  peptide (1)..(324): Ceres Seq. ID no. 13509803
  misc_feature (1)..(324): Homolog of NCBI NO: 7433087 NR Description: peroxidase (EC 1.11.1.7) - upland cotton
  misc_feature (2)..(324): Homolog of NCBI NO: 7433096 NR Description: peroxidase (EC 1.11.1.7) prxr1 - Arabidopsis
  misc_feature (1)..(324): Homolog of NCBI NO: 1403136 NR Description: peroxidase ATP1a [Arabidopsis thaliana]
  misc_feature (1)..(324): Homolog of NCBI NO: 18415810 NR Description: peroxidase, putative [Arabidopsis thaliana]
  misc_feature (1)..(324): Homolog of NCBI NO: 7433087 NR Description: peroxidase (EC 1.11.1.7) - upland cotton
  misc_feature (2)..(324): Homolog of NCBI NO: 7433096 NR Description: peroxidase (EC 1.11.1.7) prxr1 - Arabidopsis
  misc_feature (1)..(324): Homolog of NCBI NO: 1403136 NR Description: peroxidase ATP1a [Arabidopsis thaliana]
  misc_feature (1)..(324): Homolog of NCBI NO: 18415810 NR Description: peroxidase, putative [Arabidopsis thaliana]
MMVAILCLWALSATSEAVTEAEPGLMMNFYKDTCPQAEDIVREQVKLLYKRHKNTAFSWLRNIFHDCAVESCDASLLLDSTRRELGEKEHDRSFGLRNFRYIEEIKEALERECPGVVSCSDILVLSAREGIEAVGGPYIPLKTGRRDGLKSRTDMLESYLPDHNESISVVLEKFKSIGIDTPGLVALLGSHSVGRTHCVKLVHRLYPEVDPSLNPDHVPHMLHKCPDSIPDPKAVQYVRNDRGTPMVLDNNYYRNILDNKGLLLVDHQLAHDKRTRPIVKKMAKDQAYFFKEFTRAIQILSENNPLTGSKGEIRKQCNLANKNH

SEQ ID NO: 34759 - protein, 323 aa, Arabidopsis thaliana
  peptide (1)..(323): Ceres Seq. ID no. 13509804
  misc_feature (1)..(323): Homolog of NCBI NO: 7433087 NR Description: peroxidase (EC 1.11.1.7) - upland cotton
  misc_feature (1)..(323): Homolog of NCBI NO: 7433096 NR Description: peroxidase (EC 1.11.1.7) prxr1 - Arabidopsis
  misc_feature (1)..(323): Homolog of NCBI NO: 1403136 NR Description: peroxidase ATP1a [Arabidopsis thaliana]
  misc_feature (1)..(323): Homolog of NCBI NO: 18415810 NR Description: peroxidase, putative [Arabidopsis thaliana]
  misc_feature (1)..(323): Homolog of NCBI NO: 7433087 NR Description: peroxidase (EC 1.11.1.7) - upland cotton
  misc_feature (1)..(323): Homolog of NCBI NO: 7433096 NR Description: peroxidase (EC 1.11.1.7) prxr1 - Arabidopsis
  misc_feature (1)..(323): Homolog of NCBI NO: 1403136 NR Description: peroxidase ATP1a [Arabidopsis thaliana]
  misc_feature (1)..(323): Homolog of NCBI NO: 18415810 NR Description: peroxidase, putative [Arabidopsis thaliana]
MVAILCLWALSATSEAVTEAEPGLMMNFYKDTCPQAEDIVREQVKLLYKRHKNTAFSWLRNIFHDCAVESCDASLLLDSTRRELGEKEHDRSFGLRNFRYIEEIKEALERECPGVVSCSDILVLSAREGIEAVGGPYIPLKTGRRDGLKSRTDMLESYLPDHNESISVVLEKFKSIGIDTPGLVALLGSHSVGRTHCVKLVHRLYPEVDPSLNPDHVPHMLHKCPDSIPDPKAVQYVRNDRGTPMVLDNNYYRNILDNKGLLLVDHQLAHDKRTRPIVKKMAKDQAYFFKEFTRAIQILSENNPLTGSKGEIRKQCNLANKNH

SEQ ID NO: 34760 - DNA, 950 bp, Arabidopsis thaliana
  misc_feature (1)..(950): Ceres Seq. ID no. 12337755
  misc_feature: MA Experiment ID: 108433 Result: Up-regulated in Transcription
  misc_feature: MA Experiment 108433 PARAMETER Experiment Name: At_rhl_Mutant2_cDNA_P Parameter: Age (day) Value: 7
  misc_feature: MA Experiment 108433 PARAMETER Experiment Name: At_rhl_Mutant2_cDNA_P Parameter: Organism Value: A. thaliana
  misc_feature: MA Experiment 108433 PARAMETER Experiment Name: At_rhl_Mutant2_cDNA_P Parameter: Plant Line Value: rhl Mutant vs. wt landsburg
  misc_feature: MA Experiment 108433 PARAMETER Experiment Name: At_rhl_Mutant2_cDNA_P Parameter: Tissue Value: Roots
  misc_feature: MA Experiment ID: 108434 Result: Down-regulated in Transcription
  misc_feature: MA Experiment 108434 PARAMETER Experiment Name: At_Root_Tips_cDNA_P Parameter: Tissue Value: Root Tips
  misc_feature: MA Experiment ID: 108461 Result: Up-regulated in Transcription
  misc_feature: MA Experiment 108461 PARAMETER Experiment Name: At_Germinating_Seeds_cDNA_P Parameter: Age (day) Value: 1 vs. 0
  misc_feature: MA Experiment 108461 PARAMETER Experiment Name: At_Germinating_Seeds_cDNA_P Parameter: Tissue Value: Germinating Seeds
  misc_feature: MA Experiment ID: 108462 Result: Up-regulated in Transcription
  misc_feature: MA Experiment 108462 PARAMETER Experiment Name: At_Germinating_Seeds_cDNA_P Parameter: Age (day) Value: 2 vs. 0
  misc_feature: MA Experiment 108462 PARAMETER Experiment Name: At_Germinating_Seeds_cDNA_P Parameter: Tissue Value: Germinating Seeds
  misc_feature: MA Experiment ID: 108488 Result: Down-regulated in Transcription
  misc_feature: MA Experiment ID: 108579 Result: Down-regulated in Transcription
  misc_feature: MA Experiment 108579 PARAMETER Experiment Name: At_4deg_Cold_cDNA_P Parameter: Temperature (deg C) Value: 4 vs. 22
  misc_feature: MA Experiment 108579 PARAMETER Experiment Name: At_4deg_Cold_cDNA_P Parameter: Timepoint (hr) Value: 6
  misc_feature: MA Experiment 108579 PARAMETER Experiment Name: At_4deg_Cold_cDNA_P Parameter: Tissue Value: Aerial
  misc_feature: MA Experiment ID: 108595 Result: Down-regulated in Transcription
  misc_feature: MA Experiment 108595 PARAMETER Experiment Name: At_Ler-pi_Ovule_cDNA_P Parameter: Plant Line Value: null
  misc_feature: MA Experiment ID: 20000179 Result: Up-regulated in Transcription
  misc_feature: MA Experiment 20000179 PARAMETER Experiment Name: At_Germinating_Seeds_P Parameter: Age (hr) Value: 6 vs. 0
  misc_feature: MA Experiment 20000179 PARAMETER Experiment Name: At_Germinating_Seeds_P Parameter: Tissue Value: Germinating Seeds
  misc_feature: MA Experiment ID: 20000180 Result: Up-regulated in Transcription
  misc_feature: MA Experiment 20000180 PARAMETER Experiment Name: At_Germinating_Seeds_P Parameter: Age (hr) Value: 24 vs. 0
  misc_feature: MA Experiment 20000180 PARAMETER Experiment Name: At_Germinating_Seeds_P Parameter: Tissue Value: Germinating Seeds
  misc_feature: MA Experiment ID: 20000214 Result: Down-regulated in Transcription
  misc_feature: MA Experiment 20000214 PARAMETER Experiment Name: At_4deg_Cold_P Parameter: Timepoint (hr) Value: 6
  misc_feature: MA Experiment ID: 20000452 Result: Down-regulated in Transcription
  misc_feature: MA Experiment 20000452 PARAMETER Experiment Name: At_CS6879_Shoots-Roots_P Parameter: Age (day) Value: 14
  misc_feature: MA Experiment 20000452 PARAMETER Experiment Name: At_CS6879_Shoots-Roots_P Parameter: Organism Value: A. thaliana
  misc_feature: MA Experiment 20000452 PARAMETER Experiment Name: At_CS6879_Shoots-Roots_P Parameter: Plant Line Value: CS6879 vs. WS
  misc_feature: MA Experiment 20000452 PARAMETER Experiment Name: At_CS6879_Shoots-Roots_P Parameter: Tissue Value: Shoots
  misc_feature: MA Experiment ID: 20000573 Result: Down-regulated in Transcription
  misc_feature: MA Experiment 20000573 PARAMETER Experiment Name: At_100uM_ABA_Mutants__P Parameter: Organism Value: A. thaliana
  misc_feature: MA Experiment 20000573 PARAMETER Experiment Name: At_100uM_ABA_Mutants__P Parameter: Plant Line Value: CS22 vs. Ler wt
  misc_feature: MA Experiment 20000573 PARAMETER Experiment Name: At_100uM_ABA_Mutants__P Parameter: Timepoint (hr) Value: N/A
  misc_feature: MA Experiment 20000573 PARAMETER Experiment Name: At_100uM_ABA_Mutants__P Parameter: Tissue Value: Whole Plant
  misc_feature: MA Experiment 20000573 PARAMETER Experiment Name: At_100uM_ABA_Mutants__P Parameter: Treatment Value: None
  misc_feature: MA Experiment ID: 20001248 Result: Up-regulated in Transcription
  misc_feature: MA Experiment 20001248 PARAMETER Experiment Name: At_Far-red-induction_P Parameter: Age (day) Value: 7
  misc_feature: MA Experiment 20001248 PARAMETER Experiment Name: At_Far-red-induction_P Parameter: Light Value: Far-red vs. White
  misc_feature: MA Experiment 20001248 PARAMETER Experiment Name: At_Far-red-induction_P Parameter: Organism Value: A. thaliana
  misc_feature: MA Experiment 20001248 PARAMETER Experiment Name: At_Far-red-induction_P Parameter: Plant Line Value: Columbia
  misc_feature: MA Experiment 20001248 PARAMETER Experiment Name: At_Far-red-induction_P Parameter: Timepoint (hr) Value: 4
  misc_feature: MA Experiment 20001248 PARAMETER Experiment Name: At_Far-red-induction_P Parameter: Tissue Value: Whole Plant
  misc_feature: MA Experiment ID: 20001450 Result: Up-regulated in Transcription
  misc_feature: MA Experiment 20001450 PARAMETER Experiment Name: At_Far-red-induction_P Parameter: Age (day) Value: 7
  misc_feature: MA Experiment 20001450 PARAMETER Experiment Name: At_Far-red-induction_P Parameter: Light Value: Far-red vs. White
  misc_feature: MA Experiment 20001450 PARAMETER Experiment Name: At_Far-red-induction_P Parameter: Organism Value: A. thaliana
  misc_feature: MA Experiment 20001450 PARAMETER Experiment Name: At_Far-red-induction_P Parameter: Plant Line Value: Columbia
  misc_feature: MA Experiment 20001450 PARAMETER Experiment Name: At_Far-red-induction_P Parameter: Timepoint (hr) Value: 8
  misc_feature: MA Experiment 20001450 PARAMETER Experiment Name: At_Far-red-induction_P Parameter: Tissue Value: Whole Plant
  misc_feature: MA Experiment ID: 20001451 Result: Up-regulated in Transcription
  misc_feature: MA Experiment 20001451 PARAMETER Experiment Name: At_Far-red-induction_P Parameter: Age (day) Value: 7
  misc_feature: MA Experiment 20001451 PARAMETER Experiment Name: At_Far-red-induction_P Parameter: Light Value: Far-red vs. White
  misc_feature: MA Experiment 20001451 PARAMETER Experiment Name: At_Far-red-induction_P Parameter: Organism Value: A. thaliana
  misc_feature: MA Experiment 20001451 PARAMETER Experiment Name: At_Far-red-induction_P Parameter: Plant Line Value: Columbia
  misc_feature: MA Experiment 20001451 PARAMETER Experiment Name: At_Far-red-induction_P Parameter: Timepoint (hr) Value: 24
  misc_feature: MA Experiment 20001451 PARAMETER Experiment Name: At_Far-red-induction_P Parameter: Tissue Value: Whole Plant
  misc_feature: MA Experiment ID: 20001557 Result: Down-regulated in Transcription
  misc_feature: MA Experiment 20001557 PARAMETER Experiment Name: At_Drought_Soil_Dry_P Parameter: Age (day) Value: 27
  misc_feature: MA Experiment 20001557 PARAMETER Experiment Name: At_Drought_Soil_Dry_P Parameter: Organism Value: A. thaliana
  misc_feature: MA Experiment 20001557 PARAMETER Experiment Name: At_Drought_Soil_Dry_P Parameter: Plant Line Value: WS
  misc_feature: MA Experiment 20001557 PARAMETER Experiment Name: At_Drought_Soil_Dry_P Parameter: Post Timepoint (hr) Value: 3
  misc_feature: MA Experiment 20001557 PARAMETER Experiment Name: At_Drought_Soil_Dry_P Parameter: Post-Treatment Value: Re-Water vs. No Drought
  misc_feature: MA Experiment 20001557 PARAMETER Experiment Name: At_Drought_Soil_Dry_P Parameter: Timepoint (day) Value: 13
  misc_feature: MA Experiment 20001557 PARAMETER Experiment Name: At_Drought_Soil_Dry_P Parameter: Treatment Value: Drought vs. No Drought
  misc_feature: MA Experiment ID: 20001905 Result: Up-regulated in Transcription
  misc_feature: MA Experiment 20001905 PARAMETER Experiment Name: At_Drought_Reproduction_P Parameter: Age (day) Value: 40
  misc_feature: MA Experiment 20001905 PARAMETER Experiment Name: At_Drought_Reproduction_P Parameter: Organism Value: A. thaliana
  misc_feature: MA Experiment 20001905 PARAMETER Experiment Name: At_Drought_Reproduction_P Parameter: Plant Line Value: WS
  misc_feature: MA Experiment 20001905 PARAMETER Experiment Name: At_Drought_Reproduction_P Parameter: Timepoint (day) Value: 10
  misc_feature: MA Experiment 20001905 PARAMETER Experiment Name: At_Drought_Reproduction_P Parameter: Tissue Value: Rosettes
  misc_feature: MA Experiment 20001905 PARAMETER Experiment Name: At_Drought_Reproduction_P Parameter: Treatment Value: Drought vs. No Drought
acaaattcactttccacaattaatctctctcccaaatctcaattttggactcgtctgcttttgtttatataaacacttctcttcttcttcaatctccacacaccacaacaaaaccacctaccttcttcgatttctccagaaatcctccttcaagttcatactcatggaagaagctaaagtggaagcaaaagatggtaccatctccgtagcttctgcattttccggtcaccaacaagctgttcacgatagcgaccataaattcctaacgcaagctgttgaagaagcttacaagggagtggactgtggtgatggtggcccatttggtgcggtgattgtgcataataacgaggttgtcgctagctgccacaatatggttttgaaatatactgacccaactgcacatgctgaagtcactgccattagagaggcatgtaagaaacttaacaaaatcgagttatcagaatgcgagatttacgcatcttgtgagccatgtccgatgtgcttcggagccatccatctctcgagactcaagaggttggtttatggagccaaagccgaagcagctatagccatcgggtttgatgacttcatagctgatgctttgagaggcacgggggtttaccagaaatctagtctggagatcaagaaagcagacgggaatggcgctgcgattgcggagcaagttttccagaacacaaaggagaagttccgtttatactaaagcacttctccattaccacattcttcttcttcttctccttcatgatggtaattagaagtagtagaagaagaactgcacttgctttaacttaaataaatctctgtttcaaattgttcattttaaaaacagaaggaaacgaaaaaaaaaaaaaaatcaatttcggttcttgttgacacgatttgtaatttcttttcttcatttgaattgaactggtaaatactttcttctc

SEQ ID NO: 34761 - protein, 239 aa, Arabidopsis thaliana
  peptide (1)..(239): Ceres Seq. ID no. 12337756
  misc_feature (81)..(183): Pfam Name: Cytidine and deoxycytidylate deaminase Pfam Description: Cytidine and deoxycytidylate deaminase
  misc_feature (84)..(235): Homolog of NCBI NO: 39591749 NR Description: Hypothetical protein CBG18226 [Caenorhabditis
  misc_feature (86)..(218): Homolog of NCBI NO: 39582012 NR Description: Hypothetical protein CBG09150 [Caenorhabditis
  misc_feature (86)..(218): Homolog of NCBI NO: 17554608 NR Description: Cytidine, cytosine, dCTP et al deaminase
  misc_feature (87)..(212): Homolog of NCBI NO: 23021911 NR Description: hypothetical protein [Clostridium thermocellum
  misc_feature (124)..(238): Homolog of NCBI NO: 15229953 NR Description: unknown protein; protein id: At3g05300.1
  misc_feature (60)..(239): Homolog of NCBI NO: 23928436 NR Description: putative cytidine deaminase [Zea mays]
  misc_feature (60)..(239): Homolog of NCBI NO: 3204108 NR Description: putative cytidine deaminase; putative
  misc_feature (55)..(239): Homolog of NCBI NO: 40714681 NR Description: putative deoxycytidine deaminase
  misc_feature (55)..(239): Homolog of NCBI NO: 18266045 NR Description: deoxycytidine deaminase [Brassica oleracea]
  misc_feature (55)..(239): Homolog of NCBI NO: 15241124 NR Description: putative cytidine deaminase - like
QIHFPQLISLPNLNFGLVCFCLYKHFSSSSISTHHNKTTYLLRFLQKSSFKFILMEEAKVEAKDGTISVASAFSGHQQAVHDSDHKFLTQAVEEAYKGVDCGDGGPFGAVIVHNNEVVASCHNMVLKYTDPTAHAEVTAIREACKKLNKIELSECEIYASCEPCPMCFGAIHLSRLKRLVYGAKAEAAIAIGFDDFIADALRGTGVYQKSSLEIKKADGNGAAIAEQVFQNTKEKFRLY

SEQ ID NO: 34762 - protein, 185 aa, Arabidopsis thaliana; identical to SEQ ID NO: 23876
  peptide (1)..(185): Ceres Seq. ID no. 12337757
  misc_feature (27)..(129): Pfam Name: Cytidine and deoxycytidylate deaminase Pfam Description: Cytidine and deoxycytidylate deaminase
  misc_feature (30)..(181): Homolog of NCBI NO: 39591749 NR Description: Hypothetical protein CBG18226 [Caenorhabditis
  misc_feature (32)..(164): Homolog of NCBI NO: 39582012 NR Description: Hypothetical protein CBG09150 [Caenorhabditis
  misc_feature (32)..(164): Homolog of NCBI NO: 17554608 NR Description: Cytidine, cytosine, dCTP et al deaminase
  misc_feature (33)..(158): Homolog of NCBI NO: 23021911 NR Description: hypothetical protein [Clostridium thermocellum
  misc_feature (70)..(184): Homolog of NCBI NO: 15229953 NR Description: unknown protein; protein id: At3g05300.1
  misc_feature (6)..(185): Homolog of NCBI NO: 23928436 NR Description: putative cytidine deaminase [Zea mays]
  misc_feature (6)..(185): Homolog of NCBI NO: 3204108 NR Description: putative cytidine deaminase; putative
  misc_feature (1)..(185): Homolog of NCBI NO: 40714681 NR Description: putative deoxycytidine deaminase
  misc_feature (1)..(185): Homolog of NCBI NO: 18266045 NR Description: deoxycytidine deaminase [Brassica oleracea]
  misc_feature (1)..(185): Homolog of NCBI NO: 15241124 NR Description: putative cytidine deaminase - like

SEQ ID NO: 34763 - DNA, 1429 bp, Arabidopsis thaliana
  misc_feature (1)..(1429): Ceres Seq. ID no. 12327639
  misc_feature: MA Experiment ID: 108434 Result: Down-regulated in Transcription
  misc_feature: MA Experiment 108434 PARAMETER Experiment Name: At_Root_Tips_cDNA_P Parameter: Tissue Value: Root Tips
  misc_feature: MA Experiment ID: 108464 Result: Down-regulated in Transcription
  misc_feature: MA Experiment 108464 PARAMETER Experiment Name: At_Germinating_Seeds_cDNA_P Parameter: Age (day) Value: 4 vs. 0
  misc_feature: MA Experiment 108464 PARAMETER Experiment Name: At_Germinating_Seeds_cDNA_P Parameter: Tissue Value: Germinating Seeds
  misc_feature: MA Experiment ID: 108573 Result: Up-regulated in Transcription
  misc_feature: MA Experiment 108573 PARAMETER Experiment Name: At_Drought_cDNA_P Parameter: Timepoint (hr) Value: 6
  misc_feature: MA Experiment 108573 PARAMETER Experiment Name: At_Drought_cDNA_P Parameter: Tissue Value: Aerial
  misc_feature: MA Experiment 108573 PARAMETER Experiment Name: At_Drought_cDNA_P Parameter: Treatment Value: Drought vs. No Drought
  misc_feature: MA Experiment ID: 108577 Result: Down-regulated in Transcription
  misc_feature: MA Experiment 108577 PARAMETER Experiment Name: At_42deg_Heat_cDNA_P Parameter: Temperature (deg C) Value: 42 vs. 22
  misc_feature: MA Experiment 108577 PARAMETER Experiment Name: At_42deg_Heat_cDNA_P Parameter: Timepoint (hr) Value: 6
  misc_feature: MA Experiment 108577 PARAMETER Experiment Name: At_42deg_Heat_cDNA_P Parameter: Tissue Value: Aerial
  misc_feature: MA Experiment ID: 108579 Result: Down-regulated in Transcription
  misc_feature: MA Experiment 108579 PARAMETER Experiment Name: At_4deg_Cold_cDNA_P Parameter: Temperature (deg C) Value: 4 vs. 22
  misc_feature: MA Experiment 108579 PARAMETER Experiment Name: At_4deg_Cold_cDNA_P Parameter: Timepoint (hr) Value: 6
  misc_feature: MA Experiment 108579 PARAMETER Experiment Name: At_4deg_Cold_cDNA_P Parameter: Tissue Value: Aerial
  misc_feature: MA Experiment ID: 108605 Result: Up-regulated in Transcription
  misc_feature: MA Experiment 108605 PARAMETER Experiment Name: At_100uM_ABA_cDNA_P Parameter: Timepoint (hr) Value: 6
  misc_feature: MA Experiment 108605 PARAMETER Experiment Name: At_100uM_ABA_cDNA_P Parameter: Tissue Value: Aerial
  misc_feature: MA Experiment 108605 PARAMETER Experiment Name: At_100uM_ABA_cDNA_P Parameter: Treatment Value: 100uM ABA vs. No Treatment
  misc_feature: MA Experiment ID: 108609 Result: Up-regulated in Transcription
  misc_feature: MA Experiment 108609 PARAMETER Experiment Name: At_100uM_ABA_cDNA_P Parameter: Timepoint (hr) Value: 24
  misc_feature: MA Experiment 108609 PARAMETER Experiment Name: At_100uM_ABA_cDNA_P Parameter: Tissue Value: Aerial
  misc_feature: MA Experiment 108609 PARAMETER Experiment Name: At_100uM_ABA_cDNA_P Parameter: Treatment Value: 100uM ABA vs. No Treatment
  misc_feature: MA Experiment ID: 20000069 Result: Up-regulated in Transcription
  misc_feature: MA Experiment 20000069 PARAMETER Experiment Name: At_100uM_ABA_Mutants_cDNA_P Parameter: Plant Line Value: CS23
  misc_feature: MA Experiment 20000069 PARAMETER Experiment Name: At_100uM_ABA_Mutants_cDNA_P Parameter: Timepoint (hr) Value: 6
  misc_feature: MA Experiment 20000069 PARAMETER Experiment Name: At_100uM_ABA_Mutants_cDNA_P Parameter: Tissue Value: Aerial
  misc_feature: MA Experiment 20000069 PARAMETER Experiment Name: At_100uM_ABA_Mutants_cDNA_P Parameter: Treatment Value: 100uM ABA vs. No Treatment
  misc_feature: MA Experiment ID: 20000070 Result: Up-regulated in Transcription
  misc_feature: MA Experiment 20000070 PARAMETER Experiment Name: At_100uM_ABA_Mutants_cDNA_P Parameter: Plant Line Value: CS24
  misc_feature: MA Experiment 20000070 PARAMETER Experiment Name: At_100uM_ABA_Mutants_cDNA_P Parameter: Timepoint (hr) Value: 6
  misc_feature: MA Experiment 20000070 PARAMETER Experiment Name: At_100uM_ABA_Mutants_cDNA_P Parameter: Tissue Value: Aerial
  misc_feature: MA Experiment 20000070 PARAMETER Experiment Name: At_100uM_ABA_Mutants_cDNA_P Parameter: Treatment Value: 100uM ABA vs. No Treatment
  misc_feature: MA Experiment ID: 20000071 Result: Up-regulated in Transcription
  misc_feature: MA Experiment 20000071 PARAMETER Experiment Name: At_100uM_ABA_Mutants_cDNA_P Parameter: Plant Line Value: CS8104
  misc_feature: MA Experiment 20000071 PARAMETER Experiment Name: At_100uM_ABA_Mutants_cDNA_P Parameter: Timepoint (hr) Value: 6
  misc_feature: MA Experiment 20000071 PARAMETER Experiment Name: At_100uM_ABA_Mutants_cDNA_P Parameter: Tissue Value: Aerial
  misc_feature: MA Experiment 20000071 PARAMETER Experiment Name: At_100uM_ABA_Mutants_cDNA_P Parameter: Treatment Value: 100uM ABA vs. No Treatment
  misc_feature: MA Experiment ID: 20000072 Result: Up-regulated in Transcription
  misc_feature: MA Experiment 20000072 PARAMETER Experiment Name: At_100uM_ABA_Mutants_cDNA_P Parameter: Plant Line Value: CS8105
  misc_feature: MA Experiment 20000072 PARAMETER Experiment Name: At_100uM_ABA_Mutants_cDNA_P Parameter: Timepoint (hr) Value: 6
  misc_feature: MA Experiment 20000072 PARAMETER Experiment Name: At_100uM_ABA_Mutants_cDNA_P Parameter: Tissue Value: Aerial
  misc_feature: MA Experiment 20000072 PARAMETER Experiment Name: At_100uM_ABA_Mutants_cDNA_P Parameter: Treatment Value: 100uM ABA vs. No Treatment
  misc_feature: MA Experiment ID: 20000086 Result: Up-regulated in Transcription
  misc_feature: MA Experiment 20000086 PARAMETER Experiment Name: At_100uM_ABA_Mutants_cDNA_P Parameter: Plant Line Value: CS22
  misc_feature: MA Experiment 20000086 PARAMETER Experiment Name: At_100uM_ABA_Mutants_cDNA_P Parameter: Timepoint (hr) Value: 6
  misc_feature: MA Experiment 20000086 PARAMETER Experiment Name: At_100uM_ABA_Mutants_cDNA_P Parameter: Tissue Value: Aerial
  misc_feature: MA Experiment 20000086 PARAMETER Experiment Name: At_100uM_ABA_Mutants_cDNA_P Parameter: Treatment Value: 100uM ABA vs. No Treatment
  misc_feature: MA Experiment ID: 20000087 Result: Up-regulated in Transcription
  misc_feature: MA Experiment 20000087 PARAMETER Experiment Name: At_100uM_ABA_Mutants_cDNA_P Parameter: Plant Line Value: WS
  misc_feature: MA Experiment 20000087 PARAMETER Experiment Name: At_100uM_ABA_Mutants_cDNA_P Parameter: Timepoint (hr) Value: 6
  misc_feature: MA Experiment 20000087 PARAMETER Experiment Name: At_100uM_ABA_Mutants_cDNA_P Parameter: Tissue Value: Aerial
  misc_feature: MA Experiment 20000087 PARAMETER Experiment Name: At_100uM_ABA_Mutants_cDNA_P Parameter: Treatment Value: 100uM ABA vs. No Treatment
  misc_feature: MA Experiment ID: 20000088 Result: Up-regulated in Transcription
  misc_feature: MA Experiment 20000088 PARAMETER Experiment Name: At_100uM_ABA_Mutants_cDNA_P Parameter: Plant Line Value: Landsberg
  misc_feature: MA Experiment 20000088 PARAMETER Experiment Name: At_100uM_ABA_Mutants_cDNA_P Parameter: Timepoint (hr) Value: 6
  misc_feature: MA Experiment 20000088 PARAMETER Experiment Name: At_100uM_ABA_Mutants_cDNA_P Parameter: Tissue Value: Aerial
  misc_feature: MA Experiment 20000088 PARAMETER Experiment Name: At_100uM_ABA_Mutants_cDNA_P Parameter: Treatment Value: 100uM ABA vs. No Treatment
  misc_feature: MA Experiment ID: 20000090 Result: Up-regulated in Transcription
  misc_feature: MA Experiment ID: 20000169 Result: Up-regulated in Transcription
  misc_feature: MA Experiment 20000169 PARAMETER Experiment Name: At_100uM_ABA_P Parameter: Age (day) Value: 14
  misc_feature: MA Experiment 20000169 PARAMETER Experiment Name: At_100uM_ABA_P Parameter: Organism Value: A. thaliana
  misc_feature: MA Experiment 20000169 PARAMETER Experiment Name: At_100uM_ABA_P Parameter: Plant Line Value: WS
  misc_feature: MA Experiment 20000169 PARAMETER Experiment Name: At_100uM_ABA_P Parameter: Timepoint (hr) Value: 6
  misc_feature: MA Experiment 20000169 PARAMETER Experiment Name: At_100uM_ABA_P Parameter: Tissue Value: Aerial
  misc_feature: MA Experiment 20000169 PARAMETER Experiment Name: At_100uM_ABA_P Parameter: Treatment Value: 100uM ABA vs. No Treatment
  misc_feature: MA Experiment ID: 20000173 Result: Down-regulated in Transcription
  misc_feature: MA Experiment 20000173 PARAMETER Experiment Name: At_42deg_Heat_P Parameter: Age (day) Value: 14
  misc_feature: MA Experiment 20000173 PARAMETER Experiment Name: At_42deg_Heat_P Parameter: Organism Value: A. thaliana
  misc_feature: MA Experiment 20000173 PARAMETER Experiment Name: At_42deg_Heat_P Parameter: Plant Line Value: WS
  misc_feature: MA Experiment 20000173 PARAMETER Experiment Name: At_42deg_Heat_P Parameter: Temperature (deg C) Value: 42 vs. 22
  misc_feature: MA Experiment 20000173 PARAMETER Experiment Name: At_42deg_Heat_P Parameter: Timepoint (hr) Value: 6
  misc_feature: MA Experiment 20000173 PARAMETER Experiment Name: At_42deg_Heat_P Parameter: Tissue Value: Aerial
  misc_feature: MA Experiment ID: 20000182 Result: Up-regulated in Transcription
  misc_feature: MA Experiment 20000182 PARAMETER Experiment Name: At_2mM_SA_P Parameter: Age (day) Value: 14
  misc_feature: MA Experiment 20000182 PARAMETER Experiment Name: At_2mM_SA_P Parameter: Organism Value: A. thaliana
  misc_feature: MA Experiment 20000182 PARAMETER Experiment Name: At_2mM_SA_P Parameter: Plant Line Value: WS
  misc_feature: MA Experiment 20000182 PARAMETER Experiment Name: At_2mM_SA_P Parameter: Timepoint (hr) Value: 6
  misc_feature: MA Experiment 20000182 PARAMETER Experiment Name: At_2mM_SA_P Parameter: Tissue Value: Aerial
  misc_feature: MA Experiment 20000182 PARAMETER Experiment Name: At_2mM_SA_P Parameter: Treatment Value: 2mM SA vs. No Treatment
  misc_feature: MA Experiment ID: 20000234 Result: Down-regulated in Transcription
  misc_feature: MA Experiment 20000234 PARAMETER Experiment Name: At_Siliques_P Parameter: Age (day) Value: 21
  misc_feature: MA Experiment 20000234 PARAMETER Experiment Name: At_Siliques_P Parameter: Organism Value: A. thaliana
  misc_feature: MA Experiment 20000234 PARAMETER Experiment Name: At_Siliques_P Parameter: Plant Line Value: WS
  misc_feature: MA Experiment 20000234 PARAMETER Experiment Name: At_Siliques_P Parameter: Tissue Value: Less Than 5mm Siliques vs. Whole Plant
  misc_feature: MA Experiment ID: 20000436 Result: Up-regulated in Transcription
  misc_feature: MA Experiment 20000436 PARAMETER Experiment Name: At_Drought_P Parameter: Age (day) Value: 7
  misc_feature: MA Experiment 20000436 PARAMETER Experiment Name: At_Drought_P Parameter: Organism Value: A. thaliana
  misc_feature: MA Experiment 20000436 PARAMETER Experiment Name: At_Drought_P Parameter: Plant Line Value: WS
  misc_feature: MA Experiment 20000436 PARAMETER Experiment Name: At_Drought_P Parameter: Timepoint (hr) Value: 12
  misc_feature: MA Experiment 20000436 PARAMETER Experiment Name: At_Drought_P Parameter: Tissue Value: Whole Plant
  misc_feature: MA Experiment 20000436 PARAMETER Experiment Name: At_Drought_P Parameter: Treatment Value: Drought vs. No Drought
  misc_feature: MA Experiment ID: 20000437 Result: Up-regulated in Transcription
  misc_feature: MA Experiment 20000437 PARAMETER Experiment Name: At_Drought_P Parameter: Age (day) Value: 8
  misc_feature: MA Experiment 20000437 PARAMETER Experiment Name: At_Drought_P Parameter: Organism Value: A. thaliana
  misc_feature: MA Experiment 20000437 PARAMETER Experiment Name: At_Drought_P Parameter: Plant Line Value: WS
  misc_feature: MA Experiment 20000437 PARAMETER Experiment Name: At_Drought_P Parameter: Timepoint (hr) Value: 24
  misc_feature: MA Experiment 20000437 PARAMETER Experiment Name: At_Drought_P Parameter: Tissue Value: Whole Plant
  misc_feature: MA Experiment 20000437 PARAMETER Experiment Name: At_Drought_P Parameter: Treatment Value: Drought vs. No Drought
  misc_feature: MA Experiment ID: 20000453 Result: Up-regulated in Transcription
  misc_feature: MA Experiment 20000453 PARAMETER Experiment Name: At_100uM_ABA_P Parameter: Age (day) Value: 15
  misc_feature: MA Experiment 20000453 PARAMETER Experiment Name: At_100uM_ABA_P Parameter: Organism Value: A. thaliana
  misc_feature: MA Experiment 20000453 PARAMETER Experiment Name: At_100uM_ABA_P Parameter: Plant Line Value: WS
  misc_feature: MA Experiment 20000453 PARAMETER Experiment Name: At_100uM_ABA_P Parameter: Timepoint (hr) Value: 24
  misc_feature: MA Experiment 20000453 PARAMETER Experiment Name: At_100uM_ABA_P Parameter: Tissue Value: Aerial
  misc_feature: MA Experiment 20000453 PARAMETER Experiment Name: At_100uM_ABA_P Parameter: Treatment Value: 100uM ABA vs. No Treatment
  misc_feature: MA Experiment ID: 20000709 Result: Down-regulated in Transcription
  misc_feature: MA Experiment 20000709 PARAMETER Experiment Name: At_15mM_NH4NO3_L-to-H_P Parameter: Age (hr) Value: 14
  misc_feature: MA Experiment 20000709 PARAMETER Experiment Name: At_15mM_NH4NO3_L-to-H_P Parameter: Organism Value: A. thaliana
  misc_feature: MA Experiment 20000709 PARAMETER Experiment Name: At_15mM_NH4NO3_L-to-H_P Parameter: Plant Line Value: WS
  misc_feature: MA Experiment 20000709 PARAMETER Experiment Name: At_15mM_NH4NO3_L-to-H_P Parameter: Timepoint (hr) Value: 4
  misc_feature: MA Experiment 20000709 PARAMETER Experiment Name: At_15mM_NH4NO3_L-to-H_P Parameter: Tissue Value: Aerial
  misc_feature: MA Experiment 20000709 PARAMETER Experiment Name: At_15mM_NH4NO3_L-to-H_P Parameter: Treatment Value: 15mM NH4NO3 vs. 30mM Mannitol
  misc_feature: MA Experiment ID: 20000794 Result: Up-regulated in Transcription
  misc_feature: MA Experiment 20000794 PARAMETER Experiment Name: At_Petals_P Parameter: Age (day) Value: 23-25 days
  misc_feature: MA Experiment 20000794 PARAMETER Experiment Name: At_Petals_P Parameter: Plant Line Value: WS
  misc_feature: MA Experiment 20000794 PARAMETER Experiment Name: At_Petals_P Parameter: Tissue Value: Petals vs. Whole plant
  misc_feature: MA Experiment ID: 20001558 Result: Down-regulated in Transcription
  misc_feature: MA Experiment 20001558 PARAMETER Experiment Name: At_Drought_Soil_Dry_P Parameter: Age (day) Value: 27
  misc_feature: MA Experiment 20001558 PARAMETER Experiment Name: At_Drought_Soil_Dry_P Parameter: Organism Value: A. thaliana
  misc_feature: MA Experiment 20001558 PARAMETER Experiment Name: At_Drought_Soil_Dry_P Parameter: Plant Line Value: WS
  misc_feature: MA Experiment 20001558 PARAMETER Experiment Name: At_Drought_Soil_Dry_P Parameter: Post Timepoint (hr) Value: 6
  misc_feature: MA Experiment 20001558 PARAMETER Experiment Name: At_Drought_Soil_Dry_P Parameter: Post-Treatment Value: Re-Water vs. No Drought
  misc_feature: MA Experiment 20001558 PARAMETER Experiment Name: At_Drought_Soil_Dry_P Parameter: Timepoint (day) Value: 13
  misc_feature: MA Experiment 20001558 PARAMETER Experiment Name: At_Drought_Soil_Dry_P Parameter: Treatment Value: Drought vs. No Drought
  misc_feature: MA Experiment ID: 20001559 Result: Up-regulated in Transcription
  misc_feature: MA Experiment 20001559 PARAMETER Experiment Name: At_Drought_Soil_Dry_P Parameter: Age (day) Value: 28
  misc_feature: MA Experiment 20001559 PARAMETER Experiment Name: At_Drought_Soil_Dry_P Parameter: Organism Value: A. thaliana
  misc_feature: MA Experiment 20001559 PARAMETER Experiment Name: At_Drought_Soil_Dry_P Parameter: Plant Line Value: WS
  misc_feature: MA Experiment 20001559 PARAMETER Experiment Name: At_Drought_Soil_Dry_P Parameter: Post Timepoint (hr) Value: 29
  misc_feature: MA Experiment 20001559 PARAMETER Experiment Name: At_Drought_Soil_Dry_P Parameter: Post-Treatment Value: Re-Water vs. No Drought
  misc_feature: MA Experiment 20001559 PARAMETER Experiment Name: At_Drought_Soil_Dry_P Parameter: Timepoint (day) Value: 14
  misc_feature: MA Experiment 20001559 PARAMETER Experiment Name: At_Drought_Soil_Dry_P Parameter: Treatment Value: Drought vs. No Drought
  misc_feature: MA Experiment ID: 20001560 Result: Down-regulated in Transcription
  misc_feature: MA Experiment 20001560 PARAMETER Experiment Name: At_Drought_Soil_Dry_P Parameter: Age (day) Value: 28
  misc_feature: MA Experiment 20001560 PARAMETER Experiment Name: At_Drought_Soil_Dry_P Parameter: Organism Value: A. thaliana
  misc_feature: MA Experiment 20001560 PARAMETER Experiment Name: At_Drought_Soil_Dry_P Parameter: Plant Line Value: WS
  misc_feature: MA Experiment 20001560 PARAMETER Experiment Name: At_Drought_Soil_Dry_P Parameter: Post Timepoint (hr) Value: None
  misc_feature: MA Experiment 20001560 PARAMETER Experiment Name: At_Drought_Soil_Dry_P Parameter: Post-Treatment Value: None
  misc_feature: MA Experiment 20001560 PARAMETER Experiment Name: At_Drought_Soil_Dry_P Parameter: Timepoint (day) Value: 14
  misc_feature: MA Experiment 20001560 PARAMETER Experiment Name: At_Drought_Soil_Dry_P Parameter: Treatment Value: Drought vs. No Drought
  misc_feature: MA Experiment ID: 20001904 Result: Up-regulated in Transcription
  misc_feature: MA Experiment 20001904 PARAMETER Experiment Name: At_Drought_Reproduction_P Parameter: Age (day) Value: 37
  misc_feature: MA Experiment 20001904 PARAMETER Experiment Name: At_Drought_Reproduction_P Parameter: Organism Value: A. thaliana
  misc_feature: MA Experiment 20001904 PARAMETER Experiment Name: At_Drought_Reproduction_P Parameter: Plant Line Value: WS
  misc_feature: MA Experiment 20001904 PARAMETER Experiment Name: At_Drought_Reproduction_P Parameter: Timepoint (day) Value: 7
  misc_feature: MA Experiment 20001904 PARAMETER Experiment Name: At_Drought_Reproduction_P Parameter: Tissue Value: Rosettes
  misc_feature: MA Experiment 20001904 PARAMETER Experiment Name: At_Drought_Reproduction_P Parameter: Treatment Value: Drought vs. No Drought
aagaaatgtctctgtcattgtgcagtagataagccactctctctctctttctctctttttgctattataaagaaaaagattcattctcccaccattgaggtttaacttatacaaacagatctttttgaaattggattcatctaagaagcagactctgttttcatggctgtttacaataccaaactctgtttggcctctgttttcttgctcttagggcttctcttggcttttgacttgaagggtatagaagcagaaagtcttaccaaacagaaactggactcgaagatacttcaggatgagattgtgaagaaagtcaacgaaaacccaaacgctggatggaaagctgctataaatgatcgattttcaaacgccactgttgcagagtttaagcgtcttctcggtgttaaaccaacaccaaagaagcatttcttaggtgttcctattgtgagccatgatccatctttgaagctacctaaagcttttgatgctagaactgcttggccacagtgcactagtattggaaacatcttagatcagggacattgtggttcttgctgggcatttggtgctgttgaatcactatcagatagattctgtatccaatttggcatgaacatttctttatcagtaaatgatctcctagcttgttgtggattccgttgtggtgatggttgtgacggtggctatccaattgctgcttggcaatacttttcgtatagcggtgttgtcacagaagagtgtgatccatactttgataataccggatgctctcacccgggttgcgaaccggcatatcctacaccgaaatgttcgaggaaatgcgttagcgacaacaaactatggagcgagtcgaagcattacagtgttagtacatacactgtgaaatctaatccacaagatatcatggcagaggtttataagaatggacctgttgaagtctcttttaccgtttatgaggattttgctcattacaaatctggagtctataagcacataacaggttctaacattggaggtcatgctgttaaacttattggttggggaactagcagtgaaggagaagattattggttgatggcaaatcaatggaacagaggctggggtgatgatggttatttcatgataaggagaggaactaatgaatgtggaattgaagatgaaccagtagctggtttgccttcaagcaagaatgtgtttagggttgataccggttcgaatgatcttccggttgcatcggtttaagatcaaagatggaaatgttgcatcggtttaatatcaaagatgaaaagttgtttgtaagatatatatgttatggttgttgtttccagtaaaagattccggtgactagaaattgttttctggttggctgtgaaaatgttatacaaataaacacttcaacttaagcaatataatatcatttctacttttc

SEQ ID NO: 34764 - protein, 359 aa, Arabidopsis thaliana
  peptide (1)..(359): Ceres Seq. ID no. 12327640
  misc_feature (103)..(338): Pfam Name: Papain family cysteine protease Pfam Description: Papain family cysteine protease
  misc_feature (15)..(350): Homolog of NCBI NO: 38639325 NR Description: cathepsin B-like cysteine proteinase [Solanum
  misc_feature (15)..(359): Homolog of NCBI NO: 14582576 NR Description: cathepsin B-like cysteine proteinase [Ipomoea
  misc_feature (8)..(344): Homolog of NCBI NO: 2129942 NR Description: cathepsin B-like cysteine proteinase (EC
  misc_feature (8)..(344): Homolog of NCBI NO: 609175 NR Description: cathepsin B-like cysteine proteinase [Nicotiana
  misc_feature (10)..(123): Homolog of NCBI NO: 18378945 NR Description: cathepsin B-like cysteine protease, putative
  misc_feature (126)..(359): Homolog of NCBI NO: 18378945 NR Description: cathepsin B-like cysteine protease, putative
  misc_feature (10)..(359): Homolog of NCBI NO: 2317912 NR Description: cathepsin B-like cysteine proteinase [Arabidopsis
  misc_feature (11)..(358): Homolog of NCBI NO: 18378947 NR Description: Expressed protein
  misc_feature (1)..(359): Homolog of NCBI NO: 30678927 NR Description: cathepsin B-like cysteine protease, putative
  misc_feature (1)..(359): Homolog of NCBI NO: 18411686 NR Description: cathepsin B-like cysteine protease, putative
MAVYNTKLCLASVFLLLGLLLAFDLKGIEAESLTKQKLDSKILQDEIVKKVNENPNAGWKAAINDRFSNATVAEFKRLLGVKPTPKKHFLGVPIVSHDPSLKLPKAFDARTAWPQCTSIGNILDQGHCGSCWAFGAVESLSDRFCIQFGMNISLSVNDLLACCGFRCGDGCDGGYPIAAWQYFSYSGVVTEECDPYFDNTGCSHPGCEPAYPTPKCSRKCVSDNKLWSESKHYSVSTYTVKSNPQDIMAEVYKNGPVEVSFTVYEDFAHYKSGVYKHITGSNIGGHAVKLIGWGTSSEGEDYWLMANQWNRGWGDDGYFMIRRGTNECGIEDEPVAGLPSSKNVFRVDTGSNDLPVASV

SEQ ID NO: 34765 - protein, 210 aa, Arabidopsis thaliana
  peptide (1)..(210): Ceres Seq. ID no. 12327641
  misc_feature (1)..(189): Pfam Name: Papain family cysteine protease Pfam Description: Papain family cysteine protease
  misc_feature (1)..(210): Homolog of NCBI NO: 6165885 NR Description: cathepsin B-like cysteine proteinase [Ipomoea
  misc_feature (1)..(201): Homolog of NCBI NO: 38639325 NR Description: cathepsin B-like cysteine proteinase [Solanum
  misc_feature (1)..(210): Homolog of NCBI NO: 14582576 NR Description: cathepsin B-like cysteine proteinase [Ipomoea
  misc_feature (1)..(195): Homolog of NCBI NO: 2129942 NR Description: cathepsin B-like cysteine proteinase (EC
  misc_feature (1)..(195): Homolog of NCBI NO: 609175 NR Description: cathepsin B-like cysteine proteinase [Nicotiana
  misc_feature (1)..(210): Homolog of NCBI NO: 18378945 NR Description: cathepsin B-like cysteine protease, putative
  misc_feature (1)..(210): Homolog of NCBI NO: 2317912 NR Description: cathepsin B-like cysteine proteinase [Arabidopsis
  misc_feature (1)..(209): Homolog of NCBI NO: 18378947 NR Description: Expressed protein
  misc_feature (1)..(210): Homolog of NCBI NO: 30678927 NR Description: cathepsin B-like cysteine protease, putative
  misc_feature (1)..(210): Homolog of NCBI NO: 18411686 NR Description: cathepsin B-like cysteine protease, putative
MNISLSVNDLLACCGFRCGDGCDGGYPIAAWQYFSYSGVVTEECDPYFDNTGCSHPGCEPAYPTPKCSRKCVSDNKLWSESKHYSVSTYTVKSNPQDIMAEVYKNGPVEVSFTVYEDFAHYKSGVYKHITGSNIGGHAVKLIGWGTSSEGEDYWLMANQWNRGWGDDGYFMIRRGTNECGIEDEPVAGLPSSKNVFRVDTGSNDLPVASV

SEQ ID NO: 34766 - DNA, 1068 bp, Arabidopsis thaliana
  misc_feature (1)..(1068): Ceres Seq. ID no. 13499742
  misc_feature: MA Experiment ID: 108435 Result: Down-regulated in Transcription
  misc_feature: MA Experiment 108435 PARAMETER Experiment Name: At_stm_Mutants_cDNA_P Parameter: Plant Line Value: wt Landsburg vs stm
  misc_feature: MA Experiment 108435 PARAMETER Experiment Name: At_stm_Mutants_cDNA_P Parameter: Tissue Value: Shoot Apical Meristem Region
  misc_feature: MA Experiment ID: 108461 Result: Up-regulated in Transcription
  misc_feature: MA Experiment 108461 PARAMETER Experiment Name: At_Germinating_Seeds_cDNA_P Parameter: Age (day) Value: 1 vs. 0
  misc_feature: MA Experiment 108461 PARAMETER Experiment Name: At_Germinating_Seeds_cDNA_P Parameter: Tissue Value: Germinating Seeds
  misc_feature: MA Experiment ID: 108462 Result: Up-regulated in Transcription
  misc_feature: MA Experiment 108462 PARAMETER Experiment Name: At_Germinating_Seeds_cDNA_P Parameter: Age (day) Value: 2 vs. 0
  misc_feature: MA Experiment 108462 PARAMETER Experiment Name: At_Germinating_Seeds_cDNA_P Parameter: Tissue Value: Germinating Seeds
  misc_feature: MA Experiment ID: 108464 Result: Up-regulated in Transcription
  misc_feature: MA Experiment 108464 PARAMETER Experiment Name: At_Germinating_Seeds_cDNA_P Parameter: Age (day) Value: 4 vs. 0
  misc_feature: MA Experiment 108464 PARAMETER Experiment Name: At_Germinating_Seeds_cDNA_P Parameter: Tissue Value: Germinating Seeds
  misc_feature: MA Experiment ID: 108595 Result: Down-regulated in Transcription
  misc_feature: MA Experiment 108595 PARAMETER Experiment Name: At_Ler-pi_Ovule_cDNA_P Parameter: Plant Line Value: null
  misc_feature: MA Experiment ID: 20000069 Result: Down-regulated in Transcription
  misc_feature: MA Experiment 20000069 PARAMETER Experiment Name: At_100uM_ABA_Mutants_cDNA_P Parameter: Plant Line Value: CS23
  misc_feature: MA Experiment 20000069 PARAMETER Experiment Name: At_100uM_ABA_Mutants_cDNA_P Parameter: Timepoint (hr) Value: 6
  misc_feature: MA Experiment 20000069 PARAMETER Experiment Name: At_100uM_ABA_Mutants_cDNA_P Parameter: Tissue Value: Aerial
  misc_feature: MA Experiment 20000069 PARAMETER Experiment Name: At_100uM_ABA_Mutants_cDNA_P Parameter: Treatment Value: 100uM ABA vs. No Treatment
  misc_feature: MA Experiment ID: 20000070 Result: Down-regulated in Transcription
  misc_feature: MA Experiment 20000070 PARAMETER Experiment Name: At_100uM_ABA_Mutants_cDNA_P Parameter: Plant Line Value: CS24
  misc_feature: MA Experiment 20000070 PARAMETER Experiment Name: At_100uM_ABA_Mutants_cDNA_P Parameter: Timepoint (hr) Value: 6
  misc_feature: MA Experiment 20000070 PARAMETER Experiment Name: At_100uM_ABA_Mutants_cDNA_P Parameter: Tissue Value: Aerial
  misc_feature: MA Experiment 20000070 PARAMETER Experiment Name: At_100uM_ABA_Mutants_cDNA_P Parameter: Treatment Value: 100uM ABA vs. No Treatment
  misc_feature: MA Experiment ID: 20000071 Result: Down-regulated in Transcription
  misc_feature: MA Experiment 20000071 PARAMETER Experiment Name: At_100uM_ABA_Mutants_cDNA_P Parameter: Plant Line Value: CS8104
  misc_feature: MA Experiment 20000071 PARAMETER Experiment Name: At_100uM_ABA_Mutants_cDNA_P Parameter: Timepoint (hr) Value: 6
  misc_feature: MA Experiment 20000071 PARAMETER Experiment Name: At_100uM_ABA_Mutants_cDNA_P Parameter: Tissue Value: Aerial
  misc_feature: MA Experiment 20000071 PARAMETER Experiment Name: At_100uM_ABA_Mutants_cDNA_P Parameter: Treatment Value: 100uM ABA vs. No Treatment
  misc_feature: MA Experiment ID: 20000086 Result: Down-regulated in Transcription
  misc_feature: MA Experiment 20000086 PARAMETER Experiment Name: At_100uM_ABA_Mutants_cDNA_P Parameter: Plant Line Value: CS22
  misc_feature: MA Experiment 20000086 PARAMETER Experiment Name: At_100uM_ABA_Mutants_cDNA_P Parameter: Timepoint (hr) Value: 6
  misc_feature: MA Experiment 20000086 PARAMETER Experiment Name: At_100uM_ABA_Mutants_cDNA_P Parameter: Tissue Value: Aerial
  misc_feature: MA Experiment 20000086 PARAMETER Experiment Name: At_100uM_ABA_Mutants_cDNA_P Parameter: Treatment Value: 100uM ABA vs. No Treatment
  misc_feature: MA Experiment ID: 20000087 Result: Down-regulated in Transcription
  misc_feature: MA Experiment 20000087 PARAMETER Experiment Name: At_100uM_ABA_Mutants_cDNA_P Parameter: Plant Line Value: WS
  misc_feature: MA Experiment 20000087 PARAMETER Experiment Name: At_100uM_ABA_Mutants_cDNA_P Parameter: Timepoint (hr) Value: 6
  misc_feature: MA Experiment 20000087 PARAMETER Experiment Name: At_100uM_ABA_Mutants_cDNA_P Parameter: Tissue Value: Aerial
  misc_feature: MA Experiment 20000087 PARAMETER Experiment Name: At_100uM_ABA_Mutants_cDNA_P Parameter: Treatment Value: 100uM ABA vs. No Treatment
  misc_feature: MA Experiment ID: 20000088 Result: Down-regulated in Transcription
  misc_feature: MA Experiment 20000088 PARAMETER Experiment Name: At_100uM_ABA_Mutants_cDNA_P Parameter: Plant Line Value: Landsberg
  misc_feature: MA Experiment 20000088 PARAMETER Experiment Name: At_100uM_ABA_Mutants_cDNA_P Parameter: Timepoint (hr) Value: 6
  misc_feature: MA Experiment 20000088 PARAMETER Experiment Name: At_100uM_ABA_Mutants_cDNA_P Parameter: Tissue Value: Aerial
  misc_feature: MA Experiment 20000088 PARAMETER Experiment Name: At_100uM_ABA_Mutants_cDNA_P Parameter: Treatment Value: 100uM ABA vs. No Treatment
  misc_feature: MA Experiment ID: 20000179 Result: Up-regulated in Transcription
  misc_feature: MA Experiment 20000179 PARAMETER Experiment Name: At_Germinating_Seeds_P Parameter: Age (hr) Value: 6 vs. 0
  misc_feature: MA Experiment 20000179 PARAMETER Experiment Name: At_Germinating_Seeds_P Parameter: Tissue Value: Germinating Seeds
  misc_feature: MA Experiment ID: 20000180 Result: Up-regulated in Transcription
  misc_feature: MA Experiment 20000180 PARAMETER Experiment Name: At_Germinating_Seeds_P Parameter: Age (hr) Value: 24 vs. 0
  misc_feature: MA Experiment 20000180 PARAMETER Experiment Name: At_Germinating_Seeds_P Parameter: Tissue Value: Germinating Seeds
aatctaatcactttctgcttcttcgcctacttcattcacatcttctttcctcttcctcctttgggttacttcttcgaatctcctgttgtttgcagaaatggagactggtgctggtataggtttgtaccctttgcatcgctgcaaaaccatttacctagtgagacatgctcaggggattcacaatgtggatggggagaagaattataaggcttacatgtctcatgactactttgatgctgagttgacccagcttggctggaaacaggtagatagtttgcgtaagcatgttcattccagtggacttcacaagaagatcgaactggtcatttcgtctccactgatgagaaccttgcaaactgctgttggtgtttttggtggagagggctacacggatatgagtgatgtactacctctaatggtagcaaatgcaggaaatagcagccgtgcagctatatcgagtttaaactgcccaccagttattacagaggagtcctgcagagagcatttgggagtgcatccatgtgatcagaggagaagtatcagcgactatcagtttcttttccctgcagttgacttttcactgatagaaagcgaggaagacaagttatggaaggctgatgttagagaaacgattgaagaacttgcagctagaggaaaaaagttcctgaactggctatggacacggaaagaaaaagagatagctattgtgacacacagtggtttcttgtttcacacattgaatgcactacaaaacgagtgtcatccagatgttaagaaggaaatttgcggccactttgctaattgtgagctacgttcaatggtcatcgtcgatagaagtatgttgggatcggacagttcggtgactgattatccaggaaagattccaaaggggattgatcttccaagtgatgctgttgtagatgataacaacatcaaagttgagtgattctttatgatggacactgcattgtcttcaacttttctatttatctatacacaaacaccttctttgctgtatgcaactctcttattagtattactattgactatcgagttaaagatcttact

SEQ ID NO: 34767 - protein, 282 aa, Arabidopsis thaliana
  peptide (1)..(282): Ceres Seq. ID no. 13499743
  misc_feature (16)..(254): Pfam Name: Phosphoglycerate mutase family Pfam Description: Phosphoglycerate mutase family
  misc_feature (1)..(282): Homolog of NCBI NO: 15237708 NR Description: ZW10-related protein [Arabidopsis thaliana]
METGAGIGLYPLHRCKTIYLVRHAQGIHNVDGEKNYKAYMSHDYFDAELTQLGWKQVDSLRKHVHSSGLHKKIELVISSPLMRTLQTAVGVFGGEGYTDMSDVLPLMVANAGNSSRAAISSLNCPPVITEESCREHLGVHPCDQRRSISDYQFLFPAVDFSLIESEEDKLWKADVRETIEELAARGKKFLNWLWTRKEKEIAIVTHSGFLFHTLNALQNECHPDVKKEICGHFANCELRSMVIVDRSMLGSDSSVTDYPGKIPKGIDLPSDAVVDDNNIKVE

SEQ ID NO: 34768 - protein, 243 aa, Arabidopsis thaliana
  peptide (1)..(243): Ceres Seq. ID no. 13499744
  misc_feature (1)..(215): Pfam Name: Phosphoglycerate mutase family Pfam Description: Phosphoglycerate mutase family
  misc_feature (1)..(243): Homolog of NCBI NO: 15237708 NR Description: ZW10-related protein [Arabidopsis thaliana]
MSHDYFDAELTQLGWKQVDSLRKHVHSSGLHKKIELVISSPLMRTLQTAVGVFGGEGYTDMSDVLPLMVANAGNSSRAAISSLNCPPVITEESCREHLGVHPCDQRRSISDYQFLFPAVDFSLIESEEDKLWKADVRETIEELAARGKKFLNWLWTRKEKEIAIVTHSGFLFHTLNALQNECHPDVKKEICGHFANCELRSMVIVDRSMLGSDSSVTDYPGKIPKGIDLPSDAVVDDNNIKVE

SEQ ID NO: 34769 - protein, 201 aa, Arabidopsis thaliana
  peptide (1)..(201): Ceres Seq. ID no. 13499745
  misc_feature (1)..(173): Pfam Name: Phosphoglycerate mutase family Pfam Description: Phosphoglycerate mutase family
  misc_feature (1)..(201): Homolog of NCBI NO: 15237708 NR Description: ZW10-related protein [Arabidopsis thaliana]
MRTLQTAVGVFGGEGYTDMSDVLPLMVANAGNSSRAAISSLNCPPVITEESCREHLGVHPCDQRRSISDYQFLFPAVDFSLIESEEDKLWKADVRETIEELAARGKKFLNWLWTRKEKEIAIVTHSGFLFHTLNALQNECHPDVKKEICGHFANCELRSMVIVDRSMLGSDSSVTDYPGKIPKGIDLPSDAVVDDNNIKVE

SEQ ID NO: 34770 - DNA, 969 bp, Arabidopsis thaliana
  misc_feature (1)..(969): Ceres Seq. ID no. 12384923
  misc_feature: MA Experiment ID: 108488 Result: Up-regulated in Transcription
  misc_feature: MA Experiment ID: 108569 Result: Up-regulated in Transcription
  misc_feature: MA Experiment 108569 PARAMETER Experiment Name: At_0.001%_MeJA__cDNA_P Parameter: Timepoint (hr) Value: 6
  misc_feature: MA Experiment 108569 PARAMETER Experiment Name: At_0.001%_MeJA__cDNA_P Parameter: Tissue Value: Aerial
  misc_feature: MA Experiment 108569 PARAMETER Experiment Name: At_0.001%_MeJA__cDNA_P Parameter: Treatment Value: 0.001% MeJA vs. No Treatment
  misc_feature: MA Experiment ID: 20000180 Result: Up-regulated in Transcription
  misc_feature: MA Experiment 20000180 PARAMETER Experiment Name: At_Germinating_Seeds_P Parameter: Age (hr) Value: 24 vs. 0
  misc_feature: MA Experiment 20000180 PARAMETER Experiment Name: At_Germinating_Seeds_P Parameter: Tissue Value: Germinating Seeds
  misc_feature: MA Experiment ID: 20000437 Result: Down-regulated in Transcription
  misc_feature: MA Experiment 20000437 PARAMETER Experiment Name: At_Drought_P Parameter: Age (day) Value: 8
  misc_feature: MA Experiment 20000437 PARAMETER Experiment Name: At_Drought_P Parameter: Organism Value: A. thaliana
  misc_feature: MA Experiment 20000437 PARAMETER Experiment Name: At_Drought_P Parameter: Plant Line Value: WS
  misc_feature: MA Experiment 20000437 PARAMETER Experiment Name: At_Drought_P Parameter: Timepoint (hr) Value: 24
  misc_feature: MA Experiment 20000437 PARAMETER Experiment Name: At_Drought_P Parameter: Tissue Value: Whole Plant
  misc_feature: MA Experiment 20000437 PARAMETER Experiment Name: At_Drought_P Parameter: Treatment Value: Drought vs. No Drought
  misc_feature: MA Experiment ID: 20000794 Result: Down-regulated in Transcription
  misc_feature: MA Experiment 20000794 PARAMETER Experiment Name: At_Petals_P Parameter: Age (day) Value: 23-25 days
  misc_feature: MA Experiment 20000794 PARAMETER Experiment Name: At_Petals_P Parameter: Plant Line Value: WS
  misc_feature: MA Experiment 20000794 PARAMETER Experiment Name: At_Petals_P Parameter: Tissue Value: Petals vs. Whole plant
  misc_feature: MA Experiment ID: 20001451 Result: Down-regulated in Transcription
  misc_feature: MA Experiment 20001451 PARAMETER Experiment Name: At_Far-red-induction_P Parameter: Age (day) Value: 7
  misc_feature: MA Experiment 20001451 PARAMETER Experiment Name: At_Far-red-induction_P Parameter: Light Value: Far-red vs. White
  misc_feature: MA Experiment 20001451 PARAMETER Experiment Name: At_Far-red-induction_P Parameter: Organism Value: A. thaliana
  misc_feature: MA Experiment 20001451 PARAMETER Experiment Name: At_Far-red-induction_P Parameter: Plant Line Value: Columbia
  misc_feature: MA Experiment 20001451 PARAMETER Experiment Name: At_Far-red-induction_P Parameter: Timepoint (hr) Value: 24
  misc_feature: MA Experiment 20001451 PARAMETER Experiment Name: At_Far-red-induction_P Parameter: Tissue Value: Whole Plant
  misc_feature: MA Experiment ID: 20001911 Result: Down-regulated in Transcription
  misc_feature: MA Experiment 20001911 PARAMETER Experiment Name: At_Drought_Reproduction_P Parameter: Age (day) Value: 40
  misc_feature: MA Experiment 20001911 PARAMETER Experiment Name: At_Drought_Reproduction_P Parameter: Organism Value: A. thaliana
  misc_feature: MA Experiment 20001911 PARAMETER Experiment Name: At_Drought_Reproduction_P Parameter: Plant Line Value: WS
  misc_feature: MA Experiment 20001911 PARAMETER Experiment Name: At_Drought_Reproduction_P Parameter: Timepoint (day) Value: 10
  misc_feature: MA Experiment 20001911 PARAMETER Experiment Name: At_Drought_Reproduction_P Parameter: Tissue Value: Flowers
  misc_feature: MA Experiment 20001911 PARAMETER Experiment Name: At_Drought_Reproduction_P Parameter: Treatment Value: Drought vs. No Drought
acgagaatcatctgcttaaaatccaatcgcatcgactcagtcttcttcttcttcttcacctacctttctctctctctctcgtggtccattcgctattctatacttcttgtcggcgccggagagagtgagatgacttggtcggttttcagatccataaatactccaacactcgacctctccaccgcacttcgctccactcgtaccccattggtcgctgctggtgtcggctgcgcaacattcgctggtgtttctctcttcagaatgtcttctagatctcctcctttcgcttccctctctgtctctgcttcttctgtgaagaaggaagttgtgtctactgagaaagcaccagctgctttgggaccttactctcaggccattaaagccaataatctggtttttctttcaggtgttcttggacttatacctgagactggaaagtttgtttcggagagcgtcgaagatcagactgagcaggtactcaaaaacatgggggagatattgaaagctagtggtgctgattattcctcggtggtgaagacaacaatcatgttggctgatttggctgacttcaagacagtgaacgagatatatgccaaatacttcccagctccttctccagcacgatcgacgtatcaagttgcagctttgcctctaaacgccaagatcgagattgaatgtattgcaacactctagaacactcaaatcaatctctacgaagggtattttggtccggaagatgtcaaaacaaataagagaaacaatggtttttggggcttaacccatatttaacctacttttcattttgctgcactacgaaaaatgttgcggattatcaaccattaggttggttacaaatcaaaagcctctaatcaagaataagttatttagtgtcttgtccaccctcatttgctgttgacgtatatgtattgattgtatacattattttatttgagtgaaaaccattatgcc

SEQ ID NO: 34771 - protein, 230 aa, Arabidopsis thaliana
  peptide (1)..(230): Ceres Seq. ID no. 12384924
  misc_feature (112)..(230): Pfam Name: Endoribonuclease L-PSP Pfam Description: Endoribonuclease L-PSP
  misc_feature (103)..(228): Homolog of NCBI NO: 30584193 NR Description: Homo sapiens translational inhibitor protein
  misc_feature (103)..(228): Homolog of NCBI NO: 5032215 NR Description: translational inhibitor protein p14.5 [Homo
  misc_feature (100)..(228): Homolog of NCBI NO: 1708292 NR Description: HEAT-RESPONSIVE PROTEIN 12
  misc_feature (102)..(228): Homolog of NCBI NO: 25148896 NR Description: YjgF family (15.2 kD) [Caenorhabditis elegans]
  misc_feature (102)..(228): Homolog of NCBI NO: 25148891 NR Description: YjgF family precursor [Caenorhabditis elegans]
  misc_feature (102)..(228): Homolog of NCBI NO: 39579795 NR Description: Hypothetical protein CBG24261 [Caenorhabditis
  misc_feature (62)..(230): Homolog of NCBI NO: 29420485 NR Description: translation-inhibitor protein [Gentiana triflora]
  misc_feature (44)..(230): Homolog of NCBI NO: 23617012 NR Description: putative translational inhibitor protein
  misc_feature (88)..(230): Homolog of NCBI NO: 9294558 NR Description: contains similarity to protein translation
  misc_feature (44)..(230): Homolog of NCBI NO: 15231137 NR Description: translational inhibitor protein, putative
TRIICLKSNRIDSVFFFFFTYLSLSLSWSIRYSILLVGAGESEMTWSVFRSINTPTLDLSTALRSTRTPLVAAGVGCATFAGVSLFRMSSRSPPFASLSVSASSVKKEVVSTEKAPAALGPYSQAIKANNLVFLSGVLGLIPETGKFVSESVEDQTEQVLKNMGEILKASGADYSSVVKTTIMLADLADFKTVNEIYAKYFPAPSPARSTYQVAALPLNAKIEIECIATL

SEQ ID NO: 34772 - protein, 187 aa, Arabidopsis thaliana
  peptide (1)..(187): Ceres Seq. ID no. 12384925
  misc_feature (69)..(187): Pfam Name: Endoribonuclease L-PSP Pfam Description: Endoribonuclease L-PSP
  misc_feature (60)..(185): Homolog of NCBI NO: 30584193 NR Description: Homo sapiens translational inhibitor protein
  misc_feature (60)..(185): Homolog of NCBI NO: 5032215 NR Description: translational inhibitor protein p14.5 [Homo
  misc_feature (57)..(185): Homolog of NCBI NO: 1708292 NR Description: HEAT-RESPONSIVE PROTEIN 12
  misc_feature (59)..(185): Homolog of NCBI NO: 25148896 NR Description: YjgF family (15.2 kD) [Caenorhabditis elegans]
  misc_feature (59)..(185): Homolog of NCBI NO: 25148891 NR Description: YjgF family precursor [Caenorhabditis elegans]
  misc_feature (59)..(185): Homolog of NCBI NO: 39579795 NR Description: Hypothetical protein CBG24261 [Caenorhabditis
  misc_feature (19)..(187): Homolog of NCBI NO: 29420485 NR Description: translation-inhibitor protein [Gentiana triflora]
  misc_feature (1)..(187): Homolog of NCBI NO: 23617012 NR Description: putative translational inhibitor protein
  misc_feature (45)..(187): Homolog of NCBI NO: 9294558 NR Description: contains similarity to protein translation
  misc_feature (1)..(187): Homolog of NCBI NO: 15231137 NR Description: translational inhibitor protein, putative
MTWSVFRSINTPTLDLSTALRSTRTPLVAAGVGCATFAGVSLFRMSSRSPPFASLSVSASSVKKEVVSTEKAPAALGPYSQAIKANNLVFLSGVLGLIPETGKFVSESVEDQTEQVLKNMGEILKASGADYSSVVKTTIMLADLADFKTVNEIYAKYFPAPSPARSTYQVAALPLNAKIEIECIATL

SEQ ID NO: 34773 - protein, 143 aa, Arabidopsis thaliana
  peptide (1)..(143): Ceres Seq. ID no. 12384926
  misc_feature (25)..(143): Pfam Name: Endoribonuclease L-PSP Pfam Description: Endoribonuclease L-PSP
  misc_feature (16)..(141): Homolog of NCBI NO: 30584193 NR Description: Homo sapiens translational inhibitor protein
  misc_feature (16)..(141): Homolog of NCBI NO: 5032215 NR Description: translational inhibitor protein p14.5 [Homo
  misc_feature (13)..(141): Homolog of NCBI NO: 1708292 NR Description: HEAT-RESPONSIVE PROTEIN 12
  misc_feature (15)..(141): Homolog of NCBI NO: 25148896 NR Description: YjgF family (15.2 kD) [Caenorhabditis elegans]
  misc_feature (15)..(141): Homolog of NCBI NO: 25148891 NR Description: YjgF family precursor [Caenorhabditis elegans]
  misc_feature (15)..(141): Homolog of NCBI NO: 39579795 NR Description: Hypothetical protein CBG24261 [Caenorhabditis
  misc_feature (1)..(143): Homolog of NCBI NO: 29420485 NR Description: translation-inhibitor protein [Gentiana triflora]
  misc_feature (1)..(143): Homolog of NCBI NO: 23617012 NR Description: putative translational inhibitor protein
  misc_feature (1)..(143): Homolog of NCBI NO: 9294558 NR Description: contains similarity to protein translation
  misc_feature (1)..(143): Homolog of NCBI NO: 15231137 NR Description: translational inhibitor protein, putative
MSSRSPPFASLSVSASSVKKEVVSTEKAPAALGPYSQAIKANNLVFLSGVLGLIPETGKFVSESVEDQTEQVLKNMGEILKASGADYSSVVKTTIMLADLADFKTVNEIYAKYFPAPSPARSTYQVAALPLNAKIEIECIATL

SEQ ID NO: 34774 - DNA, 1209 bp, Arabidopsis thaliana
  misc_feature (1)..(1209): Ceres Seq. ID no. 13622058
  misc_feature: MA Experiment ID: 108573 Result: Up-regulated in Transcription
  misc_feature: MA Experiment 108573 PARAMETER Experiment Name: At_Drought_cDNA_P Parameter: Timepoint (hr) Value: 6
  misc_feature: MA Experiment 108573 PARAMETER Experiment Name: At_Drought_cDNA_P Parameter: Tissue Value: Aerial
  misc_feature: MA Experiment 108573 PARAMETER Experiment Name: At_Drought_cDNA_P Parameter: Treatment Value: Drought vs. No Drought
accatctctctctgtaatcgctcttctcgatgtcaactatttccttcttcctttgctcttagggttagggtttattttgttctttctctatatccttcaatcaatgtgaaaaaaaagctctcccttttggcagtttccgatgtttggtcgccattcgattatcccaaataaccagattggtaccgcctctgcttccgctggtgaagaccatgtctctgcctccgctacgtctggtcacattccttacgacgatatggaagaaatccctcatcctgactctatctatggtgctgcctccgatttgattcccgatggctctcaattggttgctcaccgatccgatggctctgaattacttgtttctcggccaccggaaggggcgaatcagcttacgatctcgttccgtggacaagtttacgtttttgatgccgttggtgctgacaaggtggatgctgtgttgtcgctgttgggtggttctactgagcttgctcctggtccgcaggtgatggaactagctcaacagcagaatcatatgcctgttgtagaatatcagagccgctgtagccttccgcaacgggcacaatccttggataggtttcggaagaagaggaatgctagatgtttcgagaagaaagtaagatacggtgttcgccaagaagttgccttaagaatggcacgtaataaaggtcaattcacctcttcaaagatgacagatggggcttataactctggcacagatcaagattctgcccaagatgatgcccatccagaaatatcgtgtactcattgcggcattagttccaaatgtacaccaatgatgcgacgtggcccttccggccccaggactctctgcaatgcctgtggacttttttgggctaacaggggtacattgagggatctctcaaagaaaacagaagagaatcagttggctttaatgaaaccggatgatggtgggagtgttgctgatgctgctaacaacttaaacactgaagctgcaagtgttgaagaacacacttccatggtttctcttgccaatggggataattctaatctgttaggtgatcactaaatactgtgataagaatcagaagatagaaatctttgtagaatcagatggtcttctctatgaatttatcttttcaccatcacatgtattatagaaaccgtaaccgaacctcaaatcaaataccatatcagatgtctttggtt

SEQ ID NO: 34775 - protein, 309 aa, Arabidopsis thaliana
  peptide (1)..(309): Ceres Seq. ID no. 13622059
  misc_feature (152)..(190): Pfam Name: CCT motif Pfam Description: CCT motif
  misc_feature (67)..(221): Homolog of NCBI NO: 25405485 NR Description: hypothetical protein F19C24.17 [imported] -
  misc_feature (178)..(276): Homolog of NCBI NO: 26451385 NR Description: unknown protein [Arabidopsis thaliana]
  misc_feature (78)..(303): Homolog of NCBI NO: 13174240 NR Description: putative zinc finger protein [Oryza sativa]
  misc_feature (67)..(276): Homolog of NCBI NO: 21537322 NR Description: flowering protein CONSTANS, putative [Arabidopsis
  misc_feature (67)..(276): Homolog of NCBI NO: 18402914 NR Description: GATA zinc finger protein [Arabidopsis thaliana]
  misc_feature (67)..(304): Homolog of NCBI NO: 15028099 NR Description: putative flowering protein CONSTANS [Arabidopsis
  misc_feature (67)..(304): Homolog of NCBI NO: 18403600 NR Description: zinc finger protein family [Arabidopsis thaliana]
  misc_feature (21)..(276): Homolog of NCBI NO: 30686115 NR Description: GATA zinc finger protein [Arabidopsis thaliana]
  misc_feature (1)..(309): Homolog of NCBI NO: 11358938 NR Description: zinc-finger protein - Arabidopsis thaliana
  misc_feature (1)..(309): Homolog of NCBI NO: 15233844 NR Description: Zinc finger protein, Zim [Arabidopsis thaliana]
MFGRHSIIPNNQIGTASASAGEDHVSASATSGHIPYDDMEEIPHPDSIYGAASDLIPDGSQLVAHRSDGSELLVSRPPEGANQLTISFRGQVYVFDAVGADKVDAVLSLLGGSTELAPGPQVMELAQQQNHMPVVEYQSRCSLPQRAQSLDRFRKKRNARCFEKKVRYGVRQEVALRMARNKGQFTSSKMTDGAYNSGTDQDSAQDDAHPEISCTHCGISSKCTPMMRRGPSGPRTLCNACGLFWANRGTLRDLSKKTEENQLALMKPDDGGSVADAANNLNTEAASVEEHTSMVSLANGDNSNLLGDH

SEQ ID NO: 34776 - protein, 271 aa, Arabidopsis thaliana
  peptide (1)..(271): Ceres Seq. ID no. 13622060
  misc_feature (114)..(152): Pfam Name: CCT motif Pfam Description: CCT motif
  misc_feature (29)..(183): Homolog of NCBI NO: 25405485 NR Description: hypothetical protein F19C24.17 [imported] -
  misc_feature (140)..(238): Homolog of NCBI NO: 26451385 NR Description: unknown protein [Arabidopsis thaliana]
  misc_feature (40)..(265): Homolog of NCBI NO: 13174240 NR Description: putative zinc finger protein [Oryza sativa]
  misc_feature (29)..(238): Homolog of NCBI NO: 21537322 NR Description: flowering protein CONSTANS, putative [Arabidopsis
  misc_feature (29)..(238): Homolog of NCBI NO: 18402914 NR Description: GATA zinc finger protein [Arabidopsis thaliana]
  misc_feature (29)..(266): Homolog of NCBI NO: 15028099 NR Description: putative flowering protein CONSTANS [Arabidopsis
  misc_feature (29)..(266): Homolog of NCBI NO: 18403600 NR Description: zinc finger protein family [Arabidopsis thaliana]
  misc_feature (1)..(238): Homolog of NCBI NO: 30686115 NR Description: GATA zinc finger protein [Arabidopsis thaliana]
  misc_feature (1)..(271): Homolog of NCBI NO: 11358938 NR Description: zinc-finger protein - Arabidopsis thaliana
  misc_feature (1)..(271): Homolog of NCBI NO: 15233844 NR Description: Zinc finger protein, Zim [Arabidopsis thaliana]
MEEIPHPDSIYGAASDLIPDGSQLVAHRSDGSELLVSRPPEGANQLTISFRGQVYVFDAVGADKVDAVLSLLGGSTELAPGPQVMELAQQQNHMPVVEYQSRCSLPQRAQSLDRFRKKRNARCFEKKVRYGVRQEVALRMARNKGQFTSSKMTDGAYNSGTDQDSAQDDAHPEISCTHCGISSKCTPMMRRGPSGPRTLCNACGLFWANRGTLRDLSKKTEENQLALMKPDDGGSVADAANNLNTEAASVEEHTSMVSLANGDNSNLLGDH

SEQ ID NO: 34777 - protein, 187 aa, Arabidopsis thaliana
  peptide (1)..(187): Ceres Seq. ID no. 13622061
  misc_feature (30)..(68): Pfam Name: CCT motif Pfam Description: CCT motif
  misc_feature (1)..(99): Homolog of NCBI NO: 25405485 NR Description: hypothetical protein F19C24.17 [imported] -
  misc_feature (56)..(154): Homolog of NCBI NO: 26451385 NR Description: unknown protein [Arabidopsis thaliana]
  misc_feature (1)..(181): Homolog of NCBI NO: 13174240 NR Description: putative zinc finger protein [Oryza sativa]
  misc_feature (1)..(154): Homolog of NCBI NO: 21537322 NR Description: flowering protein CONSTANS, putative [Arabidopsis
  misc_feature (1)..(154): Homolog of NCBI NO: 18402914 NR Description: GATA zinc finger protein [Arabidopsis thaliana]
  misc_feature (1)..(182): Homolog of NCBI NO: 15028099 NR Description: putative flowering protein CONSTANS [Arabidopsis
  misc_feature (1)..(182): Homolog of NCBI NO: 18403600 NR Description: zinc finger protein family [Arabidopsis thaliana]
  misc_feature (1)..(154): Homolog of NCBI NO: 30686115 NR Description: GATA zinc finger protein [Arabidopsis thaliana]
  misc_feature (1)..(187): Homolog of NCBI NO: 11358938 NR Description: zinc-finger protein - Arabidopsis thaliana
  misc_feature (1)..(187): Homolog of NCBI NO: 15233844 NR Description: Zinc finger protein, Zim [Arabidopsis thaliana]
MELAQQQNHMPVVEYQSRCSLPQRAQSLDRFRKKRNARCFEKKVRYGVRQEVALRMARNKGQFTSSKMTDGAYNSGTDQDSAQDDAHPEISCTHCGISSKCTPMMRRGPSGPRTLCNACGLFWANRGTLRDLSKKTEENQLALMKPDDGGSVADAANNLNTEAASVEEHTSMVSLANGDNSNLLGDH

SEQ ID NO: 34778 - DNA, 948 bp, Arabidopsis thaliana
  misc_feature (1)..(948): Ceres Seq. ID no. 13492159
  misc_feature: MA Experiment ID: 108488 Result: Down-regulated in Transcription
  misc_feature: MA Experiment ID: 20000184 Result: Down-regulated in Transcription
  misc_feature: MA Experiment 20000184 PARAMETER Experiment Name: At_Shoots__P Parameter: Age (day) Value: 7
  misc_feature: MA Experiment 20000184 PARAMETER Experiment Name: At_Shoots__P Parameter: Tissue Value: Shoots vs. Whole Plant
  misc_feature: MA Experiment ID: 20001450 Result: Up-regulated in Transcription
  misc_feature: MA Experiment 20001450 PARAMETER Experiment Name: At_Far-red-induction_P Parameter: Age (day) Value: 7
  misc_feature: MA Experiment 20001450 PARAMETER Experiment Name: At_Far-red-induction_P Parameter: Light Value: Far-red vs. White
  misc_feature: MA Experiment 20001450 PARAMETER Experiment Name: At_Far-red-induction_P Parameter: Organism Value: A. thaliana
  misc_feature: MA Experiment 20001450 PARAMETER Experiment Name: At_Far-red-induction_P Parameter: Plant Line Value: Columbia
  misc_feature: MA Experiment 20001450 PARAMETER Experiment Name: At_Far-red-induction_P Parameter: Timepoint (hr) Value: 8
  misc_feature: MA Experiment 20001450 PARAMETER Experiment Name: At_Far-red-induction_P Parameter: Tissue Value: Whole Plant
  misc_feature: MA Experiment ID: 20001557 Result: Down-regulated in Transcription
  misc_feature: MA Experiment 20001557 PARAMETER Experiment Name: At_Drought_Soil_Dry_P Parameter: Age (day) Value: 27
  misc_feature: MA Experiment 20001557 PARAMETER Experiment Name: At_Drought_Soil_Dry_P Parameter: Organism Value: A. thaliana
  misc_feature: MA Experiment 20001557 PARAMETER Experiment Name: At_Drought_Soil_Dry_P Parameter: Plant Line Value: WS
  misc_feature: MA Experiment 20001557 PARAMETER Experiment Name: At_Drought_Soil_Dry_P Parameter: Post Timepoint (hr) Value: 3
  misc_feature: MA Experiment 20001557 PARAMETER Experiment Name: At_Drought_Soil_Dry_P Parameter: Post-Treatment Value: Re-Water vs. No Drought
  misc_feature: MA Experiment 20001557 PARAMETER Experiment Name: At_Drought_Soil_Dry_P Parameter: Timepoint (day) Value: 13
  misc_feature: MA Experiment 20001557 PARAMETER Experiment Name: At_Drought_Soil_Dry_P Parameter: Treatment Value: Drought vs. No Drought
ggggtctgtctgagtggatttgtatactatattgtgatgagagtcaccacaacaaattcgttgacatgagcctttcatatatttttgaattatactgaactaaaacccatttaaaagcccatttaaagacccattataagagtagagatactcagcccatttaaagataaaattacgtcatagcgatttttccattaaaagagtgaggaagagacaaaagtgattgattggtcagaaaaaatggaagcggcgaagaaacagagtgttacaaatcagcttctcgccgtgaaatcagcttccggcaagacttttagccagttagccgcggagacaggtctaaccaacgtatacgtagctcagcttctccgtcgtcaagctcagctcaaaccggacacagtcccaaagcttaaggaagctttaccagctctgaccgatgaactaatcggagatatgatgtctcctccgtggagatcctatgatcctaatctcatccaagaacccactatctacaggttgaatgaagcagtgatgcattttggtgagagtataaaggagattatcaatgaagattttggagatggcatcatgtcggcgatagatttctattgctctgtcgacaaaatcaaaggagtggatggtaacaatcgcgtggttgtgacgcttgatggaaagtatctttcgcattccgaacagaggacggagaatatggtctcaaggctaaatctcaagggaggtacaagcgaatgataagaaagcctttacgtatccatgaaggccttattgtaagtggtaacgttgtaatacctatgtgtttgtttatctgtaatatatgcaacttcagcatctagattaaaagctgtttcaggttgaataacagtgaataaacaaatcttataaaacctttctatgtttacttttaacatcgtaatcgagttccgattcatgctt

SEQ ID NO: 34779 - protein, 168 aa, Arabidopsis thaliana
  peptide (1)..(168): Ceres Seq. ID no. 13492160
  misc_feature (78)..(151): Pfam Name: Cyanate lyase C-terminal domain Pfam Description: Cyanate lyase C-terminal domain
  misc_feature (8)..(150): Homolog of NCBI NO: 33867020 NR Description: cyanate lyase [Synechococcus sp. WH 8102]
  misc_feature (4)..(148): Homolog of NCBI NO: 23471974 NR Description: hypothetical protein [Pseudomonas syringae pv.
  misc_feature (8)..(150): Homolog of NCBI NO: 2498272 NR Description: Cyanate hydratase (Cyanase) (Cyanate lyase)
  misc_feature (1)..(150): Homolog of NCBI NO: 16331651 NR Description: cyanate lyase [Synechocystis sp. PCC 6803]
  misc_feature (1)..(148): Homolog of NCBI NO: 28869134 NR Description: cyanate lyase [Pseudomonas syringae pv. tomato
  misc_feature (91)..(163): Homolog of NCBI NO: 37535282 NR Description: putative cyanase [Oryza sativa (japonica
  misc_feature (9)..(90): Homolog of NCBI NO: 37535282 NR Description: putative cyanase [Oryza sativa (japonica
  misc_feature (9)..(163): Homolog of NCBI NO: 20137963 NR Description: Cyanate hydratase (Cyanase) (Cyanate lyase)
  misc_feature (1)..(168): Homolog of NCBI NO: 21554171 NR Description: cyanate lyase (CYN) [Arabidopsis thaliana]
  misc_feature (1)..(168): Homolog of NCBI NO: 15229458 NR Description: cyanate lyase (CYN) [Arabidopsis thaliana]
MEAAKKQSVTNQLLAVKSASGKTFSQLAAETGLTNVYVAQLLRRQAQLKPDTVPKLKEALPALTDELIGDMMSPPWRSYDPNLIQEPTIYRLNEAVMHFGESIKEIINEDFGDGIMSAIDFYCSVDKIKGVDGNNRVVVTLDGKYLSHSEQRTENMVSRLNLKGGTSE

SEQ ID NO: 34780 - protein, 98 aa, Arabidopsis thaliana
  peptide (1)..(98): Ceres Seq. ID no. 13492161
  misc_feature (8)..(81): Pfam Name: Cyanate lyase C-terminal domain Pfam Description: Cyanate lyase C-terminal domain
  misc_feature (1)..(80): Homolog of NCBI NO: 33867020 NR Description: cyanate lyase [Synechococcus sp. WH 8102]
  misc_feature (1)..(78): Homolog of NCBI NO: 23471974 NR Description: hypothetical protein [Pseudomonas syringae pv.
  misc_feature (1)..(80): Homolog of NCBI NO: 2498272 NR Description: Cyanate hydratase (Cyanase) (Cyanate lyase)
  misc_feature (1)..(80): Homolog of NCBI NO: 16331651 NR Description: cyanate lyase [Synechocystis sp. PCC 6803]
  misc_feature (1)..(78): Homolog of NCBI NO: 28869134 NR Description: cyanate lyase [Pseudomonas syringae pv. tomato
  misc_feature (21)..(93): Homolog of NCBI NO: 37535282 NR Description: putative cyanase [Oryza sativa (japonica
  misc_feature (1)..(20): Homolog of NCBI NO: 37535282 NR Description: putative cyanase [Oryza sativa (japonica
  misc_feature (1)..(93): Homolog of NCBI NO: 20137963 NR Description: Cyanate hydratase (Cyanase) (Cyanate lyase)
  misc_feature (1)..(98): Homolog of NCBI NO: 21554171 NR Description: cyanate lyase (CYN) [Arabidopsis thaliana]
  misc_feature (1)..(98): Homolog of NCBI NO: 15229458 NR Description: cyanate lyase (CYN) [Arabidopsis thaliana]
MMSPPWRSYDPNLIQEPTIYRLNEAVMHFGESIKEIINEDFGDGIMSAIDFYCSVDKIKGVDGNNRVVVTLDGKYLSHSEQRTENMVSRLNLKGGTSE

SEQ ID NO: 34781 - protein, 97 aa, Arabidopsis thaliana
  peptide (1)..(97): Ceres Seq. ID no. 13492162
  misc_feature (7)..(80): Pfam Name: Cyanate lyase C-terminal domain Pfam Description: Cyanate lyase C-terminal domain
  misc_feature (1)..(79): Homolog of NCBI NO: 33867020 NR Description: cyanate lyase [Synechococcus sp. WH 8102]
  misc_feature (1)..(77): Homolog of NCBI NO: 23471974 NR Description: hypothetical protein [Pseudomonas syringae pv.
  misc_feature (1)..(79): Homolog of NCBI NO: 2498272 NR Description: Cyanate hydratase (Cyanase) (Cyanate lyase)
  misc_feature (1)..(79): Homolog of NCBI NO: 16331651 NR Description: cyanate lyase [Synechocystis sp. PCC 6803]
  misc_feature (1)..(77): Homolog of NCBI NO: 28869134 NR Description: cyanate lyase [Pseudomonas syringae pv. tomato
  misc_feature (20)..(92): Homolog of NCBI NO: 37535282 NR Description: putative cyanase [Oryza sativa (japonica
  misc_feature (1)..(19): Homolog of NCBI NO: 37535282 NR Description: putative cyanase [Oryza sativa (japonica
  misc_feature (1)..(92): Homolog of NCBI NO: 20137963 NR Description: Cyanate hydratase (Cyanase) (Cyanate lyase)
  misc_feature (1)..(97): Homolog of NCBI NO: 21554171 NR Description: cyanate lyase (CYN) [Arabidopsis thaliana]
  misc_feature (1)..(97): Homolog of NCBI NO: 15229458 NR Description: cyanate lyase (CYN) [Arabidopsis thaliana]
MSPPWRSYDPNLIQEPTIYRLNEAVMHFGESIKEIINEDFGDGIMSAIDFYCSVDKIKGVDGNNRVVVTLDGKYLSHSEQRTENMVSRLNLKGGTSE

SEQ ID NO: 34782 - DNA, 1196 bp, Arabidopsis thaliana
  misc_feature (1)..(1196): Ceres Seq. ID no. 12395911
  misc_feature: MA Experiment ID: 108461 Result: Down-regulated in Transcription
  misc_feature: MA Experiment 108461 PARAMETER Experiment Name: At_Germinating_Seeds_cDNA_P Parameter: Age (day) Value: 1 vs. 0
  misc_feature: MA Experiment 108461 PARAMETER Experiment Name: At_Germinating_Seeds_cDNA_P Parameter: Tissue Value: Germinating Seeds
  misc_feature: MA Experiment ID: 108462 Result: Down-regulated in Transcription
  misc_feature: MA Experiment 108462 PARAMETER Experiment Name: At_Germinating_Seeds_cDNA_P Parameter: Age (day) Value: 2 vs. 0
  misc_feature: MA Experiment 108462 PARAMETER Experiment Name: At_Germinating_Seeds_cDNA_P Parameter: Tissue Value: Germinating Seeds
  misc_feature: MA Experiment ID: 108463 Result: Down-regulated in Transcription
  misc_feature: MA Experiment 108463 PARAMETER Experiment Name: At_Germinating_Seeds_cDNA_P Parameter: Age (day) Value: 3 vs. 0
  misc_feature: MA Experiment 108463 PARAMETER Experiment Name: At_Germinating_Seeds_cDNA_P Parameter: Tissue Value: Germinating Seeds
  misc_feature: MA Experiment ID: 108464 Result: Down-regulated in Transcription
  misc_feature: MA Experiment 108464 PARAMETER Experiment Name: At_Germinating_Seeds_cDNA_P Parameter: Age (day) Value: 4 vs. 0
  misc_feature: MA Experiment 108464 PARAMETER Experiment Name: At_Germinating_Seeds_cDNA_P Parameter: Tissue Value: Germinating Seeds
  misc_feature: MA Experiment ID: 108585 Result: Up-regulated in Transcription
  misc_feature: MA Experiment 108585 PARAMETER Experiment Name: At_5mM_NaNP_cDNA_P Parameter: Timepoint (hr) Value: 6
  misc_feature: MA Experiment 108585 PARAMETER Experiment Name: At_5mM_NaNP_cDNA_P Parameter: Tissue Value: Aerial
  misc_feature: MA Experiment 108585 PARAMETER Experiment Name: At_5mM_NaNP_cDNA_P Parameter: Treatment Value: null
  misc_feature: MA Experiment ID: 20000069 Result: Up-regulated in Transcription
  misc_feature: MA Experiment 20000069 PARAMETER Experiment Name: At_100uM_ABA_Mutants_cDNA_P Parameter: Plant Line Value: CS23
  misc_feature: MA Experiment 20000069 PARAMETER Experiment Name: At_100uM_ABA_Mutants_cDNA_P Parameter: Timepoint (hr) Value: 6
  misc_feature: MA Experiment 20000069 PARAMETER Experiment Name: At_100uM_ABA_Mutants_cDNA_P Parameter: Tissue Value: Aerial
  misc_feature: MA Experiment 20000069 PARAMETER Experiment Name: At_100uM_ABA_Mutants_cDNA_P Parameter: Treatment Value: 100uM ABA vs. No Treatment
  misc_feature: MA Experiment ID: 20000070 Result: Up-regulated in Transcription
  misc_feature: MA Experiment 20000070 PARAMETER Experiment Name: At_100uM_ABA_Mutants_cDNA_P Parameter: Plant Line Value: CS24
  misc_feature: MA Experiment 20000070 PARAMETER Experiment Name: At_100uM_ABA_Mutants_cDNA_P Parameter: Timepoint (hr) Value: 6
  misc_feature: MA Experiment 20000070 PARAMETER Experiment Name: At_100uM_ABA_Mutants_cDNA_P Parameter: Tissue Value: Aerial
  misc_feature: MA Experiment 20000070 PARAMETER Experiment Name: At_100uM_ABA_Mutants_cDNA_P Parameter: Treatment Value: 100uM ABA vs. No Treatment
  misc_feature: MA Experiment ID: 20000087 Result: Up-regulated in Transcription
  misc_feature: MA Experiment 20000087 PARAMETER Experiment Name: At_100uM_ABA_Mutants_cDNA_P Parameter: Plant Line Value: WS
  misc_feature: MA Experiment 20000087 PARAMETER Experiment Name: At_100uM_ABA_Mutants_cDNA_P Parameter: Timepoint (hr) Value: 6
  misc_feature: MA Experiment 20000087 PARAMETER Experiment Name: At_100uM_ABA_Mutants_cDNA_P Parameter: Tissue Value: Aerial
  misc_feature: MA Experiment 20000087 PARAMETER Experiment Name: At_100uM_ABA_Mutants_cDNA_P Parameter: Treatment Value: 100uM ABA vs. No Treatment
  misc_feature: MA Experiment ID: 20000093 Result: Up-regulated in Transcription
  misc_feature: MA Experiment 20000093 PARAMETER Experiment Name: At_42deg_Heat_cDNA_P Parameter: Temperature (deg C) Value: 42 vs. 22
  misc_feature: MA Experiment 20000093 PARAMETER Experiment Name: At_42deg_Heat_cDNA_P Parameter: Timepoint (hr) Value: 0.5
  misc_feature: MA Experiment 20000093 PARAMETER Experiment Name: At_42deg_Heat_cDNA_P Parameter: Tissue Value: Aerial
  misc_feature: MA Experiment ID: 20000180 Result: Down-regulated in Transcription
  misc_feature: MA Experiment 20000180 PARAMETER Experiment Name: At_Germinating_Seeds_P Parameter: Age (hr) Value: 24 vs. 0
  misc_feature: MA Experiment 20000180 PARAMETER Experiment Name: At_Germinating_Seeds_P Parameter: Tissue Value: Germinating Seeds
  misc_feature: MA Experiment ID: 20000185 Result: Up-regulated in Transcription
  misc_feature: MA Experiment 20000185 PARAMETER Experiment Name: At_Roots__P Parameter: Age (day) Value: 7 vs. 21
  misc_feature: MA Experiment 20000185 PARAMETER Experiment Name: At_Roots__P Parameter: Organism Value: A. thaliana
  misc_feature: MA Experiment 20000185 PARAMETER Experiment Name: At_Roots__P Parameter: Tissue Value: Roots vs. Whole Plant
  misc_feature: MA Experiment ID: 20001557 Result: Up-regulated in Transcription
  misc_feature: MA Experiment 20001557 PARAMETER Experiment Name: At_Drought_Soil_Dry_P Parameter: Age (day) Value: 27
  misc_feature: MA Experiment 20001557 PARAMETER Experiment Name: At_Drought_Soil_Dry_P Parameter: Organism Value: A. thaliana
  misc_feature: MA Experiment 20001557 PARAMETER Experiment Name: At_Drought_Soil_Dry_P Parameter: Plant Line Value: WS
  misc_feature: MA Experiment 20001557 PARAMETER Experiment Name: At_Drought_Soil_Dry_P Parameter: Post Timepoint (hr) Value: 3
  misc_feature: MA Experiment 20001557 PARAMETER Experiment Name: At_Drought_Soil_Dry_P Parameter: Post-Treatment Value: Re-Water vs. No Drought
  misc_feature: MA Experiment 20001557 PARAMETER Experiment Name: At_Drought_Soil_Dry_P Parameter: Timepoint (day) Value: 13
  misc_feature: MA Experiment 20001557 PARAMETER Experiment Name: At_Drought_Soil_Dry_P Parameter: Treatment Value: Drought vs. No Drought
ataaataaatatataaaaaaaagtttcgatttttgcttttcttcttcgattcattgcgcgaatcatccgtgatgttggtgtctagggttttatcaagagtttctcgcagcgcaggcttacgctcgtctttctcctccgtcgttactccgaagaggaatcagattccgattgttgcaagccgatttcactccctcgttcacggaacccccaacaagcttgttgcagttccagtgtcgctccgaaaccatggaactctagatttgaatgttcttcaaaggttcggctttttttcctcttcctcagctgaaccgaagggaaatgagagtaacaccgaagtaccaaagaccggcgaaacttctgagaatgtggaggtggggaaagctacagatgcagagattgacttcgacgatttgtcaagagacgatttagtgaagcttgtgagtgagaaggaagatcttttgaaggttcagcagaaagacataatggaaatgaaagataaatttcttcgcacttatgctgagcagcagaatcttatggacaggactaaccgtaatgctgaaagcgccaaaaagttcgctgtacagaactttgcaacgagccttttggatgtggcggataatcttgaaagagcttcttctgttgtcaaagagagtttttcgaagatcgacacttcaaaagatttggctggtgctactccactgttaaaaaacctattagaaggagtggagatgactgagaaacaattagctgaggtgtttagaaaagctggtttggtgaaagaagatcctttaaatgaaccgtttaatccaaacagacataacgcagtgttccaagtcccagatgcttccaagccaaaaggcacaattgctcatgtcctaaagtctggatactcattgtacgatcgagttataaggccagctgaggttggtgttacttgcgccgtggagaatcaagaaggcggcaaagagtctgcagcttgaaatacttaaaacatcgagagttaagcttttgtttttaacatcttcatgagttctttttttagttaatagttctctttctttgcatattcattggaggaacaagattcccataaggtagcatgactatgctctgtacttccagggaagccctggttctgtaacttttacacaaattcataagccaaagccaaactcttggtaaaagcttcaaatctt

SEQ ID NO: 34783 - protein, 302 aa, Arabidopsis thaliana
  peptide (1)..(302): Ceres Seq. ID no. 12395912
  misc_feature (94)..(289): Pfam Name: GrpE Pfam Description: GrpE
  misc_feature (74)..(281): Homolog of NCBI NO: 23508449 NR Description: co-chaperone GrpE, putative [Plasmodium
  misc_feature (81)..(287): Homolog of NCBI NO: 23482781 NR Description: co-chaperone GrpE, putative [Plasmodium yoelii
  misc_feature (105)..(302): Homolog of NCBI NO: 1669597 NR Description: AR192 [Arabidopsis thaliana]
  misc_feature (4)..(288): Homolog of NCBI NO: 38636943 NR Description: putative chaperone GrpE [Oryza sativa (japonica
  misc_feature (1)..(294): Homolog of NCBI NO: 3851638 NR Description: chaperone GrpE type 1 [Nicotiana tabacum]
  misc_feature (1)..(302): Homolog of NCBI NO: 3851640 NR Description: chaperone GrpE type 2 [Nicotiana tabacum]
  misc_feature (105)..(302): Homolog of NCBI NO: 18416821 NR Description: grpE like protein
  misc_feature (1)..(302): Homolog of NCBI NO: 7485329 NR Description: hypothetical protein F10M23.120 - Arabidopsis
  misc_feature (1)..(302): Homolog of NCBI NO: 21554173 NR Description: chaperone GrpE-like protein [Arabidopsis thaliana]
  misc_feature (1)..(302): Homolog of NCBI NO: 15240475 NR Description: chaperone GrpE-like protein
MLVSRVLSRVSRSAGLRSSFSSVVTPKRNQIPIVASRFHSLVHGTPNKLVAVPVSLRNHGTLDLNVLQRFGFFSSSSAEPKGNESNTEVPKTGETSENVEVGKATDAEIDFDDLSRDDLVKLVSEKEDLLKVQQKDIMEMKDKFLRTYAEQQNLMDRTNRNAESAKKFAVQNFATSLLDVADNLERASSVVKESFSKIDTSKDLAGATPLLKNLLEGVEMTEKQLAEVFRKAGLVKEDPLNEPFNPNRHNAVFQVPDASKPKGTIAHVLKSGYSLYDRVIRPAEVGVTCAVENQEGGKESAA

SEQ ID NO: 34784 - protein, 165 aa, Arabidopsis thaliana
  peptide (1)..(165): Ceres Seq. ID no. 12395913
  misc_feature (1)..(152): Pfam Name: GrpE Pfam Description: GrpE
  misc_feature (1)..(144): Homolog of NCBI NO: 23508449 NR Description: co-chaperone GrpE, putative [Plasmodium
  misc_feature (1)..(150): Homolog of NCBI NO: 23482781 NR Description: co-chaperone GrpE, putative [Plasmodium yoelii
  misc_feature (1)..(165): Homolog of NCBI NO: 1669597 NR Description: AR192 [Arabidopsis thaliana]
  misc_feature (1)..(151): Homolog of NCBI NO: 38636943 NR Description: putative chaperone GrpE [Oryza sativa (japonica
  misc_feature (1)..(157): Homolog of NCBI NO: 3851638 NR Description: chaperone GrpE type 1 [Nicotiana tabacum]
  misc_feature (1)..(165): Homolog of NCBI NO: 3851640 NR Description: chaperone GrpE type 2 [Nicotiana tabacum]
  misc_feature (1)..(165): Homolog of NCBI NO: 18416821 NR Description: grpE like protein
  misc_feature (1)..(165): Homolog of NCBI NO: 7485329 NR Description: hypothetical protein F10M23.120 - Arabidopsis
  misc_feature (1)..(165): Homolog of NCBI NO: 21554173 NR Description: chaperone GrpE-like protein [Arabidopsis thaliana]
  misc_feature (1)..(165): Homolog of NCBI NO: 15240475 NR Description: chaperone GrpE-like protein
MEMKDKFLRTYAEQQNLMDRTNRNAESAKKFAVQNFATSLLDVADNLERASSVVKESFSKIDTSKDLAGATPLLKNLLEGVEMTEKQLAEVFRKAGLVKEDPLNEPFNPNRHNAVFQVPDASKPKGTIAHVLKSGYSLYDRVIRPAEVGVTCAVENQEGGKESAA

SEQ ID NO: 34785 - protein, 163 aa, Arabidopsis thaliana
  peptide (1)..(163): Ceres Seq. ID no. 12395914
  misc_feature (1)..(150): Pfam Name: GrpE Pfam Description: GrpE
  misc_feature (1)..(142): Homolog of NCBI NO: 23508449 NR Description: co-chaperone GrpE, putative [Plasmodium
  misc_feature (1)..(148): Homolog of NCBI NO: 23482781 NR Description: co-chaperone GrpE, putative [Plasmodium yoelii
  misc_feature (1)..(163): Homolog of NCBI NO: 1669597 NR Description: AR192 [Arabidopsis thaliana]
  misc_feature (1)..(149): Homolog of NCBI NO: 38636943 NR Description: putative chaperone GrpE [Oryza sativa (japonica
  misc_feature (1)..(155): Homolog of NCBI NO: 3851638 NR Description: chaperone GrpE type 1 [Nicotiana tabacum]
  misc_feature (1)..(163): Homolog of NCBI NO: 3851640 NR Description: chaperone GrpE type 2 [Nicotiana tabacum]
  misc_feature (1)..(163): Homolog of NCBI NO: 18416821 NR Description: grpE like protein
  misc_feature (1)..(163): Homolog of NCBI NO: 7485329 NR Description: hypothetical protein F10M23.120 - Arabidopsis
  misc_feature (1)..(163): Homolog of NCBI NO: 21554173 NR Description: chaperone GrpE-like protein [Arabidopsis thaliana]
  misc_feature (1)..(163): Homolog of NCBI NO: 15240475 NR Description: chaperone GrpE-like protein
MKDKFLRTYAEQQNLMDRTNRNAESAKKFAVQNFATSLLDVADNLERASSVVKESFSKIDTSKDLAGATPLLKNLLEGVEMTEKQLAEVFRKAGLVKEDPLNEPFNPNRHNAVFQVPDASKPKGTIAHVLKSGYSLYDRVIRPAEVGVTCAVENQEGGKESAA

SEQ ID NO: 34786 - DNA, 1702 bp, Arabidopsis thaliana
  misc_feature (1)..(1702): Ceres Seq. ID no. 12385366
  misc_feature: MA Experiment ID: 108433 Result: Down-regulated in Transcription
  misc_feature: MA Experiment 108433 PARAMETER Experiment Name: At_rhl_Mutant2_cDNA_P Parameter: Age (day) Value: 7
  misc_feature: MA Experiment 108433 PARAMETER Experiment Name: At_rhl_Mutant2_cDNA_P Parameter: Organism Value: A. thaliana
  misc_feature: MA Experiment 108433 PARAMETER Experiment Name: At_rhl_Mutant2_cDNA_P Parameter: Plant Line Value: rhl Mutant vs. wt landsburg
  misc_feature: MA Experiment 108433 PARAMETER Experiment Name: At_rhl_Mutant2_cDNA_P Parameter: Tissue Value: Roots
  misc_feature: MA Experiment ID: 108434 Result: Down-regulated in Transcription
  misc_feature: MA Experiment 108434 PARAMETER Experiment Name: At_Root_Tips_cDNA_P Parameter: Tissue Value: Root Tips
  misc_feature: MA Experiment ID: 108595 Result: Up-regulated in Transcription
  misc_feature: MA Experiment 108595 PARAMETER Experiment Name: At_Ler-pi_Ovule_cDNA_P Parameter: Plant Line Value: null
  misc_feature: MA Experiment ID: 20001910 Result: Up-regulated in Transcription
  misc_feature: MA Experiment 20001910 PARAMETER Experiment Name: At_Drought_Reproduction_P Parameter: Age (day) Value: 37
  misc_feature: MA Experiment 20001910 PARAMETER Experiment Name: At_Drought_Reproduction_P Parameter: Organism Value: A. thaliana
  misc_feature: MA Experiment 20001910 PARAMETER Experiment Name: At_Drought_Reproduction_P Parameter: Plant Line Value: WS
  misc_feature: MA Experiment 20001910 PARAMETER Experiment Name: At_Drought_Reproduction_P Parameter: Timepoint (day) Value: 7
  misc_feature: MA Experiment 20001910 PARAMETER Experiment Name: At_Drought_Reproduction_P Parameter: Tissue Value: Flowers
  misc_feature: MA Experiment 20001910 PARAMETER Experiment Name: At_Drought_Reproduction_P Parameter: Treatment Value: Drought vs. No Drought
acttcaaacctcaaaagcaatttagctctctgtcttcaagatgacttctcttttcttctttgttctccttttctcgtctcttctcataagcaatggcgatgccaacccaaattacaaagaagctctctccaagtcattgctcttcttccaaggtcagcgatctggtcctcttcctagaggccaacaaatttcctggagggctagctctggcctttccgatggctctgctgctcatgtggacttaaccggcgggtactatgacgcaggagacaacgtcaagttcaatttaccaatggcgtttaccaccacaatgctctcatggagcgcactggaatacggtaaacggatgggtcctgagctggaaaatgcacgtgtgaacatccgttgggccacagattatctgctgaaatgtgccagagccacgccggggaagctttatgtcgctgtaggagatcctaatgttgatcacaaatgctgggaacgccctgaagacatggacacaccacgtacagtttactctgtatccgcttccaatcccggttctgatgtcgcagccaaaacagcagcagctctagctgcagcttctatggttttcagaaaagttgattccaagtattcacgtttgctgctcgcaacagctaaggatgtgatgcagtttgccattcagtaccagggagcttacagtgattccctttcctcatctgtctgtcctttctactgctcctactctggttacaaggacgagctaatgtggggtgcgtcatggctgctaagagcaacgaataacccgtattacgcaaacttcataaaatctttaggaggtggagatcagcctgacatcttcagctgggacaataaatatgctggtgcctatgttcttctctcacggagagcattacttaacaaagacagcaactttgaacaattattaagcaagcagctgagaatttcatctgcaaaatccttccagattctccttcttcctctacccaatacactcaaggaggattaatgtacaagctacctcaaagcaatcttcagtacgtaacctccataacattcttgctcacaacttacgccaaatacatgaaagccacaaaacacacattcaattgcggaagctccattatcgtccccaacgccttgataagcctatcgaagcgacaagttgattacatactcggagataacccaatcaaaatgtcatacatggttggattctcttccaatttccctaagagaatccaccacatatcatcttctcttccttcacacgcacttcgttctcaatcgttaggctgcaatggtggattccaatcgttctacactcaaaaccctaaccctaacattctcaccggagcaatcgtaggaggtccgaatcaaaacgatgggtatccagatcagagagacgattatagtcacgcggaaccggcgacttatataaacgccgccttcgtcggacctttggcgtacttctccgccggccgttcgacttgaaattgaattcgccaccgccacattctccgatttgtagtcccattgttagttaaagatccgttggtccaagcctaacgtgaaaatcagaagggacaaagttatttaaatgtaaaactcttaatgggctaagacccaatactaaaggacccgacggaaatatttctcgtggtcttatttaactctaaccatcatcattacgcgtttc

SEQ ID NO: 34787 - protein, 323 aa, Arabidopsis thaliana
  peptide (1)..(323): Ceres Seq. ID no. 12385367
  misc_feature (24)..(315): Pfam Name: Glycosyl hydrolase family 9 Pfam Description: Glycosyl hydrolase family 9
  misc_feature (21)..(287): Homolog of NCBI NO: 7484476 NR Description: cellulase (EC 3.2.1.4) 1 precursor - Monterey
  misc_feature (24)..(319): Homolog of NCBI NO: 11357128 NR Description: cellulase (EC 3.2.1.4) 2 precursor - Monterey
  misc_feature (5)..(323): Homolog of NCBI NO: 2129545 NR Description: cellulase (EC 3.2.1.4) - Arabidopsis thaliana
  misc_feature (14)..(315): Homolog of NCBI NO: 7488976 NR Description: cellulase (EC 3.2.1.4) - tomato
  misc_feature (8)..(294): Homolog of NCBI NO: 16903349 NR Description: endo-beta-1,4-glucanase precursor [Nicotiana
  misc_feature (2)..(295): Homolog of NCBI NO: 7488790 NR Description: cellulase (EC 3.2.1.4) precursor - garden pea
  misc_feature (14)..(294): Homolog of NCBI NO: 7488905 NR Description: cellulase (EC 3.2.1.4) - sweet orange
  misc_feature (1)..(315): Homolog of NCBI NO: 15219963 NR Description: glycosyl hydrolase family 9; protein id:
  misc_feature (1)..(315): Homolog of NCBI NO: 21554174 NR Description: putative beta-glucanase [Arabidopsis thaliana]
  misc_feature (1)..(315): Homolog of NCBI NO: 15217446 NR Description: glycosyl hydrolase family 9
MTSLFFFVLLFSSLLISNGDANPNYKEALSKSLLFFQGQRSGPLPRGQQISWRASSGLSDGSAAHVDLTGGYYDAGDNVKFNLPMAFTTTMLSWSALEYGKRMGPELENARVNIRWATDYLLKCARATPGKLYVAVGDPNVDHKCWERPEDMDTPRTVYSVSASNPGSDVAAKTAAALAAASMVFRKVDSKYSRLLLATAKDVMQFAIQYQGAYSDSLSSSVCPFYCSYSGYKDELMWGASWLLRATNNPYYANFIKSLGGGDQPDIFSWDNKYAGAYVLLSRRALLNKDSNFEQLLSKQLRISSAKSFQILLLPLPNTLKED

SEQ ID NO: 34788 - protein, 239 aa, Arabidopsis thaliana
  peptide (1)..(239): Ceres Seq. ID no. 12385368
  misc_feature (1)..(231): Pfam Name: Glycosyl hydrolase family 9 Pfam Description: Glycosyl hydrolase family 9
  misc_feature (1)..(203): Homolog of NCBI NO: 7484476 NR Description: cellulase (EC 3.2.1.4) 1 precursor - Monterey
  misc_feature (1)..(235): Homolog of NCBI NO: 11357128 NR Description: cellulase (EC 3.2.1.4) 2 precursor - Monterey
  misc_feature (1)..(239): Homolog of NCBI NO: 2129545 NR Description: cellulase (EC 3.2.1.4) - Arabidopsis thaliana
  misc_feature (1)..(231): Homolog of NCBI NO: 7488976 NR Description: cellulase (EC 3.2.1.4) - tomato
  misc_feature (1)..(210): Homolog of NCBI NO: 16903349 NR Description: endo-beta-1,4-glucanase precursor [Nicotiana
  misc_feature (1)..(211): Homolog of NCBI NO: 7488790 NR Description: cellulase (EC 3.2.1.4) precursor - garden pea
  misc_feature (1)..(210): Homolog of NCBI NO: 7488905 NR Description: cellulase (EC 3.2.1.4) - sweet orange
  misc_feature (1)..(231): Homolog of NCBI NO: 15219963 NR Description: glycosyl hydrolase family 9; protein id:
  misc_feature (1)..(231): Homolog of NCBI NO: 21554174 NR Description: putative beta-glucanase [Arabidopsis thaliana]
  misc_feature (1)..(231): Homolog of NCBI NO: 15217446 NR Description: glycosyl hydrolase family 9
MAFTTTMLSWSALEYGKRMGPELENARVNIRWATDYLLKCARATPGKLYVAVGDPNVDHKCWERPEDMDTPRTVYSVSASNPGSDVAAKTAAALAAASMVFRKVDSKYSRLLLATAKDVMQFAIQYQGAYSDSLSSSVCPFYCSYSGYKDELMWGASWLLRATNNPYYANFIKSLGGGDQPDIFSWDNKYAGAYVLLSRRALLNKDSNFEQLLSKQLRISSAKSFQILLLPLPNTLKED

SEQ ID NO: 34789 - protein, 233 aa, Arabidopsis thaliana
  peptide (1)..(233): Ceres Seq. ID no. 12385369
  misc_feature (1)..(225): Pfam Name: Glycosyl hydrolase family 9 Pfam Description: Glycosyl hydrolase family 9
  misc_feature (1)..(197): Homolog of NCBI NO: 7484476 NR Description: cellulase (EC 3.2.1.4) 1 precursor - Monterey
  misc_feature (1)..(229): Homolog of NCBI NO: 11357128 NR Description: cellulase (EC 3.2.1.4) 2 precursor - Monterey
  misc_feature (1)..(233): Homolog of NCBI NO: 2129545 NR Description: cellulase (EC 3.2.1.4) - Arabidopsis thaliana
  misc_feature (1)..(225): Homolog of NCBI NO: 7488976 NR Description: cellulase (EC 3.2.1.4) - tomato
  misc_feature (1)..(204): Homolog of NCBI NO: 16903349 NR Description: endo-beta-1,4-glucanase precursor [Nicotiana
  misc_feature (1)..(205): Homolog of NCBI NO: 7488790 NR Description: cellulase (EC 3.2.1.4) precursor - garden pea
  misc_feature (1)..(204): Homolog of NCBI NO: 7488905 NR Description: cellulase (EC 3.2.1.4) - sweet orange
  misc_feature (1)..(225): Homolog of NCBI NO: 15219963 NR Description: glycosyl hydrolase family 9; protein id:
  misc_feature (1)..(225): Homolog of NCBI NO: 21554174 NR Description: putative beta-glucanase [Arabidopsis thaliana]
  misc_feature (1)..(225): Homolog of NCBI NO: 15217446 NR Description: glycosyl hydrolase family 9
MLSWSALEYGKRMGPELENARVNIRWATDYLLKCARATPGKLYVAVGDPNVDHKCWERPEDMDTPRTVYSVSASNPGSDVAAKTAAALAAASMVFRKVDSKYSRLLLATAKDVMQFAIQYQGAYSDSLSSSVCPFYCSYSGYKDELMWGASWLLRATNNPYYANFIKSLGGGDQPDIFSWDNKYAGAYVLLSRRALLNKDSNFEQLLSKQLRISSAKSFQILLLPLPNTLKED

SEQ ID NO: 34790 - DNA, 981 bp, Arabidopsis thaliana
  misc_feature (1)..(981): Ceres Seq. ID no. 12482792
  misc_feature: MA Experiment ID: 108435 Result: Down-regulated in Transcription
  misc_feature: MA Experiment 108435 PARAMETER Experiment Name: At_stm_Mutants_cDNA_P Parameter: Plant Line Value: wt Landsburg vs stm
  misc_feature: MA Experiment 108435 PARAMETER Experiment Name: At_stm_Mutants_cDNA_P Parameter: Tissue Value: Shoot Apical Meristem Region
  misc_feature: MA Experiment ID: 108461 Result: Up-regulated in Transcription
  misc_feature: MA Experiment 108461 PARAMETER Experiment Name: At_Germinating_Seeds_cDNA_P Parameter: Age (day) Value: 1 vs. 0
  misc_feature: MA Experiment 108461 PARAMETER Experiment Name: At_Germinating_Seeds_cDNA_P Parameter: Tissue Value: Germinating Seeds
  misc_feature: MA Experiment ID: 108462 Result: Up-regulated in Transcription
  misc_feature: MA Experiment 108462 PARAMETER Experiment Name: At_Germinating_Seeds_cDNA_P Parameter: Age (day) Value: 2 vs. 0
  misc_feature: MA Experiment 108462 PARAMETER Experiment Name: At_Germinating_Seeds_cDNA_P Parameter: Tissue Value: Germinating Seeds
  misc_feature: MA Experiment ID: 108464 Result: Up-regulated in Transcription
  misc_feature: MA Experiment 108464 PARAMETER Experiment Name: At_Germinating_Seeds_cDNA_P Parameter: Age (day) Value: 4 vs. 0
  misc_feature: MA Experiment 108464 PARAMETER Experiment Name: At_Germinating_Seeds_cDNA_P Parameter: Tissue Value: Germinating Seeds
  misc_feature: MA Experiment ID: 108488 Result: Up-regulated in Transcription
  misc_feature: MA Experiment ID: 108489 Result: Down-regulated in Transcription
  misc_feature: MA Experiment ID: 108595 Result: Down-regulated in Transcription
  misc_feature: MA Experiment 108595 PARAMETER Experiment Name: At_Ler-pi_Ovule_cDNA_P Parameter: Plant Line Value: null
  misc_feature: MA Experiment ID: 20000185 Result: Down-regulated in Transcription
  misc_feature: MA Experiment 20000185 PARAMETER Experiment Name: At_Roots__P Parameter: Age (day) Value: 7 vs. 21
  misc_feature: MA Experiment 20000185 PARAMETER Experiment Name: At_Roots__P Parameter: Organism Value: A. thaliana
  misc_feature: MA Experiment 20000185 PARAMETER Experiment Name: At_Roots__P Parameter: Tissue Value: Roots vs. Whole Plant
  misc_feature: MA Experiment ID: 20000438 Result: Up-regulated in Transcription
  misc_feature: MA Experiment 20000438 PARAMETER Experiment Name: At_Shoots__P Parameter: Age (day) Value: 14
  misc_feature: MA Experiment 20000438 PARAMETER Experiment Name: At_Shoots__P Parameter: Tissue Value: Shoots vs. Whole Plant
  misc_feature: MA Experiment ID: 20000439 Result: Down-regulated in Transcription
  misc_feature: MA Experiment 20000439 PARAMETER Experiment Name: At_Roots__P Parameter: Age (day) Value: 14 vs. 21
  misc_feature: MA Experiment 20000439 PARAMETER Experiment Name: At_Roots__P Parameter: Organism Value: A. thaliana
  misc_feature: MA Experiment 20000439 PARAMETER Experiment Name: At_Roots__P Parameter: Tissue Value: Roots vs. Whole Plant
  misc_feature: MA Experiment ID: 20001557 Result: Down-regulated in Transcription
  misc_feature: MA Experiment 20001557 PARAMETER Experiment Name: At_Drought_Soil_Dry_P Parameter: Age (day) Value: 27
  misc_feature: MA Experiment 20001557 PARAMETER Experiment Name: At_Drought_Soil_Dry_P Parameter: Organism Value: A. thaliana
  misc_feature: MA Experiment 20001557 PARAMETER Experiment Name: At_Drought_Soil_Dry_P Parameter: Plant Line Value: WS
  misc_feature: MA Experiment 20001557 PARAMETER Experiment Name: At_Drought_Soil_Dry_P Parameter: Post Timepoint (hr) Value: 3
  misc_feature: MA Experiment 20001557 PARAMETER Experiment Name: At_Drought_Soil_Dry_P Parameter: Post-Treatment Value: Re-Water vs. No Drought
  misc_feature: MA Experiment 20001557 PARAMETER Experiment Name: At_Drought_Soil_Dry_P Parameter: Timepoint (day) Value: 13
  misc_feature: MA Experiment 20001557 PARAMETER Experiment Name: At_Drought_Soil_Dry_P Parameter: Treatment Value: Drought vs. No Drought
aatctgacgaccacagcctttagcttatttgtgtggcgaagagaagagataacattcctaagcaaatctcttctctctcccattcgtctccaaagagattacagttttgagcatttctcatctctcgaagctcttctctgtgtgtgtggcgatggctgctaattcgataatggcttcctccaaacccctaatctccctgtcatccaaccaacaaccaaaccgagtccaaattcccaaattcgccaaacttccccaaattcccaaatccctcacttcctccaccgatctccgtagcaaagcactatcactctcctccgccaccgccaaatccttagctttaatcgccgctttcgctcctccgtcgatggcggaggcgatggagaaagcacagctcttcgatttcaatctcacgcttccgatcatcgttgttgagtttctcttcttgatgttcgctctcgacaaggtctattactctccgcttggtaacttcatggatcaaagagacgcttccatcaaagagaagctcgcgagtgttaaggacacttcgactgaagtaaaggagctcgatgagcaagccgccgccgtgatgagagcagctagggctgagatcgccgccgcgcttaacaagatgaagaaggagactcaggttgaagtcgaggagaagctagcggagggaaggaagaaggtggaggaagagctaaaagaagctttggcgagcttggagagtcagaaagaagaaaccattaaagctttggattctcagattgctgctcttagtgaagacattgtcaagaaggttcttccttcttaaattatatttttgttaactgtgtaattctctgtctctctatctcaaaacttatttacaagaaattactgtaaatctcttcttcttcttcttctctgtttcttggattgttcgtcgttcaaagaagaacaatttttattttgtaagtttataaataattagctctcttctgt

SEQ ID NO: 34791 - protein, 219 aa, Arabidopsis thaliana; identical to SEQ ID NO: 21586
  peptide (1)..(219): Ceres Seq. ID no. 12482793
  misc_feature (81)..(217): Homolog of NCBI NO: 461596 NR Description: ATP synthase B' chain (Subunit II)
  misc_feature (81)..(217): Homolog of NCBI NO: 22297975 NR Description: H+-transporting ATP synthase chain b'
  misc_feature (71)..(217): Homolog of NCBI NO: 23043220 NR Description: hypothetical protein [Trichodesmium erythraeum
  misc_feature (75)..(217): Homolog of NCBI NO: 11467368 NR Description: ATP synthase CF0 beta' chain [Cyanophora
  misc_feature (37)..(218): Homolog of NCBI NO: 5902610 NR Description: CFO ATP synthase subunit II precursor
  misc_feature (7)..(219): Homolog of NCBI NO: 29367413 NR Description: H+-transporting ATP synthase chain 9-like protein
  misc_feature (3)..(218): Homolog of NCBI NO: 448445 NR Description: CF0 ATP synthase:SUBUNIT=9
  misc_feature (3)..(218): Homolog of NCBI NO: 461595 NR Description: ATP synthase B' chain, chloroplast precursor
  misc_feature (1)..(219): Homolog of NCBI NO: 14596171 NR Description: H+-transporting ATP synthase-like protein
  misc_feature (1)..(219): Homolog of NCBI NO: 15236722 NR Description: H+-transporting ATP synthase chain 9 - like

SEQ ID NO: 34792 - protein, 213 aa, Arabidopsis thaliana; identical to SEQ ID NO: 21587
  peptide (1)..(213): Ceres Seq. ID no. 12482794
  misc_feature (75)..(211): Homolog of NCBI NO: 461596 NR Description: ATP synthase B' chain (Subunit II)
  misc_feature (75)..(211): Homolog of NCBI NO: 22297975 NR Description: H+-transporting ATP synthase chain b'
  misc_feature (65)..(211): Homolog of NCBI NO: 23043220 NR Description: hypothetical protein [Trichodesmium erythraeum
  misc_feature (69)..(211): Homolog of NCBI NO: 11467368 NR Description: ATP synthase CF0 beta' chain [Cyanophora
  misc_feature (31)..(212): Homolog of NCBI NO: 5902610 NR Description: CFO ATP synthase subunit II precursor
  misc_feature (1)..(213): Homolog of NCBI NO: 29367413 NR Description: H+-transporting ATP synthase chain 9-like protein
  misc_feature (1)..(212): Homolog of NCBI NO: 448445 NR Description: CF0 ATP synthase:SUBUNIT=9
  misc_feature (1)..(212): Homolog of NCBI NO: 461595 NR Description: ATP synthase B' chain, chloroplast precursor
  misc_feature (1)..(213): Homolog of NCBI NO: 14596171 NR Description: H+-transporting ATP synthase-like protein
  misc_feature (1)..(213): Homolog of NCBI NO: 15236722 NR Description: H+-transporting ATP synthase chain 9 - like

SEQ ID NO: 34793 - protein, 148 aa, Arabidopsis thaliana; identical to SEQ ID NO: 21588
  peptide (1)..(148): Ceres Seq. ID no. 12482795
  misc_feature (10)..(146): Homolog of NCBI NO: 461596 NR Description: ATP synthase B' chain (Subunit II)
  misc_feature (10)..(146): Homolog of NCBI NO: 22297975 NR Description: H+-transporting ATP synthase chain b'
  misc_feature (1)..(146): Homolog of NCBI NO: 23043220 NR Description: hypothetical protein [Trichodesmium erythraeum
  misc_feature (4)..(146): Homolog of NCBI NO: 11467368 NR Description: ATP synthase CF0 beta' chain [Cyanophora
  misc_feature (1)..(147): Homolog of NCBI NO: 5902610 NR Description: CFO ATP synthase subunit II precursor
  misc_feature (1)..(148): Homolog of NCBI NO: 29367413 NR Description: H+-transporting ATP synthase chain 9-like protein
  misc_feature (1)..(147): Homolog of NCBI NO: 448445 NR Description: CF0 ATP synthase:SUBUNIT=9
  misc_feature (1)..(147): Homolog of NCBI NO: 461595 NR Description: ATP synthase B' chain, chloroplast precursor
  misc_feature (1)..(148): Homolog of NCBI NO: 14596171 NR Description: H+-transporting ATP synthase-like protein
  misc_feature (1)..(148): Homolog of NCBI NO: 15236722 NR Description: H+-transporting ATP synthase chain 9 - like

SEQ ID NO: 34794 - DNA, 1216 bp, Arabidopsis thaliana
  misc_feature (1)..(1216): Ceres Seq. ID no. 12350411
  misc_feature: MA Experiment ID: 108435 Result: Up-regulated in Transcription
  misc_feature: MA Experiment 108435 PARAMETER Experiment Name: At_stm_Mutants_cDNA_P Parameter: Plant Line Value: wt Landsburg vs stm
  misc_feature: MA Experiment 108435 PARAMETER Experiment Name: At_stm_Mutants_cDNA_P Parameter: Tissue Value: Shoot Apical Meristem Region
  misc_feature: MA Experiment ID: 108462 Result: Up-regulated in Transcription
  misc_feature: MA Experiment 108462 PARAMETER Experiment Name: At_Germinating_Seeds_cDNA_P Parameter: Age (day) Value: 2 vs. 0
  misc_feature: MA Experiment 108462 PARAMETER Experiment Name: At_Germinating_Seeds_cDNA_P Parameter: Tissue Value: Germinating Seeds
  misc_feature: MA Experiment ID: 108464 Result: Up-regulated in Transcription
  misc_feature: MA Experiment 108464 PARAMETER Experiment Name: At_Germinating_Seeds_cDNA_P Parameter: Age (day) Value: 4 vs. 0
  misc_feature: MA Experiment 108464 PARAMETER Experiment Name: At_Germinating_Seeds_cDNA_P Parameter: Tissue Value: Germinating Seeds
  misc_feature: MA Experiment ID: 108573 Result: Up-regulated in Transcription
  misc_feature: MA Experiment 108573 PARAMETER Experiment Name: At_Drought_cDNA_P Parameter: Timepoint (hr) Value: 6
  misc_feature: MA Experiment 108573 PARAMETER Experiment Name: At_Drought_cDNA_P Parameter: Tissue Value: Aerial
  misc_feature: MA Experiment 108573 PARAMETER Experiment Name: At_Drought_cDNA_P Parameter: Treatment Value: Drought vs. No Drought
  misc_feature: MA Experiment ID: 108585 Result: Up-regulated in Transcription
  misc_feature: MA Experiment 108585 PARAMETER Experiment Name: At_5mM_NaNP_cDNA_P Parameter: Timepoint (hr) Value: 6
  misc_feature: MA Experiment 108585 PARAMETER Experiment Name: At_5mM_NaNP_cDNA_P Parameter: Tissue Value: Aerial
  misc_feature: MA Experiment 108585 PARAMETER Experiment Name: At_5mM_NaNP_cDNA_P Parameter: Treatment Value: null
  misc_feature: MA Experiment ID: 20000071 Result: Up-regulated in Transcription
  misc_feature: MA Experiment 20000071 PARAMETER Experiment Name: At_100uM_ABA_Mutants_cDNA_P Parameter: Plant Line Value: CS8104
  misc_feature: MA Experiment 20000071 PARAMETER Experiment Name: At_100uM_ABA_Mutants_cDNA_P Parameter: Timepoint (hr) Value: 6
  misc_feature: MA Experiment 20000071 PARAMETER Experiment Name: At_100uM_ABA_Mutants_cDNA_P Parameter: Tissue Value: Aerial
  misc_feature: MA Experiment 20000071 PARAMETER Experiment Name: At_100uM_ABA_Mutants_cDNA_P Parameter: Treatment Value: 100uM ABA vs. No Treatment
  misc_feature: MA Experiment ID: 20000072 Result: Up-regulated in Transcription
  misc_feature: MA Experiment 20000072 PARAMETER Experiment Name: At_100uM_ABA_Mutants_cDNA_P Parameter: Plant Line Value: CS8105
  misc_feature: MA Experiment 20000072 PARAMETER Experiment Name: At_100uM_ABA_Mutants_cDNA_P Parameter: Timepoint (hr) Value: 6
  misc_feature: MA Experiment 20000072 PARAMETER Experiment Name: At_100uM_ABA_Mutants_cDNA_P Parameter: Tissue Value: Aerial
  misc_feature: MA Experiment 20000072 PARAMETER Experiment Name: At_100uM_ABA_Mutants_cDNA_P Parameter: Treatment Value: 100uM ABA vs. No Treatment
  misc_feature: MA Experiment ID: 20000093 Result: Up-regulated in Transcription
  misc_feature: MA Experiment 20000093 PARAMETER Experiment Name: At_42deg_Heat_cDNA_P Parameter: Temperature (deg C) Value: 42 vs. 22
  misc_feature: MA Experiment 20000093 PARAMETER Experiment Name: At_42deg_Heat_cDNA_P Parameter: Timepoint (hr) Value: 0.5
  misc_feature: MA Experiment 20000093 PARAMETER Experiment Name: At_42deg_Heat_cDNA_P Parameter: Tissue Value: Aerial
  misc_feature: MA Experiment ID: 20000112 Result: Up-regulated in Transcription
  misc_feature: MA Experiment 20000112 PARAMETER Experiment Name: At_42deg_Heat_cDNA_P Parameter: Temperature (deg C) Value: 42 vs. 22
  misc_feature: MA Experiment 20000112 PARAMETER Experiment Name: At_42deg_Heat_cDNA_P Parameter: Timepoint (hr) Value: 2
  misc_feature: MA Experiment 20000112 PARAMETER Experiment Name: At_42deg_Heat_cDNA_P Parameter: Tissue Value: Aerial
  misc_feature: MA Experiment ID: 20000113 Result: Up-regulated in Transcription
  misc_feature: MA Experiment 20000113 PARAMETER Experiment Name: At_42deg_Heat_cDNA_P Parameter: Temperature (deg C) Value: 42 vs. 22
  misc_feature: MA Experiment 20000113 PARAMETER Experiment Name: At_42deg_Heat_cDNA_P Parameter: Timepoint (hr) Value: 8
  misc_feature: MA Experiment 20000113 PARAMETER Experiment Name: At_42deg_Heat_cDNA_P Parameter: Tissue Value: Aerial
  misc_feature: MA Experiment ID: 20000117 Result: Up-regulated in Transcription
  misc_feature: MA Experiment 20000117 PARAMETER Experiment Name: At_100uM_ABA_Mutants_cDNA_P Parameter: Plant Line Value: Columbia
  misc_feature: MA Experiment 20000117 PARAMETER Experiment Name: At_100uM_ABA_Mutants_cDNA_P Parameter: Timepoint (hr) Value: 6
  misc_feature: MA Experiment 20000117 PARAMETER Experiment Name: At_100uM_ABA_Mutants_cDNA_P Parameter: Tissue Value: Aerial
  misc_feature: MA Experiment 20000117 PARAMETER Experiment Name: At_100uM_ABA_Mutants_cDNA_P Parameter: Treatment Value: 100uM ABA vs. No Treatment
  misc_feature: MA Experiment ID: 20000144 Result: Up-regulated in Transcription
  misc_feature: MA Experiment 20000144 PARAMETER Experiment Name: At_42deg_Heat_cDNA_P Parameter: Temperature (deg C) Value: 42 vs. 22
  misc_feature: MA Experiment 20000144 PARAMETER Experiment Name: At_42deg_Heat_cDNA_P Parameter: Timepoint (hr) Value: 1
  misc_feature: MA Experiment 20000144 PARAMETER Experiment Name: At_42deg_Heat_cDNA_P Parameter: Tissue Value: Aerial
  misc_feature: MA Experiment ID: 20000169 Result: Up-regulated in Transcription
  misc_feature: MA Experiment 20000169 PARAMETER Experiment Name: At_100uM_ABA_P Parameter: Age (day) Value: 14
  misc_feature: MA Experiment 20000169 PARAMETER Experiment Name: At_100uM_ABA_P Parameter: Organism Value: A. thaliana
  misc_feature: MA Experiment 20000169 PARAMETER Experiment Name: At_100uM_ABA_P Parameter: Plant Line Value: WS
  misc_feature: MA Experiment 20000169 PARAMETER Experiment Name: At_100uM_ABA_P Parameter: Timepoint (hr) Value: 6
  misc_feature: MA Experiment 20000169 PARAMETER Experiment Name: At_100uM_ABA_P Parameter: Tissue Value: Aerial
  misc_feature: MA Experiment 20000169 PARAMETER Experiment Name: At_100uM_ABA_P Parameter: Treatment Value: 100uM ABA vs. No Treatment
  misc_feature: MA Experiment ID: 20000171 Result: Up-regulated in Transcription
  misc_feature: MA Experiment 20000171 PARAMETER Experiment Name: At_42deg_Heat_P Parameter: Age (day) Value: 14
  misc_feature: MA Experiment 20000171 PARAMETER Experiment Name: At_42deg_Heat_P Parameter: Organism Value: A. thaliana
  misc_feature: MA Experiment 20000171 PARAMETER Experiment Name: At_42deg_Heat_P Parameter: Plant Line Value: WS
  misc_feature: MA Experiment 20000171 PARAMETER Experiment Name: At_42deg_Heat_P Parameter: Temperature (deg C) Value: 42 vs. 22
  misc_feature: MA Experiment 20000171 PARAMETER Experiment Name: At_42deg_Heat_P Parameter: Timepoint (hr) Value: 1
  misc_feature: MA Experiment 20000171 PARAMETER Experiment Name: At_42deg_Heat_P Parameter: Tissue Value: Aerial
  misc_feature: MA Experiment ID: 20000179 Result: Up-regulated in Transcription
  misc_feature: MA Experiment 20000179 PARAMETER Experiment Name: At_Germinating_Seeds_P Parameter: Age (hr) Value: 6 vs. 0
  misc_feature: MA Experiment 20000179 PARAMETER Experiment Name: At_Germinating_Seeds_P Parameter: Tissue Value: Germinating Seeds
  misc_feature: MA Experiment ID: 20000180 Result: Up-regulated in Transcription
  misc_feature: MA Experiment 20000180 PARAMETER Experiment Name: At_Germinating_Seeds_P Parameter: Age (hr) Value: 24 vs. 0
  misc_feature: MA Experiment 20000180 PARAMETER Experiment Name: At_Germinating_Seeds_P Parameter: Tissue Value: Germinating Seeds
  misc_feature: MA Experiment ID: 20000460 Result: Down-regulated in Transcription
  misc_feature: MA Experiment 20000460 PARAMETER Experiment Name: At_10percent_PEG_P Parameter: Age (day) Value: 12
  misc_feature: MA Experiment 20000460 PARAMETER Experiment Name: At_10percent_PEG_P Parameter: Organism Value: A. thaliana
  misc_feature: MA Experiment 20000460 PARAMETER Experiment Name: At_10percent_PEG_P Parameter: Plant Line Value: WS
  misc_feature: MA Experiment 20000460 PARAMETER Experiment Name: At_10percent_PEG_P Parameter: Timepoint (day) Value: 12
  misc_feature: MA Experiment 20000460 PARAMETER Experiment Name: At_10percent_PEG_P Parameter: Tissue Value: Whole Plant
  misc_feature: MA Experiment 20000460 PARAMETER Experiment Name: At_10percent_PEG_P Parameter: Treatment Value: 10percent PEG vs. No Treatment
  misc_feature: MA Experiment ID: 20000527 Result: Down-regulated in Transcription
  misc_feature: MA Experiment 20000527 PARAMETER Experiment Name: At_10percent_PEG_P Parameter: Age (day) Value: 20
  misc_feature: MA Experiment 20000527 PARAMETER Experiment Name: At_10percent_PEG_P Parameter: Organism Value: A. thaliana
  misc_feature: MA Experiment 20000527 PARAMETER Experiment Name: At_10percent_PEG_P Parameter: Plant Line Value: WS
  misc_feature: MA Experiment 20000527 PARAMETER Experiment Name: At_10percent_PEG_P Parameter: Timepoint (day) Value: 20
  misc_feature: MA Experiment 20000527 PARAMETER Experiment Name: At_10percent_PEG_P Parameter: Tissue Value: Whole Plant
  misc_feature: MA Experiment 20000527 PARAMETER Experiment Name: At_10percent_PEG_P Parameter: Treatment Value: 10percent PEG vs. No Treatment
  misc_feature: MA Experiment ID: 20000573 Result: Down-regulated in Transcription
  misc_feature: MA Experiment 20000573 PARAMETER Experiment Name: At_100uM_ABA_Mutants__P Parameter: Organism Value: A. thaliana
  misc_feature: MA Experiment 20000573 PARAMETER Experiment Name: At_100uM_ABA_Mutants__P Parameter: Plant Line Value: CS22 vs. Ler wt
  misc_feature: MA Experiment 20000573 PARAMETER Experiment Name: At_100uM_ABA_Mutants__P Parameter: Timepoint (hr) Value: N/A
  misc_feature: MA Experiment 20000573 PARAMETER Experiment Name: At_100uM_ABA_Mutants__P Parameter: Tissue Value: Whole Plant
  misc_feature: MA Experiment 20000573 PARAMETER Experiment Name: At_100uM_ABA_Mutants__P Parameter: Treatment Value: None
  misc_feature: MA Experiment ID: 20000574 Result: Down-regulated in Transcription
  misc_feature: MA Experiment 20000574 PARAMETER Experiment Name: At_100uM_ABA_Mutants__P Parameter: Organism Value: A. thaliana
  misc_feature: MA Experiment 20000574 PARAMETER Experiment Name: At_100uM_ABA_Mutants__P Parameter: Plant Line Value: CS23 vs. Ler wt
  misc_feature: MA Experiment 20000574 PARAMETER Experiment Name: At_100uM_ABA_Mutants__P Parameter: Timepoint (hr) Value: N/A
  misc_feature: MA Experiment 20000574 PARAMETER Experiment Name: At_100uM_ABA_Mutants__P Parameter: Tissue Value: Whole Plant
  misc_feature: MA Experiment 20000574 PARAMETER Experiment Name: At_100uM_ABA_Mutants__P Parameter: Treatment Value: None
  misc_feature: MA Experiment ID: 20001248 Result: Down-regulated in Transcription
  misc_feature: MA Experiment 20001248 PARAMETER Experiment Name: At_Far-red-induction_P Parameter: Age (day) Value: 7
  misc_feature: MA Experiment 20001248 PARAMETER Experiment Name: At_Far-red-induction_P Parameter: Light Value: Far-red vs. White
  misc_feature: MA Experiment 20001248 PARAMETER Experiment Name: At_Far-red-induction_P Parameter: Organism Value: A. thaliana
  misc_feature: MA Experiment 20001248 PARAMETER Experiment Name: At_Far-red-induction_P Parameter: Plant Line Value: Columbia
  misc_feature: MA Experiment 20001248 PARAMETER Experiment Name: At_Far-red-induction_P Parameter: Timepoint (hr) Value: 4
  misc_feature: MA Experiment 20001248 PARAMETER Experiment Name: At_Far-red-induction_P Parameter: Tissue Value: Whole Plant
  misc_feature: MA Experiment ID: 20001450 Result: Down-regulated in Transcription
  misc_feature: MA Experiment 20001450 PARAMETER Experiment Name: At_Far-red-induction_P Parameter: Age (day) Value: 7
  misc_feature: MA Experiment 20001450 PARAMETER Experiment Name: At_Far-red-induction_P Parameter: Light Value: Far-red vs. White
  misc_feature: MA Experiment 20001450 PARAMETER Experiment Name: At_Far-red-induction_P Parameter: Organism Value: A. thaliana
  misc_feature: MA Experiment 20001450 PARAMETER Experiment Name: At_Far-red-induction_P Parameter: Plant Line Value: Columbia
  misc_feature: MA Experiment 20001450 PARAMETER Experiment Name: At_Far-red-induction_P Parameter: Timepoint (hr) Value: 8
  misc_feature: MA Experiment 20001450 PARAMETER Experiment Name: At_Far-red-induction_P Parameter: Tissue Value: Whole Plant
  misc_feature: MA Experiment ID: 20001560 Result: Up-regulated in Transcription
  misc_feature: MA Experiment 20001560 PARAMETER Experiment Name: At_Drought_Soil_Dry_P Parameter: Age (day) Value: 28
  misc_feature: MA Experiment 20001560 PARAMETER Experiment Name: At_Drought_Soil_Dry_P Parameter: Organism Value: A. thaliana
  misc_feature: MA Experiment 20001560 PARAMETER Experiment Name: At_Drought_Soil_Dry_P Parameter: Plant Line Value: WS
  misc_feature: MA Experiment 20001560 PARAMETER Experiment Name: At_Drought_Soil_Dry_P Parameter: Post Timepoint (hr) Value: None
  misc_feature: MA Experiment 20001560 PARAMETER Experiment Name: At_Drought_Soil_Dry_P Parameter: Post-Treatment Value: None
  misc_feature: MA Experiment 20001560 PARAMETER Experiment Name: At_Drought_Soil_Dry_P Parameter: Timepoint (day) Value: 14
  misc_feature: MA Experiment 20001560 PARAMETER Experiment Name: At_Drought_Soil_Dry_P Parameter: Treatment Value: Drought vs. No Drought
aataaaaagtagtactcgtgtcttactcgtgccagccactcgcatttctccagattttattatccttcctcgaaacaagtagatccacgattcgttgctgcgatcggcgttattatcgtcagctctctcgtttctgttctgtggttcgatattgctgagtttctaggctaatcttacgaatctgtgaaagtttttgagagatttggcttctgtagctcactcctgcttgatttagagcttagctaagatgacgaagaactacccaaccgtgagcgaagattacaagaaggctgttgagaagtgcaggaggaagctcagaggtttgatcgctgagaagaactgtgcacccatcatggtccgactcgcatggcactctgctggaactttcgattgtcaatcaaggactggaggtccattcggaacaatgaggtttgacgctgagcaagctcatggagccaacagtggtatccacattgctcttaggttgttggaccccatcagggagcaattccctaccatctcttttgctgatttccatcagcttgctggtgttgtggccgttgaagttactggtggccctgacattcctttccaccctggaagagaggacaagccccaaccacctccagagggtcgtcttcctgatgctaccaagggttgtgaccatttgagagatgtctttgctaagcagatgggcttatctgacaaagacattgtcgctttatctggtgcccacactctgggacgatgccacaaggataggtctggcttcgaaggtgcatggacatcaaaccctctaatcttcgacaactcttacttcaaggaactcttgagcggagagaaggaaggccttcttcagcttgtctctgacaaagcactattggacgaccctgttttccgtcctttggtcgagaaatacgctgctgatgaagatgcctttttcgctgattacgctgaggcccacatgaagctttctgagcttgggtttgctgatgcttaagctgtgacgtatgctctgtgtgtgtgtgtgtgtctccccgagagtcatggctgtttttggttgggggctggaggggtcgcattgcatttgaactttgtcatatgattgcttaatgtactctcggatttacgtatctgtttttttcggtgggttgtgatttgaacacatccgttgcgcttttgctgcttagacacattaataaaattaatttctctc

SEQ ID NO: 34795 - protein, 250 aa, Arabidopsis thaliana; identical to SEQ ID NO: 22608
  peptide (1)..(250): Ceres Seq. ID no. 12350412
  misc_feature (19)..(227): Pfam Name: Peroxidase Pfam Description: Peroxidase
  misc_feature (1)..(250): Homolog of NCBI NO: 24636598 NR Description: ascorbate peroxidase [Solanum tuberosum]
  misc_feature (1)..(250): Homolog of NCBI NO: 7488439 NR Description: L-ascorbate peroxidase (EC 1.11.1.11) - leaf
  misc_feature (1)..(250): Homolog of NCBI NO: 1890354 NR Description: L-ascorbate peroxidase [Brassica napus]
  misc_feature (1)..(250): Homolog of NCBI NO: 541927 NR Description: L-ascorbate peroxidase (EC 1.11.1.11) - radish
  misc_feature (1)..(250): Homolog of NCBI NO: 18265379 NR Description: ascorbate peroxidase [Brassica oleracea]
  misc_feature (1)..(250): Homolog of NCBI NO: 18265381 NR Description: ascorbate peroxidase [Brassica oleracea]
  misc_feature (1)..(250): Homolog of NCBI NO: 24421231 NR Description: ascorbate peroxidase [Brassica juncea]
  misc_feature (1)..(250): Homolog of NCBI NO: 24421233 NR Description: ascorbate peroxidase [Brassica juncea]
  misc_feature (1)..(250): Homolog of NCBI NO: 15223049 NR Description: ascorbate peroxidase, putative (APX)
  misc_feature (1)..(250): Homolog of NCBI NO: 99735 NR Description: L-ascorbate peroxidase (EC 1.11.1.11) precursor -

SEQ ID NO: 34796 - protein, 215 aa, Arabidopsis thaliana; identical to SEQ ID NO: 22609
  peptide (1)..(215): Ceres Seq. ID no. 12350413
  misc_feature (1)..(192): Pfam Name: Peroxidase Pfam Description: Peroxidase
  misc_feature (1)..(215): Homolog of NCBI NO: 24636598 NR Description: ascorbate peroxidase [Solanum tuberosum]
  misc_feature (1)..(215): Homolog of NCBI NO: 7488439 NR Description: L-ascorbate peroxidase (EC 1.11.1.11) - leaf
  misc_feature (1)..(215): Homolog of NCBI NO: 1890354 NR Description: L-ascorbate peroxidase [Brassica napus]
  misc_feature (1)..(215): Homolog of NCBI NO: 541927 NR Description: L-ascorbate peroxidase (EC 1.11.1.11) - radish
  misc_feature (1)..(215): Homolog of NCBI NO: 18265379 NR Description: ascorbate peroxidase [Brassica oleracea]
  misc_feature (1)..(215): Homolog of NCBI NO: 18265381 NR Description: ascorbate peroxidase [Brassica oleracea]
  misc_feature (1)..(215): Homolog of NCBI NO: 24421231 NR Description: ascorbate peroxidase [Brassica juncea]
  misc_feature (1)..(215): Homolog of NCBI NO: 24421233 NR Description: ascorbate peroxidase [Brassica juncea]
  misc_feature (1)..(215): Homolog of NCBI NO: 15223049 NR Description: ascorbate peroxidase, putative (APX)
  misc_feature (1)..(215): Homolog of NCBI NO: 99735 NR Description: L-ascorbate peroxidase (EC 1.11.1.11) precursor -

SEQ ID NO: 34797 - protein, 191 aa, Arabidopsis thaliana; identical to SEQ ID NO: 22610
  peptide (1)..(191): Ceres Seq. ID no. 12350414
  misc_feature (1)..(168): Pfam Name: Peroxidase Pfam Description: Peroxidase
  misc_feature (1)..(191): Homolog of NCBI NO: 24636598 NR Description: ascorbate peroxidase [Solanum tuberosum]
  misc_feature (1)..(191): Homolog of NCBI NO: 7488439 NR Description: L-ascorbate peroxidase (EC 1.11.1.11) - leaf
  misc_feature (1)..(191): Homolog of NCBI NO: 1890354 NR Description: L-ascorbate peroxidase [Brassica napus]
  misc_feature (1)..(191): Homolog of NCBI NO: 541927 NR Description: L-ascorbate peroxidase (EC 1.11.1.11) - radish
  misc_feature (1)..(191): Homolog of NCBI NO: 18265379 NR Description: ascorbate peroxidase [Brassica oleracea]
  misc_feature (1)..(191): Homolog of NCBI NO: 18265381 NR Description: ascorbate peroxidase [Brassica oleracea]
  misc_feature (1)..(191): Homolog of NCBI NO: 24421231 NR Description: ascorbate peroxidase [Brassica juncea]
  misc_feature (1)..(191): Homolog of NCBI NO: 24421233 NR Description: ascorbate peroxidase [Brassica juncea]
  misc_feature (1)..(191): Homolog of NCBI NO: 15223049 NR Description: ascorbate peroxidase, putative (APX)
  misc_feature (1)..(191): Homolog of NCBI NO: 99735 NR Description: L-ascorbate peroxidase (EC 1.11.1.11) precursor -

SEQ ID NO: 34798 - DNA, 1005 bp, Arabidopsis thaliana
  misc_feature (1)..(1005): Ceres Seq. ID no. 13621995
  misc_feature: MA Experiment ID: 108434 Result: Up-regulated in Transcription
  misc_feature: MA Experiment 108434 PARAMETER Experiment Name: At_Root_Tips_cDNA_P Parameter: Tissue Value: Root Tips
  misc_feature: MA Experiment ID: 108461 Result: Down-regulated in Transcription
  misc_feature: MA Experiment 108461 PARAMETER Experiment Name: At_Germinating_Seeds_cDNA_P Parameter: Age (day) Value: 1 vs. 0
  misc_feature: MA Experiment 108461 PARAMETER Experiment Name: At_Germinating_Seeds_cDNA_P Parameter: Tissue Value: Germinating Seeds
  misc_feature: MA Experiment ID: 108462 Result: Down-regulated in Transcription
  misc_feature: MA Experiment 108462 PARAMETER Experiment Name: At_Germinating_Seeds_cDNA_P Parameter: Age (day) Value: 2 vs. 0
  misc_feature: MA Experiment 108462 PARAMETER Experiment Name: At_Germinating_Seeds_cDNA_P Parameter: Tissue Value: Germinating Seeds
  misc_feature: MA Experiment ID: 108463 Result: Down-regulated in Transcription
  misc_feature: MA Experiment 108463 PARAMETER Experiment Name: At_Germinating_Seeds_cDNA_P Parameter: Age (day) Value: 3 vs. 0
  misc_feature: MA Experiment 108463 PARAMETER Experiment Name: At_Germinating_Seeds_cDNA_P Parameter: Tissue Value: Germinating Seeds
  misc_feature: MA Experiment ID: 108464 Result: Down-regulated in Transcription
  misc_feature: MA Experiment 108464 PARAMETER Experiment Name: At_Germinating_Seeds_cDNA_P Parameter: Age (day) Value: 4 vs. 0
  misc_feature: MA Experiment 108464 PARAMETER Experiment Name: At_Germinating_Seeds_cDNA_P Parameter: Tissue Value: Germinating Seeds
  misc_feature: MA Experiment ID: 108585 Result: Up-regulated in Transcription
  misc_feature: MA Experiment 108585 PARAMETER Experiment Name: At_5mM_NaNP_cDNA_P Parameter: Timepoint (hr) Value: 6
  misc_feature: MA Experiment 108585 PARAMETER Experiment Name: At_5mM_NaNP_cDNA_P Parameter: Tissue Value: Aerial
  misc_feature: MA Experiment 108585 PARAMETER Experiment Name: At_5mM_NaNP_cDNA_P Parameter: Treatment Value: null
agagcaaaagcttctgtttattctccgattcgcagatcaattagctgggttttgattccgttgtgcgaaggactttaagaggttttgcagatcgaaatcggaagagaagaagaagatgtttctcactagaactgagtatgacagaggagtgaacactttttctccagaaggaaggctatttcaagtggaatatgccattgaagctatcaagcttggttctactgcaattggagtaaagacaaaagaaggagttgtgcttgctgtcgagaagcgtatcacgtcgccattgctggaaccgagcagtgtggagaagattatggaaattgatgaccatattggttgtgctatgagcggtttaattgctgacgcgcgcacacttgttgagcatgctagagttgaaactcaaaaccatagattctcgtatggtgagccgatgactgtagagtccacaacacaagcactgtgtgatctggctttacggtttggtgaaggagaggaagaatcaatgtctcggccgtttggagtatctcttctcattgctggccatgatgaaaatggaccaagcttgtactacactgatccttcaggaacattctggcagtgcaatgcaaaggcaattggttcaggttctgaaggagctgatagctctcttcaagagcaattcaacaaagatttgtctctacaagaagctgagactatcgctgtatctatcctaaagcaagttatggaagaaaaggtgactccaaataacgtggatattgccaaggtagcaccagcttatcatctctacactccacaagaagtcgaagcagtcatcgctcgtctttgattgaaaaaactcaatttgggtaatttacctatcagcttgtgtcacaaaacttgttacttttgtctgttagattgaggatcatgtcacattttagtcggttgtgtaagagaatcttttggctcccatgtcattcaataacctttcggatttgtgacttataaaatttcctttcctat

SEQ ID NO: 34799 - protein, 237 aa, Arabidopsis thaliana
  peptide (1)..(237): Ceres Seq. ID no. 13621996
  misc_feature (31)..(218): Pfam Name: Proteasome A-type and B-type Pfam Description: Proteasome A-type and B-type
  misc_feature (1)..(237): Homolog of NCBI NO: 15231824 NR Description: 20S proteasome alpha subunit E2 (PAE2)
  misc_feature (1)..(237): Homolog of NCBI NO: 15220961 NR Description: 20S proteasome alpha subunit E1 (PAE1)
MFLTRTEYDRGVNTFSPEGRLFQVEYAIEAIKLGSTAIGVKTKEGVVLAVEKRITSPLLEPSSVEKIMEIDDHIGCAMSGLIADARTLVEHARVETQNHRFSYGEPMTVESTTQALCDLALRFGEGEEESMSRPFGVSLLIAGHDENGPSLYYTDPSGTFWQCNAKAIGSGSEGADSSLQEQFNKDLSLQEAETIAVSILKQVMEEKVTPNNVDIAKVAPAYHLYTPQEVEAVIARL

SEQ ID NO: 34800 - protein, 170 aa, Arabidopsis thaliana
  peptide (1)..(170): Ceres Seq. ID no. 13621997
  misc_feature (1)..(151): Pfam Name: Proteasome A-type and B-type Pfam Description: Proteasome A-type and B-type
  misc_feature (1)..(170): Homolog of NCBI NO: 15231824 NR Description: 20S proteasome alpha subunit E2 (PAE2)
  misc_feature (1)..(170): Homolog of NCBI NO: 15220961 NR Description: 20S proteasome alpha subunit E1 (PAE1)
MEIDDHIGCAMSGLIADARTLVEHARVETQNHRFSYGEPMTVESTTQALCDLALRFGEGEEESMSRPFGVSLLIAGHDENGPSLYYTDPSGTFWQCNAKAIGSGSEGADSSLQEQFNKDLSLQEAETIAVSILKQVMEEKVTPNNVDIAKVAPAYHLYTPQEVEAVIARL

SEQ ID NO: 34801 - protein, 160 aa, Arabidopsis thaliana
  peptide (1)..(160): Ceres Seq. ID no. 13621998
  misc_feature (1)..(141): Pfam Name: Proteasome A-type and B-type Pfam Description: Proteasome A-type and B-type
  misc_feature (1)..(160): Homolog of NCBI NO: 15231824 NR Description: 20S proteasome alpha subunit E2 (PAE2)
  misc_feature (1)..(160): Homolog of NCBI NO: 15220961 NR Description: 20S proteasome alpha subunit E1 (PAE1)
MSGLIADARTLVEHARVETQNHRFSYGEPMTVESTTQALCDLALRFGEGEEESMSRPFGVSLLIAGHDENGPSLYYTDPSGTFWQCNAKAIGSGSEGADSSLQEQFNKDLSLQEAETIAVSILKQVMEEKVTPNNVDIAKVAPAYHLYTPQEVEAVIARL

SEQ ID NO: 34802 - DNA, 936 bp, Arabidopsis thaliana
  misc_feature (1)..(936): Ceres Seq. ID no. 12335186
  misc_feature: MA Experiment ID: 108433 Result: Up-regulated in Transcription
  misc_feature: MA Experiment 108433 PARAMETER Experiment Name: At_rhl_Mutant2_cDNA_P Parameter: Age (day) Value: 7
  misc_feature: MA Experiment 108433 PARAMETER Experiment Name: At_rhl_Mutant2_cDNA_P Parameter: Organism Value: A. thaliana
  misc_feature: MA Experiment 108433 PARAMETER Experiment Name: At_rhl_Mutant2_cDNA_P Parameter: Plant Line Value: rhl Mutant vs. wt landsburg
  misc_feature: MA Experiment 108433 PARAMETER Experiment Name: At_rhl_Mutant2_cDNA_P Parameter: Tissue Value: Roots
  misc_feature: MA Experiment ID: 108434 Result: Down-regulated in Transcription
  misc_feature: MA Experiment 108434 PARAMETER Experiment Name: At_Root_Tips_cDNA_P Parameter: Tissue Value: Root Tips
  misc_feature: MA Experiment ID: 108435 Result: Up-regulated in Transcription
  misc_feature: MA Experiment 108435 PARAMETER Experiment Name: At_stm_Mutants_cDNA_P Parameter: Plant Line Value: wt Landsburg vs stm
  misc_feature: MA Experiment 108435 PARAMETER Experiment Name: At_stm_Mutants_cDNA_P Parameter: Tissue Value: Shoot Apical Meristem Region
  misc_feature: MA Experiment ID: 108464 Result: Down-regulated in Transcription
  misc_feature: MA Experiment 108464 PARAMETER Experiment Name: At_Germinating_Seeds_cDNA_P Parameter: Age (day) Value: 4 vs. 0
  misc_feature: MA Experiment 108464 PARAMETER Experiment Name: At_Germinating_Seeds_cDNA_P Parameter: Tissue Value: Germinating Seeds
  misc_feature: MA Experiment ID: 108474 Result: Down-regulated in Transcription
  misc_feature: MA Experiment 108474 PARAMETER Experiment Name: At_Drought_Flowers_cDNA_P Parameter: Timepoint (hr) Value: null
  misc_feature: MA Experiment 108474 PARAMETER Experiment Name: At_Drought_Flowers_cDNA_P Parameter: Treatment Value: Drought vs. No Drought
  misc_feature: MA Experiment ID: 108489 Result: Down-regulated in Transcription
  misc_feature: MA Experiment ID: 108501 Result: Down-regulated in Transcription
  misc_feature: MA Experiment 108501 PARAMETER Experiment Name: At_ap2_floral_buds_cDNA_P Parameter: Plant Line Value: ap2 (Ler.)
  misc_feature: MA Experiment 108501 PARAMETER Experiment Name: At_ap2_floral_buds_cDNA_P Parameter: Tissue Value: Closed Flower
  misc_feature: MA Experiment ID: 108594 Result: Down-regulated in Transcription
  misc_feature: MA Experiment 108594 PARAMETER Experiment Name: At_Ler-rhl_Root_cDNA_P Parameter: Plant Line Value: null
  misc_feature: MA Experiment ID: 108668 Result: Up-regulated in Transcription
  misc_feature: MA Experiment 108668 PARAMETER Experiment Name: At_2mM_SA_cDNA_P Parameter: Plant Line Value: WS
  misc_feature: MA Experiment 108668 PARAMETER Experiment Name: At_2mM_SA_cDNA_P Parameter: Timepoint (hr) Value: 6
  misc_feature: MA Experiment 108668 PARAMETER Experiment Name: At_2mM_SA_cDNA_P Parameter: Treatment Value: 2mM SA vs. No Treatment
  misc_feature: MA Experiment ID: 20000069 Result: Up-regulated in Transcription
  misc_feature: MA Experiment 20000069 PARAMETER Experiment Name: At_100uM_ABA_Mutants_cDNA_P Parameter: Plant Line Value: CS23
  misc_feature: MA Experiment 20000069 PARAMETER Experiment Name: At_100uM_ABA_Mutants_cDNA_P Parameter: Timepoint (hr) Value: 6
  misc_feature: MA Experiment 20000069 PARAMETER Experiment Name: At_100uM_ABA_Mutants_cDNA_P Parameter: Tissue Value: Aerial
  misc_feature: MA Experiment 20000069 PARAMETER Experiment Name: At_100uM_ABA_Mutants_cDNA_P Parameter: Treatment Value: 100uM ABA vs. No Treatment
  misc_feature: MA Experiment ID: 20000070 Result: Up-regulated in Transcription
  misc_feature: MA Experiment 20000070 PARAMETER Experiment Name: At_100uM_ABA_Mutants_cDNA_P Parameter: Plant Line Value: CS24
  misc_feature: MA Experiment 20000070 PARAMETER Experiment Name: At_100uM_ABA_Mutants_cDNA_P Parameter: Timepoint (hr) Value: 6
  misc_feature: MA Experiment 20000070 PARAMETER Experiment Name: At_100uM_ABA_Mutants_cDNA_P Parameter: Tissue Value: Aerial
  misc_feature: MA Experiment 20000070 PARAMETER Experiment Name: At_100uM_ABA_Mutants_cDNA_P Parameter: Treatment Value: 100uM ABA vs. No Treatment
  misc_feature: MA Experiment ID: 20000087 Result: Up-regulated in Transcription
  misc_feature: MA Experiment 20000087 PARAMETER Experiment Name: At_100uM_ABA_Mutants_cDNA_P Parameter: Plant Line Value: WS
  misc_feature: MA Experiment 20000087 PARAMETER Experiment Name: At_100uM_ABA_Mutants_cDNA_P Parameter: Timepoint (hr) Value: 6
  misc_feature: MA Experiment 20000087 PARAMETER Experiment Name: At_100uM_ABA_Mutants_cDNA_P Parameter: Tissue Value: Aerial
  misc_feature: MA Experiment 20000087 PARAMETER Experiment Name: At_100uM_ABA_Mutants_cDNA_P Parameter: Treatment Value: 100uM ABA vs. No Treatment
  misc_feature: MA Experiment ID: 20000088 Result: Up-regulated in Transcription
  misc_feature: MA Experiment 20000088 PARAMETER Experiment Name: At_100uM_ABA_Mutants_cDNA_P Parameter: Plant Line Value: Landsberg
  misc_feature: MA Experiment 20000088 PARAMETER Experiment Name: At_100uM_ABA_Mutants_cDNA_P Parameter: Timepoint (hr) Value: 6
  misc_feature: MA Experiment 20000088 PARAMETER Experiment Name: At_100uM_ABA_Mutants_cDNA_P Parameter: Tissue Value: Aerial
  misc_feature: MA Experiment 20000088 PARAMETER Experiment Name: At_100uM_ABA_Mutants_cDNA_P Parameter: Treatment Value: 100uM ABA vs. No Treatment
  misc_feature: MA Experiment ID: 20000089 Result: Up-regulated in Transcription
  misc_feature: MA Experiment ID: 20000090 Result: Up-regulated in Transcription
  misc_feature: MA Experiment ID: 20000306 Result: Down-regulated in Transcription
  misc_feature: MA Experiment 20000306 PARAMETER Experiment Name: At_Germinating_Seeds_Sub_P Parameter: Age (hr) Value: 6 vs. 0
  misc_feature: MA Experiment 20000306 PARAMETER Experiment Name: At_Germinating_Seeds_Sub_P Parameter: Organism Value: A. thaliana
  misc_feature: MA Experiment 20000306 PARAMETER Experiment Name: At_Germinating_Seeds_Sub_P Parameter: Plant Line Value: WS
  misc_feature: MA Experiment 20000306 PARAMETER Experiment Name: At_Germinating_Seeds_Sub_P Parameter: Tissue Value: Germinating Seeds
  misc_feature: MA Experiment ID: 20000307 Result: Down-regulated in Transcription
  misc_feature: MA Experiment 20000307 PARAMETER Experiment Name: At_Germinating_Seeds_Sub_P Parameter: Age (hr) Value: 24 vs. 0
  misc_feature: MA Experiment 20000307 PARAMETER Experiment Name: At_Germinating_Seeds_Sub_P Parameter: Organism Value: A. thaliana
  misc_feature: MA Experiment 20000307 PARAMETER Experiment Name: At_Germinating_Seeds_Sub_P Parameter: Plant Line Value: WS
  misc_feature: MA Experiment 20000307 PARAMETER Experiment Name: At_Germinating_Seeds_Sub_P Parameter: Tissue Value: Germinating Seeds
  misc_feature: MA Experiment ID: 20000314 Result: Down-regulated in Transcription
  misc_feature: MA Experiment 20000314 PARAMETER Experiment Name: At_14day_Shoots-Roots_Sub_P Parameter: Age (day) Value: 14
  misc_feature: MA Experiment 20000314 PARAMETER Experiment Name: At_14day_Shoots-Roots_Sub_P Parameter: Organism Value: A. thaliana
  misc_feature: MA Experiment 20000314 PARAMETER Experiment Name: At_14day_Shoots-Roots_Sub_P Parameter: Plant Line Value: WS
  misc_feature: MA Experiment 20000314 PARAMETER Experiment Name: At_14day_Shoots-Roots_Sub_P Parameter: Tissue Value: Roots vs. Whole Plant
  misc_feature: MA Experiment ID: 20000315 Result: Down-regulated in Transcription
  misc_feature: MA Experiment 20000315 PARAMETER Experiment Name: At_14day_Shoots-Roots_Sub_P Parameter: Age (day) Value: 14
  misc_feature: MA Experiment 20000315 PARAMETER Experiment Name: At_14day_Shoots-Roots_Sub_P Parameter: Organism Value: A. thaliana
  misc_feature: MA Experiment 20000315 PARAMETER Experiment Name: At_14day_Shoots-Roots_Sub_P Parameter: Plant Line Value: WS
  misc_feature: MA Experiment 20000315 PARAMETER Experiment Name: At_14day_Shoots-Roots_Sub_P Parameter: Tissue Value: Shoots vs. Whole Plant
  misc_feature: MA Experiment ID: 20000328 Result: Down-regulated in Transcription
  misc_feature: MA Experiment 20000328 PARAMETER Experiment Name: At_42deg_Heat_Sub_P Parameter: Age (day) Value: 14
  misc_feature: MA Experiment 20000328 PARAMETER Experiment Name: At_42deg_Heat_Sub_P Parameter: Organism Value: A. thaliana
  misc_feature: MA Experiment 20000328 PARAMETER Experiment Name: At_42deg_Heat_Sub_P Parameter: Plant Line Value: WS
  misc_feature: MA Experiment 20000328 PARAMETER Experiment Name: At_42deg_Heat_Sub_P Parameter: Temperature (deg C) Value: 42 vs. 22
  misc_feature: MA Experiment 20000328 PARAMETER Experiment Name: At_42deg_Heat_Sub_P Parameter: Timepoint (hr) Value: 6
  misc_feature: MA Experiment 20000328 PARAMETER Experiment Name: At_42deg_Heat_Sub_P Parameter: Tissue Value: Aerial
  misc_feature: MA Experiment ID: 20000347 Result: Up-regulated in Transcription
  misc_feature: MA Experiment 20000347 PARAMETER Experiment Name: At_2mM_SA_Sub_P Parameter: Age (day) Value: 14
  misc_feature: MA Experiment 20000347 PARAMETER Experiment Name: At_2mM_SA_Sub_P Parameter: Organism Value: A. thaliana
  misc_feature: MA Experiment 20000347 PARAMETER Experiment Name: At_2mM_SA_Sub_P Parameter: Plant Line Value: WS
  misc_feature: MA Experiment 20000347 PARAMETER Experiment Name: At_2mM_SA_Sub_P Parameter: Timepoint (hr) Value: 6
  misc_feature: MA Experiment 20000347 PARAMETER Experiment Name: At_2mM_SA_Sub_P Parameter: Tissue Value: Aerial
  misc_feature: MA Experiment 20000347 PARAMETER Experiment Name: At_2mM_SA_Sub_P Parameter: Treatment Value: 2mM SA vs. No Treatment
  misc_feature: MA Experiment ID: 20000355 Result: Down-regulated in Transcription
  misc_feature: MA Experiment 20000355 PARAMETER Experiment Name: At_Siliques_Sub_P Parameter: Age (day) Value: 21
  misc_feature: MA Experiment 20000355 PARAMETER Experiment Name: At_Siliques_Sub_P Parameter: Organism Value: A. thaliana
  misc_feature: MA Experiment 20000355 PARAMETER Experiment Name: At_Siliques_Sub_P Parameter: Plant Line Value: WS
  misc_feature: MA Experiment 20000355 PARAMETER Experiment Name: At_Siliques_Sub_P Parameter: Tissue Value: Less Than 5mm Siliques vs. Whole Plant
  misc_feature: MA Experiment ID: 20000440 Result: Down-regulated in Transcription
  misc_feature: MA Experiment 20000440 PARAMETER Experiment Name: At_Closed-Flower__Sub_P Parameter: Tissue Value: Closed Flower vs. Whole Plant
  misc_feature: MA Experiment ID: 20001807 Result: Up-regulated in Transcription
  misc_feature: MA Experiment 20001807 PARAMETER Experiment Name: At_50mM_NH4NO3_L-to-H_Sub_P Parameter: Timepoint (hr) Value: 6
  misc_feature: MA Experiment 20001807 PARAMETER Experiment Name: At_50mM_NH4NO3_L-to-H_Sub_P Parameter: Tissue Value: Leaf
  misc_feature: MA Experiment 20001807 PARAMETER Experiment Name: At_50mM_NH4NO3_L-to-H_Sub_P Parameter: Treatment Value: 50mM NH4NO3 vs 100mM Mannitol
atcaaccacaaagatctctctacttcaataaatctccaccttactttaagaacaagaaaaacacagtattaacaaatggcaggaatcaaagttttcggtcacccagcttccacagccactagaagagttctcatcgctcttcacgagaagaatctcgactttgaattcgttcatatcgagctcaaagatggtgaacacaagaaagagcctttcatcttccgcaacccttttggtaaagttccagcctttgaagatggagacttcaagcttttcgaatcaagagcaatcactcaatacatagctcatttttactcagacaaaggaaaccaacttgtctcccttggctccaaggacattgcgggcatagccatgggcattgaaattgaatcgcatgagtttgacccagttggttcaaagcttgtttgggagcaagtcttaaagcctttgtatggtatgaccacagacaaaaccgttgttgaagaagaagaggctaagctagccaaggtcctcgatgtttacgaacacaggcttggtgagtccaagtatttggcttctgataaattcactttggtcgatcttcacactatccctgtgattcagtacttgcttggtacaccaactaagaaactctttgacgagcgtccacatgtcagtgcttgggttgctgacatcacttctaggccttctgctaagaaggttctttaagtgactcacaaactgttaatcagaagattgaataaagtggcgatgacctcattgccctaattctcataaacaataaaagtggcgatgacctaattgccaaattctcatacactctgtgttttttttgtgtgtgtctcctctgtttttttttttggtttgaatgtaatcttcaataataatgagtcttgatatataataaaaatatatttggtagcctaaagtttagctact

SEQ ID NO: 34803 - protein, 209 aa, Arabidopsis thaliana
  peptide (1)..(209): Ceres Seq. ID no. 12335187
  misc_feature (1)..(206): Homolog of NCBI NO: 30678437 NR Description: glutathione transferase, putative [Arabidopsis
  misc_feature (1)..(208): Homolog of NCBI NO: 21555418 NR Description: Atpm24.1 glutathione S transferase [Arabidopsis
  misc_feature (2)..(208): Homolog of NCBI NO: 2554769 NR Description: Chain A, Structure Of Glutathione S-Transferase
  misc_feature (1)..(208): Homolog of NCBI NO: 15235401 NR Description: glutathione transferase, putative
  misc_feature (1)..(209): Homolog of NCBI NO: 15227063 NR Description: glutathione transferase, putative
  misc_feature (1)..(209): Homolog of NCBI NO: 481821 NR Description: probable glutathione transferase (EC 2.5.1.18)
  misc_feature (1)..(209): Homolog of NCBI NO: 15218640 NR Description: glutathione transferase, putative
  misc_feature (1)..(209): Homolog of NCBI NO: 17377644 NR Description: Glutathione S-transferase 11 (GST class-phi)
  misc_feature (1)..(209): Homolog of NCBI NO: 15218639 NR Description: glutathione transferase, putative
MAGIKVFGHPASTATRRVLIALHEKNLDFEFVHIELKDGEHKKEPFIFRNPFGKVPAFEDGDFKLFESRAITQYIAHFYSDKGNQLVSLGSKDIAGIAMGIEIESHEFDPVGSKLVWEQVLKPLYGMTTDKTVVEEEEAKLAKVLDVYEHRLGESKYLASDKFTLVDLHTIPVIQYLLGTPTKKLFDERPHVSAWVADITSRPSAKKVL

SEQ ID NO: 34804 - protein, 111 aa, Arabidopsis thaliana
  peptide (1)..(111): Ceres Seq. ID no. 12335188
  misc_feature (1)..(108): Homolog of NCBI NO: 30678437 NR Description: glutathione transferase, putative [Arabidopsis
  misc_feature (1)..(110): Homolog of NCBI NO: 21555418 NR Description: Atpm24.1 glutathione S transferase [Arabidopsis
  misc_feature (1)..(110): Homolog of NCBI NO: 2554769 NR Description: Chain A, Structure Of Glutathione S-Transferase
  misc_feature (1)..(110): Homolog of NCBI NO: 15235401 NR Description: glutathione transferase, putative
  misc_feature (1)..(111): Homolog of NCBI NO: 15227063 NR Description: glutathione transferase, putative
  misc_feature (1)..(111): Homolog of NCBI NO: 481821 NR Description: probable glutathione transferase (EC 2.5.1.18)
  misc_feature (1)..(111): Homolog of NCBI NO: 15218640 NR Description: glutathione transferase, putative
  misc_feature (1)..(111): Homolog of NCBI NO: 17377644 NR Description: Glutathione S-transferase 11 (GST class-phi)
  misc_feature (1)..(111): Homolog of NCBI NO: 15218639 NR Description: glutathione transferase, putative
MGIEIESHEFDPVGSKLVWEQVLKPLYGMTTDKTVVEEEEAKLAKVLDVYEHRLGESKYLASDKFTLVDLHTIPVIQYLLGTPTKKLFDERPHVSAWVADITSRPSAKKVL

SEQ ID NO: 34805 - DNA, 902 bp, Arabidopsis thaliana
  misc_feature (1)..(902): Ceres Seq. ID no. 12335183
  misc_feature: MA Experiment ID: 108474 Result: Down-regulated in Transcription
  misc_feature: MA Experiment 108474 PARAMETER Experiment Name: At_Drought_Flowers_cDNA_P Parameter: Timepoint (hr) Value: null
  misc_feature: MA Experiment 108474 PARAMETER Experiment Name: At_Drought_Flowers_cDNA_P Parameter: Treatment Value: Drought vs. No Drought
  misc_feature: MA Experiment ID: 20000264 Result: Up-regulated in Transcription
  misc_feature: MA Experiment 20000264 PARAMETER Experiment Name: At_Open_Flower_P Parameter: Age (day) Value: 21
  misc_feature: MA Experiment 20000264 PARAMETER Experiment Name: At_Open_Flower_P Parameter: Plant Line Value: WS
  misc_feature: MA Experiment 20000264 PARAMETER Experiment Name: At_Open_Flower_P Parameter: Tissue Value: Open Flower vs. Whole Plant
  misc_feature: MA Experiment ID: 20000265 Result: Up-regulated in Transcription
  misc_feature: MA Experiment 20000265 PARAMETER Experiment Name: At_Open_Flower_P Parameter: Age (day) Value: 21
  misc_feature: MA Experiment 20000265 PARAMETER Experiment Name: At_Open_Flower_P Parameter: Plant Line Value: WS
  misc_feature: MA Experiment 20000265 PARAMETER Experiment Name: At_Open_Flower_P Parameter: Tissue Value: Closed Flower vs. Whole Plant
  misc_feature: MA Experiment ID: 20000286 Result: Up-regulated in Transcription
  misc_feature: MA Experiment 20000286 PARAMETER Experiment Name: At_Open_Flower_P Parameter: Age (day) Value: 21
  misc_feature: MA Experiment 20000286 PARAMETER Experiment Name: At_Open_Flower_P Parameter: Plant Line Value: WS
  misc_feature: MA Experiment 20000286 PARAMETER Experiment Name: At_Open_Flower_P Parameter: Tissue Value: Half Open vs. Whole Plant
  misc_feature: MA Experiment ID: 20000794 Result: Up-regulated in Transcription
  misc_feature: MA Experiment 20000794 PARAMETER Experiment Name: At_Petals_P Parameter: Age (day) Value: 23-25 days
  misc_feature: MA Experiment 20000794 PARAMETER Experiment Name: At_Petals_P Parameter: Plant Line Value: WS
  misc_feature: MA Experiment 20000794 PARAMETER Experiment Name: At_Petals_P Parameter: Tissue Value: Petals vs. Whole plant
  misc_feature: MA Experiment ID: 20001760 Result: Up-regulated in Transcription
  misc_feature: MA Experiment 20001760 PARAMETER Experiment Name: At_50mM_NH4NO3_L-to-H_P Parameter: Timepoint (hr) Value: 2
  misc_feature: MA Experiment 20001760 PARAMETER Experiment Name: At_50mM_NH4NO3_L-to-H_P Parameter: Tissue Value: Siliques
  misc_feature: MA Experiment 20001760 PARAMETER Experiment Name: At_50mM_NH4NO3_L-to-H_P Parameter: Treatment Value: 50mM NH4NO3 vs 100mM Mannitol
  misc_feature: MA Experiment ID: 20001761 Result: Up-regulated in Transcription
  misc_feature: MA Experiment 20001761 PARAMETER Experiment Name: At_50mM_NH4NO3_L-to-H_P Parameter: Timepoint (hr) Value: 4
  misc_feature: MA Experiment 20001761 PARAMETER Experiment Name: At_50mM_NH4NO3_L-to-H_P Parameter: Tissue Value: Siliques
  misc_feature: MA Experiment 20001761 PARAMETER Experiment Name: At_50mM_NH4NO3_L-to-H_P Parameter: Treatment Value: 50mM NH4NO3 vs 100mM Mannitol
  misc_feature: MA Experiment ID: 20001909 Result: Up-regulated in Transcription
  misc_feature: MA Experiment 20001909 PARAMETER Experiment Name: At_Drought_Reproduction_P Parameter: Age (day) Value: 35
  misc_feature: MA Experiment 20001909 PARAMETER Experiment Name: At_Drought_Reproduction_P Parameter: Organism Value: A. thaliana
  misc_feature: MA Experiment 20001909 PARAMETER Experiment Name: At_Drought_Reproduction_P Parameter: Plant Line Value: WS
  misc_feature: MA Experiment 20001909 PARAMETER Experiment Name: At_Drought_Reproduction_P Parameter: Timepoint (day) Value: 5
  misc_feature: MA Experiment 20001909 PARAMETER Experiment Name: At_Drought_Reproduction_P Parameter: Tissue Value: Flowers
  misc_feature: MA Experiment 20001909 PARAMETER Experiment Name: At_Drought_Reproduction_P Parameter: Treatment Value: Drought vs. No Drought
aattcaaagcagtcaactagcaagagaaagagagaaaagtgaagatgttcctccaggttcatgaaattgcttttctctttggtctcttaggcaacattgtgtcttttggggtgttcttgtcaccagtgccaacgttttatgggatatacaagaagaaatcatcaaaagggtttcagtcgataccgtacatatgtgcactagcaagtgcaactcttcttctctactacggaatcatgaagacacatgcttatctgatcattagtattaacacctttggatgtttcattgaaatctcctacttgtttctctatatcctttatgcaccaagagaggccaagatatccacgttgaagttgatagtgatatgcaacatcggtggacttggtctcttaattcttctagttaatcttttggttccaaaacaacaccgcgtctcgaccgttggatgggtttgtgctgcctacagtctcgcagtctttgcttctcccttaagcgtcatgaggaaggttataaagacaaagagtgtggaatacatgccgtttcttctctccttgtctctcactcttaacgccgtcatgtggttcttttatggacttcttatcaaagacaagttcattgctatgccaaacattctcggttttctattcggtgtagctcagatgatactatacatgatgtatcaaggttccacgaaaacggatttgccaacagagaaccaactagcaaataaaaccgatgttaacgaagtcccgatcgtggccgttgaattgcctgatgtgggatcagacaatgttgaaggatcggtgaggccaatgaagtgaagggcaaacatgcatggggaagatgtatgggagacgacatgttatcgtatgttggaataataaactttaatttctatgttt

SEQ ID NO: 34806 - protein, 258 aa, Arabidopsis thaliana
  peptide (1)..(258): Ceres Seq. ID no. 12335184
  misc_feature (10)..(97): Pfam Name: MtN3/saliva family Pfam Description: MtN3/saliva family
  misc_feature (1)..(258): Homolog of NCBI NO: 15234863 NR Description: MtN3 - like protein; protein id: At4g25010.1
  misc_feature (6)..(258): Homolog of NCBI NO: 21593422 NR Description: senescence-associated protein (SAG29)
  misc_feature (6)..(258): Homolog of NCBI NO: 15240040 NR Description: senescence-associated protein (SAG29)
  misc_feature (1)..(225): Homolog of NCBI NO: 1619602 NR Description: MtN3 [Medicago truncatula]
  misc_feature (9)..(247): Homolog of NCBI NO: 15237803 NR Description: MtN3-like protein
  misc_feature (9)..(247): Homolog of NCBI NO: 15229019 NR Description: MTN3-like protein
  misc_feature (9)..(225): Homolog of NCBI NO: 14715258 NR Description: N3 like protein [Medicago truncatula]
  misc_feature (3)..(249): Homolog of NCBI NO: 11345413 NR Description: NEC1 [Petunia x hybrida]
  misc_feature (1)..(258): Homolog of NCBI NO: 15225014 NR Description: similar to MtN3 protein
  misc_feature (1)..(258): Homolog of NCBI NO: 21554178 NR Description: similar to MtN3 protein [Arabidopsis thaliana]
MFLQVHEIAFLFGLLGNIVSFGVFLSPVPTFYGIYKKKSSKGFQSIPYICALASATLLLYYGIMKTHAYLIISINTFGCFIEISYLFLYILYAPREAKISTLKLIVICNIGGLGLLILLVNLLVPKQHRVSTVGWVCAAYSLAVFASPLSVMRKVIKTKSVEYMPFLLSLSLTLNAVMWFFYGLLIKDKFIAMPNILGFLFGVAQMILYMMYQGSTKTDLPTENQLANKTDVNEVPIVAVELPDVGSDNVEGSVRPMK

SEQ ID NO: 34807 - protein, 195 aa, Arabidopsis thaliana
  peptide (1)..(195): Ceres Seq. ID no. 12335185
  misc_feature (1)..(195): Homolog of NCBI NO: 15234863 NR Description: MtN3 - like protein; protein id: At4g25010.1
  misc_feature (1)..(195): Homolog of NCBI NO: 21593422 NR Description: senescence-associated protein (SAG29)
  misc_feature (1)..(195): Homolog of NCBI NO: 15240040 NR Description: senescence-associated protein (SAG29)
  misc_feature (1)..(162): Homolog of NCBI NO: 1619602 NR Description: MtN3 [Medicago truncatula]
  misc_feature (1)..(184): Homolog of NCBI NO: 15237803 NR Description: MtN3-like protein
  misc_feature (1)..(184): Homolog of NCBI NO: 15229019 NR Description: MTN3-like protein
  misc_feature (1)..(162): Homolog of NCBI NO: 14715258 NR Description: N3 like protein [Medicago truncatula]
  misc_feature (1)..(186): Homolog of NCBI NO: 11345413 NR Description: NEC1 [Petunia x hybrida]
  misc_feature (1)..(195): Homolog of NCBI NO: 15225014 NR Description: similar to MtN3 protein
  misc_feature (1)..(195): Homolog of NCBI NO: 21554178 NR Description: similar to MtN3 protein [Arabidopsis thaliana]
MKTHAYLIISINTFGCFIEISYLFLYILYAPREAKISTLKLIVICNIGGLGLLILLVNLLVPKQHRVSTVGWVCAAYSLAVFASPLSVMRKVIKTKSVEYMPFLLSLSLTLNAVMWFFYGLLIKDKFIAMPNILGFLFGVAQMILYMMYQGSTKTDLPTENQLANKTDVNEVPIVAVELPDVGSDNVEGSVRPMK

SEQ ID NO: 34808 - DNA, 1156 bp, Arabidopsis thaliana
  misc_feature (1)..(1156): Ceres Seq. ID no. 13494146
  misc_feature: MA Experiment ID: 108462 Result: Down-regulated in Transcription
  misc_feature: MA Experiment 108462 PARAMETER Experiment Name: At_Germinating_Seeds_cDNA_P Parameter: Age (day) Value: 2 vs. 0
  misc_feature: MA Experiment 108462 PARAMETER Experiment Name: At_Germinating_Seeds_cDNA_P Parameter: Tissue Value: Germinating Seeds
  misc_feature: MA Experiment ID: 108463 Result: Down-regulated in Transcription
  misc_feature: MA Experiment 108463 PARAMETER Experiment Name: At_Germinating_Seeds_cDNA_P Parameter: Age (day) Value: 3 vs. 0
  misc_feature: MA Experiment 108463 PARAMETER Experiment Name: At_Germinating_Seeds_cDNA_P Parameter: Tissue Value: Germinating Seeds
  misc_feature: MA Experiment ID: 108464 Result: Down-regulated in Transcription
  misc_feature: MA Experiment 108464 PARAMETER Experiment Name: At_Germinating_Seeds_cDNA_P Parameter: Age (day) Value: 4 vs. 0
  misc_feature: MA Experiment 108464 PARAMETER Experiment Name: At_Germinating_Seeds_cDNA_P Parameter: Tissue Value: Germinating Seeds
  misc_feature: MA Experiment ID: 108579 Result: Up-regulated in Transcription
  misc_feature: MA Experiment 108579 PARAMETER Experiment Name: At_4deg_Cold_cDNA_P Parameter: Temperature (deg C) Value: 4 vs. 22
  misc_feature: MA Experiment 108579 PARAMETER Experiment Name: At_4deg_Cold_cDNA_P Parameter: Timepoint (hr) Value: 6
  misc_feature: MA Experiment 108579 PARAMETER Experiment Name: At_4deg_Cold_cDNA_P Parameter: Tissue Value: Aerial
aaaaaaggaaacacacaaaagccctaaatctctttttaacctctgaagcaaaaaccaccacatcggagatttctaatccaacgaaaacgcttcaattttcttgcgatttctcttcctctgcgaaaaacccttttggattcagactttcctcggtttaccagttggactcagatagaagcttatatctgtacctgataatttgcagcaaatatggatgactgggaggacgagaaaattgcaccacttccagcaaaagttgagcttaaaagtaactgggatgatgaagatgtggatgagaatgaaattaaggattcatgggaggatgatgatgatgaacctgctcagccgcctgttataaatcctgctccggagaaggctcctaagaaagcagcccccaaaactgttgaaaagaagggtaaagcagtcgaagttccaaaggaagcaccaaaagaaaaacctctagatcctatagcggagaaacttcgccagcagaggcttgttgaggaagccgactaccgggcaactgctgagctctttggagtgaaggatgatgacaaaaaccttgatatgtttatccccaagtctgaaagcgattttttggaatatgctgaaatgatttctcataggattaaaccatatgagaaaagttatcactatatagcgctgctcaaaacaatcatgagactttcattgaccaacatgaaagcagctgatgttaaagatgttgcttcgtccattacaacgatagcaaatgaaaaactaaaggcagagaaagaagctgctgcgggaaaaaagaaaggtggaaagaagaaacaacttattgtagataaggccaatgacgatctagtggctggtccttatgatgccatggatgacttcgacttcatgtagattaaaagagctttttgagcaaatgcaaattggatttgtccagcgtctattttatcatttatctatcactcaaaagaaacacatttttcttaattttggtttgaatagagcaagaagagccaaatttctggttgcggaaatatatagttggaacatgggaagcttttgttttggtttggtctgggaattctctagagtcatgtttttggttctatttgttggttgaaaaagctatacttaaagtgtccgtataaatttattattg

SEQ ID NO: 34809 - protein, 226 aa, Arabidopsis thaliana
  peptide (1)..(226): Ceres Seq. ID no. 13494147
  misc_feature (1)..(226): Homolog of NCBI NO: 32766433 NR Description: Unknown (protein for MGC:63801) [Danio rerio]
  misc_feature (22)..(226): Homolog of NCBI NO: 4503511 NR Description: eukaryotic translation initiation factor 3,
  misc_feature (22)..(226): Homolog of NCBI NO: 26349519 NR Description: unnamed protein product [Mus musculus]
  misc_feature (22)..(226): Homolog of NCBI NO: 34856798 NR Description: similar to Eukaryotic translation initiation
  misc_feature (22)..(226): Homolog of NCBI NO: 23503065 NR Description: Eukaryotic translation initiation factor 3
  misc_feature (2)..(226): Homolog of NCBI NO: 19921950 NR Description: CG12131-PA [Drosophila melanogaster]
  misc_feature (22)..(226): Homolog of NCBI NO: 10435304 NR Description: unnamed protein product [Homo sapiens]
  misc_feature (2)..(226): Homolog of NCBI NO: 27374242 NR Description: CG12131-PA [Drosophila erecta]
  misc_feature (1)..(226): Homolog of NCBI NO: 30693092 NR Description: expressed protein [Arabidopsis thaliana]
  misc_feature (1)..(226): Homolog of NCBI NO: 18408426 NR Description: expressed protein [Arabidopsis thaliana]
MDDWEDEKIAPLPAKVELKSNWDDEDVDENEIKDSWEDDDDEPAQPPVINPAPEKAPKKAAPKTVEKKGKAVEVPKEAPKEKPLDPIAEKLRQQRLVEEADYRATAELFGVKDDDKNLDMFIPKSESDFLEYAEMISHRIKPYEKSYHYIALLKTIMRLSLTNMKAADVKDVASSITTIANEKLKAEKEAAAGKKKGGKKKQLIVDKANDDLVAGPYDAMDDFDFM

SEQ ID NO: 34810 - DNA, 1239 bp, Arabidopsis thaliana
  misc_feature (1)..(1239): Ceres Seq. ID no. 13501400
  misc_feature: MA Experiment ID: 108577 Result: Down-regulated in Transcription
  misc_feature: MA Experiment 108577 PARAMETER Experiment Name: At_42deg_Heat_cDNA_P Parameter: Temperature (deg C) Value: 42 vs. 22
  misc_feature: MA Experiment 108577 PARAMETER Experiment Name: At_42deg_Heat_cDNA_P Parameter: Timepoint (hr) Value: 6
  misc_feature: MA Experiment 108577 PARAMETER Experiment Name: At_42deg_Heat_cDNA_P Parameter: Tissue Value: Aerial
  misc_feature: MA Experiment ID: 108579 Result: Down-regulated in Transcription
  misc_feature: MA Experiment 108579 PARAMETER Experiment Name: At_4deg_Cold_cDNA_P Parameter: Temperature (deg C) Value: 4 vs. 22
  misc_feature: MA Experiment 108579 PARAMETER Experiment Name: At_4deg_Cold_cDNA_P Parameter: Timepoint (hr) Value: 6
  misc_feature: MA Experiment 108579 PARAMETER Experiment Name: At_4deg_Cold_cDNA_P Parameter: Tissue Value: Aerial
  misc_feature: MA Experiment ID: 20000173 Result: Down-regulated in Transcription
  misc_feature: MA Experiment 20000173 PARAMETER Experiment Name: At_42deg_Heat_P Parameter: Age (day) Value: 14
  misc_feature: MA Experiment 20000173 PARAMETER Experiment Name: At_42deg_Heat_P Parameter: Organism Value: A. thaliana
  misc_feature: MA Experiment 20000173 PARAMETER Experiment Name: At_42deg_Heat_P Parameter: Plant Line Value: WS
  misc_feature: MA Experiment 20000173 PARAMETER Experiment Name: At_42deg_Heat_P Parameter: Temperature (deg C) Value: 42 vs. 22
  misc_feature: MA Experiment 20000173 PARAMETER Experiment Name: At_42deg_Heat_P Parameter: Timepoint (hr) Value: 6
  misc_feature: MA Experiment 20000173 PARAMETER Experiment Name: At_42deg_Heat_P Parameter: Tissue Value: Aerial
  misc_feature: MA Experiment ID: 20000184 Result: Down-regulated in Transcription
  misc_feature: MA Experiment 20000184 PARAMETER Experiment Name: At_Shoots__P Parameter: Age (day) Value: 7
  misc_feature: MA Experiment 20000184 PARAMETER Experiment Name: At_Shoots__P Parameter: Tissue Value: Shoots vs. Whole Plant
  misc_feature: MA Experiment ID: 20000185 Result: Down-regulated in Transcription
  misc_feature: MA Experiment 20000185 PARAMETER Experiment Name: At_Roots__P Parameter: Age (day) Value: 7 vs. 21
  misc_feature: MA Experiment 20000185 PARAMETER Experiment Name: At_Roots__P Parameter: Organism Value: A. thaliana
  misc_feature: MA Experiment 20000185 PARAMETER Experiment Name: At_Roots__P Parameter: Tissue Value: Roots vs. Whole Plant
  misc_feature: MA Experiment ID: 20000227 Result: Down-regulated in Transcription
  misc_feature: MA Experiment 20000227 PARAMETER Experiment Name: At_Root-Tips-vs-Tops_P Parameter: Tissue Value: Root Tips vs. Root Tops
  misc_feature: MA Experiment ID: 20000234 Result: Down-regulated in Transcription
  misc_feature: MA Experiment 20000234 PARAMETER Experiment Name: At_Siliques_P Parameter: Age (day) Value: 21
  misc_feature: MA Experiment 20000234 PARAMETER Experiment Name: At_Siliques_P Parameter: Organism Value: A. thaliana
  misc_feature: MA Experiment 20000234 PARAMETER Experiment Name: At_Siliques_P Parameter: Plant Line Value: WS
  misc_feature: MA Experiment 20000234 PARAMETER Experiment Name: At_Siliques_P Parameter: Tissue Value: Less Than 5mm Siliques vs. Whole Plant
  misc_feature: MA Experiment ID: 20000265 Result: Down-regulated in Transcription
  misc_feature: MA Experiment 20000265 PARAMETER Experiment Name: At_Open_Flower_P Parameter: Age (day) Value: 21
  misc_feature: MA Experiment 20000265 PARAMETER Experiment Name: At_Open_Flower_P Parameter: Plant Line Value: WS
  misc_feature: MA Experiment 20000265 PARAMETER Experiment Name: At_Open_Flower_P Parameter: Tissue Value: Closed Flower vs. Whole Plant
  misc_feature: MA Experiment ID: 20000286 Result: Down-regulated in Transcription
  misc_feature: MA Experiment 20000286 PARAMETER Experiment Name: At_Open_Flower_P Parameter: Age (day) Value: 21
  misc_feature: MA Experiment 20000286 PARAMETER Experiment Name: At_Open_Flower_P Parameter: Plant Line Value: WS
  misc_feature: MA Experiment 20000286 PARAMETER Experiment Name: At_Open_Flower_P Parameter: Tissue Value: Half Open vs. Whole Plant
  misc_feature: MA Experiment ID: 20000439 Result: Down-regulated in Transcription
  misc_feature: MA Experiment 20000439 PARAMETER Experiment Name: At_Roots__P Parameter: Age (day) Value: 14 vs. 21
  misc_feature: MA Experiment 20000439 PARAMETER Experiment Name: At_Roots__P Parameter: Organism Value: A. thaliana
  misc_feature: MA Experiment 20000439 PARAMETER Experiment Name: At_Roots__P Parameter: Tissue Value: Roots vs. Whole Plant
  misc_feature: MA Experiment ID: 20000451 Result: Down-regulated in Transcription
  misc_feature: MA Experiment 20000451 PARAMETER Experiment Name: At_CS6879_Shoots-Roots_P Parameter: Age (day) Value: 14
  misc_feature: MA Experiment 20000451 PARAMETER Experiment Name: At_CS6879_Shoots-Roots_P Parameter: Organism Value: A. thaliana
  misc_feature: MA Experiment 20000451 PARAMETER Experiment Name: At_CS6879_Shoots-Roots_P Parameter: Plant Line Value: CS6879 vs. WS
  misc_feature: MA Experiment 20000451 PARAMETER Experiment Name: At_CS6879_Shoots-Roots_P Parameter: Tissue Value: Roots
  misc_feature: MA Experiment ID: 20000496 Result: Down-regulated in Transcription
  misc_feature: MA Experiment 20000496 PARAMETER Experiment Name: At_Guard_Cells_P Parameter: Harvest Date Value: 7/19/2002
  misc_feature: MA Experiment 20000496 PARAMETER Experiment Name: At_Guard_Cells_P Parameter: Organism Value: Canola
  misc_feature: MA Experiment 20000496 PARAMETER Experiment Name: At_Guard_Cells_P Parameter: Tissue Value: Guard Cells vs. Leaves
  misc_feature: MA Experiment ID: 20001557 Result: Down-regulated in Transcription
  misc_feature: MA Experiment 20001557 PARAMETER Experiment Name: At_Drought_Soil_Dry_P Parameter: Age (day) Value: 27
  misc_feature: MA Experiment 20001557 PARAMETER Experiment Name: At_Drought_Soil_Dry_P Parameter: Organism Value: A. thaliana
  misc_feature: MA Experiment 20001557 PARAMETER Experiment Name: At_Drought_Soil_Dry_P Parameter: Plant Line Value: WS
  misc_feature: MA Experiment 20001557 PARAMETER Experiment Name: At_Drought_Soil_Dry_P Parameter: Post Timepoint (hr) Value: 3
  misc_feature: MA Experiment 20001557 PARAMETER Experiment Name: At_Drought_Soil_Dry_P Parameter: Post-Treatment Value: Re-Water vs. No Drought
  misc_feature: MA Experiment 20001557 PARAMETER Experiment Name: At_Drought_Soil_Dry_P Parameter: Timepoint (day) Value: 13
  misc_feature: MA Experiment 20001557 PARAMETER Experiment Name: At_Drought_Soil_Dry_P Parameter: Treatment Value: Drought vs. No Drought
  misc_feature: MA Experiment ID: 20001558 Result: Down-regulated in Transcription
  misc_feature: MA Experiment 20001558 PARAMETER Experiment Name: At_Drought_Soil_Dry_P Parameter: Age (day) Value: 27
  misc_feature: MA Experiment 20001558 PARAMETER Experiment Name: At_Drought_Soil_Dry_P Parameter: Organism Value: A. thaliana
  misc_feature: MA Experiment 20001558 PARAMETER Experiment Name: At_Drought_Soil_Dry_P Parameter: Plant Line Value: WS
  misc_feature: MA Experiment 20001558 PARAMETER Experiment Name: At_Drought_Soil_Dry_P Parameter: Post Timepoint (hr) Value: 6
  misc_feature: MA Experiment 20001558 PARAMETER Experiment Name: At_Drought_Soil_Dry_P Parameter: Post-Treatment Value: Re-Water vs. No Drought
  misc_feature: MA Experiment 20001558 PARAMETER Experiment Name: At_Drought_Soil_Dry_P Parameter: Timepoint (day) Value: 13
  misc_feature: MA Experiment 20001558 PARAMETER Experiment Name: At_Drought_Soil_Dry_P Parameter: Treatment Value: Drought vs. No Drought
  misc_feature: MA Experiment ID: 20001560 Result: Down-regulated in Transcription
  misc_feature: MA Experiment 20001560 PARAMETER Experiment Name: At_Drought_Soil_Dry_P Parameter: Age (day) Value: 28
  misc_feature: MA Experiment 20001560 PARAMETER Experiment Name: At_Drought_Soil_Dry_P Parameter: Organism Value: A. thaliana
  misc_feature: MA Experiment 20001560 PARAMETER Experiment Name: At_Drought_Soil_Dry_P Parameter: Plant Line Value: WS
  misc_feature: MA Experiment 20001560 PARAMETER Experiment Name: At_Drought_Soil_Dry_P Parameter: Post Timepoint (hr) Value: None
  misc_feature: MA Experiment 20001560 PARAMETER Experiment Name: At_Drought_Soil_Dry_P Parameter: Post-Treatment Value: None
  misc_feature: MA Experiment 20001560 PARAMETER Experiment Name: At_Drought_Soil_Dry_P Parameter: Timepoint (day) Value: 14
  misc_feature: MA Experiment 20001560 PARAMETER Experiment Name: At_Drought_Soil_Dry_P Parameter: Treatment Value: Drought vs. No Drought
  misc_feature: MA Experiment ID: 20001905 Result: Down-regulated in Transcription
  misc_feature: MA Experiment 20001905 PARAMETER Experiment Name: At_Drought_Reproduction_P Parameter: Age (day) Value: 40
  misc_feature: MA Experiment 20001905 PARAMETER Experiment Name: At_Drought_Reproduction_P Parameter: Organism Value: A. thaliana
  misc_feature: MA Experiment 20001905 PARAMETER Experiment Name: At_Drought_Reproduction_P Parameter: Plant Line Value: WS
  misc_feature: MA Experiment 20001905 PARAMETER Experiment Name: At_Drought_Reproduction_P Parameter: Timepoint (day) Value: 10
  misc_feature: MA Experiment 20001905 PARAMETER Experiment Name: At_Drought_Reproduction_P Parameter: Tissue Value: Rosettes
  misc_feature: MA Experiment 20001905 PARAMETER Experiment Name: At_Drought_Reproduction_P Parameter: Treatment Value: Drought vs. No Drought
  misc_feature: MA Experiment ID: 20001906 Result: Down-regulated in Transcription
  misc_feature: MA Experiment 20001906 PARAMETER Experiment Name: At_Drought_Reproduction_P Parameter: Age (day) Value: 35
  misc_feature: MA Experiment 20001906 PARAMETER Experiment Name: At_Drought_Reproduction_P Parameter: Organism Value: A. thaliana
  misc_feature: MA Experiment 20001906 PARAMETER Experiment Name: At_Drought_Reproduction_P Parameter: Plant Line Value: WS
  misc_feature: MA Experiment 20001906 PARAMETER Experiment Name: At_Drought_Reproduction_P Parameter: Timepoint (day) Value: 5
  misc_feature: MA Experiment 20001906 PARAMETER Experiment Name: At_Drought_Reproduction_P Parameter: Tissue Value: Siliques
  misc_feature: MA Experiment 20001906 PARAMETER Experiment Name: At_Drought_Reproduction_P Parameter: Treatment Value: Drought vs. No Drought
ctcagacaatgtggatctcagatgtttgctgtatttttggttggctcgctgtagcgtttgcacatgatattatactgcttaatattggacgactcttcttggggtttggggttggtctcattagttatgtggttcctgtgtatatagcagaaattacacctaaaacatttcgtggaggattttcttattccaatcagcttctacaatgtcttgggatttcactcatgttcttcaccggaaactttttccattggcgaacattagctcttttaagtgcaatcccaagtgctttccaagtgatatgtttattttttattcctgaatctcctagatggctggcgatgtatggtcaagatcaagagcttgaagtttcgttgaaaaatttaaggggagaaaatagtgatattctaaaggaagctgctgaaatcagagaaacagtggaaatatccagaaaagagtctcaaagtggaataagagacttgttccatataggaaacgcacattccttaatcattggattgggattaatgctcttgcaacaattttgtgggagcgcggcgataagtgcttatgctgctcgtatattcgacaaagcaggttttccaagcgacataggaacaaccatcctcgcagtgattctgataccgcaatctatagttgtcatgttaaccgttgaccgatggggacgccgaccacttcttatgatttcttctatcggaatgtgcatatgctcattttttattggcctttcatactaccttcagaagaatggtgaatttcagaagttatgttccgttatgttaatcgtcggtttagtgggttatgtctcatcctttggcattgggctaggtggactaccatgggttataatgtctgaggtatttccggtgaatgtgaaaatcaccgccggtagccttgtaacgatgtcaaattggttttttaattggattatcatctatagttttaatttcatgatacagtggagcgcttccgtaacatatttcatattttctggagtttctctggtgacgatcgtattcatatggacattggtgcctgagacgaaaggccgaacactcgaagagattcaaacatcattagtccgactttcgtaaaatctatgtatggattatacatataagtctcttgaatagtctttttaaccgtacattaatattttgttaaataagagttttctctcactttgattaaaaattaataatggctatgattttatct

SEQ ID NO: 34811 - protein, 370 aa, Arabidopsis thaliana
  peptide (1)..(370): Ceres Seq. ID no. 13501401
  misc_feature (2)..(143): Pfam Name: Sugar (and other) transporter Pfam Description: Sugar (and other) transporter
  misc_feature (2)..(366): Homolog of NCBI NO: 6686827 NR Description: putative sugar transporter [Arabidopsis thaliana]
  misc_feature (2)..(366): Homolog of NCBI NO: 30680865 NR Description: sugar transporter, putative [Arabidopsis thaliana]
  misc_feature (2)..(369): Homolog of NCBI NO: 22330860 NR Description: sugar transporter, putative [Arabidopsis
  misc_feature (2)..(366): Homolog of NCBI NO: 18390957 NR Description: sugar transporter, putative [Arabidopsis
  misc_feature (1)..(206): Homolog of NCBI NO: 6686829 NR Description: putative sugar transporter [Arabidopsis thaliana]
  misc_feature (1)..(368): Homolog of NCBI NO: 18421108 NR Description: sugar-porter family protein 2 [Arabidopsis
  misc_feature (2)..(367): Homolog of NCBI NO: 18421106 NR Description: sugar-porter family protein 1 [Arabidopsis
  misc_feature (2)..(367): Homolog of NCBI NO: 14585699 NR Description: sugar-porter family protein 1 [Arabidopsis
  misc_feature (271)..(370): Homolog of NCBI NO: 25407061 NR Description: hypothetical protein [imported] - Arabidopsis
  misc_feature (2)..(143): Homolog of NCBI NO: 25407061 NR Description: hypothetical protein [imported] - Arabidopsis
QTMWISDVCCIFGWLAVAFAHDIILLNIGRLFLGFGVGLISYVVPVYIAEITPKTFRGGFSYSNQLLQCLGISLMFFTGNFFHWRTLALLSAIPSAFQVICLFFIPESPRWLAMYGQDQELEVSLKNLRGENSDILKEAAEIRETVEISRKESQSGIRDLFHIGNAHSLIIGLGLMLLQQFCGSAAISAYAARIFDKAGFPSDIGTTILAVILIPQSIVVMLTVDRWGRRPLLMISSIGMCICSFFIGLSYYLQKNGEFQKLCSVMLIVGLVGYVSSFGIGLGGLPWVIMSEVFPVNVKITAGSLVTMSNWFFNWIIIYSFNFMIQWSASVTYFIFSGVSLVTIVFIWTLVPETKGRTLEEIQTSLVRLS

SEQ ID NO: 34812 - protein, 368 aa, Arabidopsis thaliana
  peptide (1)..(368): Ceres Seq. ID no. 13501402
  misc_feature (1)..(141): Pfam Name: Sugar (and other) transporter Pfam Description: Sugar (and other) transporter
  misc_feature (1)..(364): Homolog of NCBI NO: 6686827 NR Description: putative sugar transporter [Arabidopsis thaliana]
  misc_feature (1)..(364): Homolog of NCBI NO: 30680865 NR Description: sugar transporter, putative [Arabidopsis thaliana]
  misc_feature (1)..(367): Homolog of NCBI NO: 22330860 NR Description: sugar transporter, putative [Arabidopsis
  misc_feature (1)..(364): Homolog of NCBI NO: 18390957 NR Description: sugar transporter, putative [Arabidopsis
  misc_feature (1)..(204): Homolog of NCBI NO: 6686829 NR Description: putative sugar transporter [Arabidopsis thaliana]
  misc_feature (1)..(366): Homolog of NCBI NO: 18421108 NR Description: sugar-porter family protein 2 [Arabidopsis
  misc_feature (1)..(365): Homolog of NCBI NO: 18421106 NR Description: sugar-porter family protein 1 [Arabidopsis
  misc_feature (1)..(365): Homolog of NCBI NO: 14585699 NR Description: sugar-porter family protein 1 [Arabidopsis
  misc_feature (269)..(368): Homolog of NCBI NO: 25407061 NR Description: hypothetical protein [imported] - Arabidopsis
  misc_feature (1)..(141): Homolog of NCBI NO: 25407061 NR Description: hypothetical protein [imported] - Arabidopsis
MWISDVCCIFGWLAVAFAHDIILLNIGRLFLGFGVGLISYVVPVYIAEITPKTFRGGFSYSNQLLQCLGISLMFFTGNFFHWRTLALLSAIPSAFQVICLFFIPESPRWLAMYGQDQELEVSLKNLRGENSDILKEAAEIRETVEISRKESQSGIRDLFHIGNAHSLIIGLGLMLLQQFCGSAAISAYAARIFDKAGFPSDIGTTILAVILIPQSIVVMLTVDRWGRRPLLMISSIGMCICSFFIGLSYYLQKNGEFQKLCSVMLIVGLVGYVSSFGIGLGGLPWVIMSEVFPVNVKITAGSLVTMSNWFFNWIIIYSFNFMIQWSASVTYFIFSGVSLVTIVFIWTLVPETKGRTLEEIQTSLVRLS

SEQ ID NO: 34813 - protein, 296 aa, Arabidopsis thaliana
  peptide (1)..(296): Ceres Seq. ID no. 13501403
  misc_feature (1)..(69): Pfam Name: Sugar (and other) transporter Pfam Description: Sugar (and other) transporter
  misc_feature (1)..(292): Homolog of NCBI NO: 6686827 NR Description: putative sugar transporter [Arabidopsis thaliana]
  misc_feature (1)..(292): Homolog of NCBI NO: 30680865 NR Description: sugar transporter, putative [Arabidopsis thaliana]
  misc_feature (1)..(295): Homolog of NCBI NO: 22330860 NR Description: sugar transporter, putative [Arabidopsis
  misc_feature (1)..(292): Homolog of NCBI NO: 18390957 NR Description: sugar transporter, putative [Arabidopsis
  misc_feature (1)..(132): Homolog of NCBI NO: 6686829 NR Description: putative sugar transporter [Arabidopsis thaliana]
  misc_feature (1)..(294): Homolog of NCBI NO: 18421108 NR Description: sugar-porter family protein 2 [Arabidopsis
  misc_feature (1)..(293): Homolog of NCBI NO: 18421106 NR Description: sugar-porter family protein 1 [Arabidopsis
  misc_feature (1)..(293): Homolog of NCBI NO: 14585699 NR Description: sugar-porter family protein 1 [Arabidopsis
  misc_feature (197)..(296): Homolog of NCBI NO: 25407061 NR Description: hypothetical protein [imported] - Arabidopsis
  misc_feature (1)..(69): Homolog of NCBI NO: 25407061 NR Description: hypothetical protein [imported] - Arabidopsis
MFFTGNFFHWRTLALLSAIPSAFQVICLFFIPESPRWLAMYGQDQELEVSLKNLRGENSDILKEAAEIRETVEISRKESQSGIRDLFHIGNAHSLIIGLGLMLLQQFCGSAAISAYAARIFDKAGFPSDIGTTILAVILIPQSIVVMLTVDRWGRRPLLMISSIGMCICSFFIGLSYYLQKNGEFQKLCSVMLIVGLVGYVSSFGIGLGGLPWVIMSEVFPVNVKITAGSLVTMSNWFFNWIIIYSFNFMIQWSASVTYFIFSGVSLVTIVFIWTLVPETKGRTLEEIQTSLVRLS

SEQ ID NO: 34814 - DNA, 1196 bp, Arabidopsis thaliana
  misc_feature (1)..(1196): Ceres Seq. ID no. 12371569
  misc_feature: MA Experiment ID: 108461 Result: Down-regulated in Transcription
  misc_feature: MA Experiment 108461 PARAMETER Experiment Name: At_Germinating_Seeds_cDNA_P Parameter: Age (day) Value: 1 vs. 0
  misc_feature: MA Experiment 108461 PARAMETER Experiment Name: At_Germinating_Seeds_cDNA_P Parameter: Tissue Value: Germinating Seeds
  misc_feature: MA Experiment ID: 108462 Result: Down-regulated in Transcription
  misc_feature: MA Experiment 108462 PARAMETER Experiment Name: At_Germinating_Seeds_cDNA_P Parameter: Age (day) Value: 2 vs. 0
  misc_feature: MA Experiment 108462 PARAMETER Experiment Name: At_Germinating_Seeds_cDNA_P Parameter: Tissue Value: Germinating Seeds
  misc_feature: MA Experiment ID: 108463 Result: Down-regulated in Transcription
  misc_feature: MA Experiment 108463 PARAMETER Experiment Name: At_Germinating_Seeds_cDNA_P Parameter: Age (day) Value: 3 vs. 0
  misc_feature: MA Experiment 108463 PARAMETER Experiment Name: At_Germinating_Seeds_cDNA_P Parameter: Tissue Value: Germinating Seeds
  misc_feature: MA Experiment ID: 108464 Result: Down-regulated in Transcription
  misc_feature: MA Experiment 108464 PARAMETER Experiment Name: At_Germinating_Seeds_cDNA_P Parameter: Age (day) Value: 4 vs. 0
  misc_feature: MA Experiment 108464 PARAMETER Experiment Name: At_Germinating_Seeds_cDNA_P Parameter: Tissue Value: Germinating Seeds
  misc_feature: MA Experiment ID: 20000184 Result: Down-regulated in Transcription
  misc_feature: MA Experiment 20000184 PARAMETER Experiment Name: At_Shoots__P Parameter: Age (day) Value: 7
  misc_feature: MA Experiment 20000184 PARAMETER Experiment Name: At_Shoots__P Parameter: Tissue Value: Shoots vs. Whole Plant
  misc_feature: MA Experiment ID: 20001451 Result: Down-regulated in Transcription
  misc_feature: MA Experiment 20001451 PARAMETER Experiment Name: At_Far-red-induction_P Parameter: Age (day) Value: 7
  misc_feature: MA Experiment 20001451 PARAMETER Experiment Name: At_Far-red-induction_P Parameter: Light Value: Far-red vs. White
  misc_feature: MA Experiment 20001451 PARAMETER Experiment Name: At_Far-red-induction_P Parameter: Organism Value: A. thaliana
  misc_feature: MA Experiment 20001451 PARAMETER Experiment Name: At_Far-red-induction_P Parameter: Plant Line Value: Columbia
  misc_feature: MA Experiment 20001451 PARAMETER Experiment Name: At_Far-red-induction_P Parameter: Timepoint (hr) Value: 24
  misc_feature: MA Experiment 20001451 PARAMETER Experiment Name: At_Far-red-induction_P Parameter: Tissue Value: Whole Plant
ttttttcttcgctcctctcttagcatcgccgtgaatcgttggtctcagtttctccgtccatctttgattcgtcgatccgttagttgctatctagctgcaatgggtacagagacggttgtgcatgatcaggcaagatgggcaatggctgcaatggaacgaaggcttgctgttgcaaaagctcagcttcttcaacaacaacaacagaagaatgagaaagataagaaggggacttctgatgtagatgtctctatgaaagaatctcatcaagctgattcactgcctactccctcaaagacatcaattaaaaaagtagatcccaaggatgatgattctgttgcatatacaaagttgtcccatcccgttgatgagaatctgctggcaaccaatgttaagttttctagtgcaaagggaactatagtagacaaggttttgcataaccttcttcgaagcggtgactctgctcaaaagtacttgcaaggtactaaaagtgtgaagctggataactatatccttcttgataattttgtacagtcacggtcttcggcctctggttctaaaaaggcatcacagaaggattcaaaacgttctaaaagccgtatgtctatgaagcgactcaagaaatctggtgctttgcatatccctaaagatctccaaaagtttgatttgtttaagccaatgcatggtatgtgggaaagttacatgatgaaactcatcaaggtgaccgggaagattcaattatctttaactcttctctcagcagatcttcatggtgctttcatgtttgttgctgagtgcaagatagcatcattcactggtgtacaaggcataatggtgcgcgagacatccgaaacatttggaataatcacacgagatgacaaatttcgagttgtaccgaagaagctctctgtcttcatcatccaactcgactgctggaagattactttacatggggacaagtttatttcaagagacaatattgttcaacgttaatgctaaaaatgaagctctagtcgtttttcttagctagtggtagaaagcaaccattgatgaccacagaagcatcctaatctcacaagattttgctttagatctttccttatggacccaacattttaatatatttcttaatcttgaattttgtatgaatcctctgtaaatatactactgtgttattgttaatactaatttttattatt

SEQ ID NO: 34815 - protein, 329 aa, Arabidopsis thaliana
  peptide (1)..(329): Ceres Seq. ID no. 12371570
  misc_feature (243)..(329): Pfam Name: Domain of unknown function UPF0086 Pfam Description: Domain of unknown function UPF0086
  misc_feature (202)..(302): Homolog of NCBI NO: 25370825 NR Description: hypothetical protein At2g43190 [imported] -
  misc_feature (185)..(323): Homolog of NCBI NO: 39579971 NR Description: Hypothetical protein CBG23842 [Caenorhabditis
  misc_feature (186)..(308): Homolog of NCBI NO: 32418612 NR Description: hypothetical protein [Neurospora crassa]
  misc_feature (190)..(325): Homolog of NCBI NO: 5729986 NR Description: POP4 (processing of precursor , S. cerevisiae)
  misc_feature (190)..(325): Homolog of NCBI NO: 4309676 NR Description: ribonuclease P protein subunit p29 [Homo sapiens]
  misc_feature (187)..(320): Homolog of NCBI NO: 13384772 NR Description: RIKEN cDNA 1110023P21 [Mus musculus]
  misc_feature (187)..(320): Homolog of NCBI NO: 34855765 NR Description: similar to POP4 (processing of precursor , S.
  misc_feature (34)..(261): Homolog of NCBI NO: 25370825 NR Description: hypothetical protein At2g43190 [imported] -
  misc_feature (34)..(329): Homolog of NCBI NO: 30689290 NR Description: expressed protein [Arabidopsis thaliana]
  misc_feature (34)..(329): Homolog of NCBI NO: 18406178 NR Description: expressed protein
FFLRSSLSIAVNRWSQFLRPSLIRRSVSCYLAAMGTETVVHDQARWAMAAMERRLAVAKAQLLQQQQQKNEKDKKGTSDVDVSMKESHQADSLPTPSKTSIKKVDPKDDDSVAYTKLSHPVDENLLATNVKFSSAKGTIVDKVLHNLLRSGDSAQKYLQGTKSVKLDNYILLDNFVQSRSSASGSKKASQKDSKRSKSRMSMKRLKKSGALHIPKDLQKFDLFKPMHGMWESYMMKLIKVTGKIQLSLTLLSADLHGAFMFVAECKIASFTGVQGIMVRETSETFGIITRDDKFRVVPKKLSVFIIQLDCWKITLHGDKFISRDNIVQR

SEQ ID NO: 34816 - protein, 296 aa, Arabidopsis thaliana
  peptide (1)..(296): Ceres Seq. ID no. 12371571
  misc_feature (210)..(296): Pfam Name: Domain of unknown function UPF0086 Pfam Description: Domain of unknown function UPF0086
  misc_feature (169)..(269): Homolog of NCBI NO: 25370825 NR Description: hypothetical protein At2g43190 [imported] -
  misc_feature (152)..(290): Homolog of NCBI NO: 39579971 NR Description: Hypothetical protein CBG23842 [Caenorhabditis
  misc_feature (153)..(275): Homolog of NCBI NO: 32418612 NR Description: hypothetical protein [Neurospora crassa]
  misc_feature (157)..(292): Homolog of NCBI NO: 5729986 NR Description: POP4 (processing of precursor , S. cerevisiae)
  misc_feature (157)..(292): Homolog of NCBI NO: 4309676 NR Description: ribonuclease P protein subunit p29 [Homo sapiens]
  misc_feature (154)..(287): Homolog of NCBI NO: 13384772 NR Description: RIKEN cDNA 1110023P21 [Mus musculus]
  misc_feature (154)..(287): Homolog of NCBI NO: 34855765 NR Description: similar to POP4 (processing of precursor , S.
  misc_feature (1)..(228): Homolog of NCBI NO: 25370825 NR Description: hypothetical protein At2g43190 [imported] -
  misc_feature (1)..(296): Homolog of NCBI NO: 30689290 NR Description: expressed protein [Arabidopsis thaliana]
  misc_feature (1)..(296): Homolog of NCBI NO: 18406178 NR Description: expressed protein
MGTETVVHDQARWAMAAMERRLAVAKAQLLQQQQQKNEKDKKGTSDVDVSMKESHQADSLPTPSKTSIKKVDPKDDDSVAYTKLSHPVDENLLATNVKFSSAKGTIVDKVLHNLLRSGDSAQKYLQGTKSVKLDNYILLDNFVQSRSSASGSKKASQKDSKRSKSRMSMKRLKKSGALHIPKDLQKFDLFKPMHGMWESYMMKLIKVTGKIQLSLTLLSADLHGAFMFVAECKIASFTGVQGIMVRETSETFGIITRDDKFRVVPKKLSVFIIQLDCWKITLHGDKFISRDNIVQR

SEQ ID NO: 34817 - protein, 282 aa, Arabidopsis thaliana
  peptide (1)..(282): Ceres Seq. ID no. 12371572
  misc_feature (196)..(282): Pfam Name: Domain of unknown function UPF0086 Pfam Description: Domain of unknown function UPF0086
  misc_feature (155)..(255): Homolog of NCBI NO: 25370825 NR Description: hypothetical protein At2g43190 [imported] -
  misc_feature (138)..(276): Homolog of NCBI NO: 39579971 NR Description: Hypothetical protein CBG23842 [Caenorhabditis
  misc_feature (139)..(261): Homolog of NCBI NO: 32418612 NR Description: hypothetical protein [Neurospora crassa]
  misc_feature (143)..(278): Homolog of NCBI NO: 5729986 NR Description: POP4 (processing of precursor , S. cerevisiae)
  misc_feature (143)..(278): Homolog of NCBI NO: 4309676 NR Description: ribonuclease P protein subunit p29 [Homo sapiens]
  misc_feature (140)..(273): Homolog of NCBI NO: 13384772 NR Description: RIKEN cDNA 1110023P21 [Mus musculus]
  misc_feature (140)..(273): Homolog of NCBI NO: 34855765 NR Description: similar to POP4 (processing of precursor , S.
  misc_feature (1)..(214): Homolog of NCBI NO: 25370825 NR Description: hypothetical protein At2g43190 [imported] -
  misc_feature (1)..(282): Homolog of NCBI NO: 30689290 NR Description: expressed protein [Arabidopsis thaliana]
  misc_feature (1)..(282): Homolog of NCBI NO: 18406178 NR Description: expressed protein
MAAMERRLAVAKAQLLQQQQQKNEKDKKGTSDVDVSMKESHQADSLPTPSKTSIKKVDPKDDDSVAYTKLSHPVDENLLATNVKFSSAKGTIVDKVLHNLLRSGDSAQKYLQGTKSVKLDNYILLDNFVQSRSSASGSKKASQKDSKRSKSRMSMKRLKKSGALHIPKDLQKFDLFKPMHGMWESYMMKLIKVTGKIQLSLTLLSADLHGAFMFVAECKIASFTGVQGIMVRETSETFGIITRDDKFRVVPKKLSVFIIQLDCWKITLHGDKFISRDNIVQR

SEQ ID NO: 34818 - DNA, 715 bp, Arabidopsis thaliana
  misc_feature (1)..(715): Ceres Seq. ID no. 13488334
  misc_feature: MA Experiment ID: 108434 Result: Up-regulated in Transcription
  misc_feature: MA Experiment 108434 PARAMETER Experiment Name: At_Root_Tips_cDNA_P Parameter: Tissue Value: Root Tips
  misc_feature: MA Experiment ID: 108488 Result: Down-regulated in Transcription
  misc_feature: MA Experiment ID: 108573 Result: Down-regulated in Transcription
  misc_feature: MA Experiment 108573 PARAMETER Experiment Name: At_Drought_cDNA_P Parameter: Timepoint (hr) Value: 6
  misc_feature: MA Experiment 108573 PARAMETER Experiment Name: At_Drought_cDNA_P Parameter: Tissue Value: Aerial
  misc_feature: MA Experiment 108573 PARAMETER Experiment Name: At_Drought_cDNA_P Parameter: Treatment Value: Drought vs. No Drought
  misc_feature: MA Experiment ID: 20000227 Result: Up-regulated in Transcription
  misc_feature: MA Experiment 20000227 PARAMETER Experiment Name: At_Root-Tips-vs-Tops_P Parameter: Tissue Value: Root Tips vs. Root Tops
atcaagcaatccaaagcgattaaacctactcaatctcagatctcgttaaacctagaaacctcgagaaaaaccgtatcaatggcgccgaaagcagagaagaagcccgctgagaagaaaccagcttccgagaagccggtggaggagaaatcaaaagccgagaaagctccggcggagaagaaaccaaaggccggaaagaagctcccgaaggaagctggtgccggaggcgacaagaagaaaaagatgaagaagaagagtgtcgagacttacaagatctacatcttcaaggtgcttaagcaagttcatcccgatatcggaatctccagcaaagcgatggggatcatgaacagtttcattaacgatatcttcgagaagcttgctcaagaggcgtcgaagcttgcgaggtacaataagaaacctacgatcacttctcgggagattcagactgctgtgagattggtgcttcctggagagttggcgaagcatgccgtttctgaggggactaaagccgtcacgaaattcaccagctcttgaataattgagttagggttcttatcatatggatgttgctctgctttagggttaatggaatttggaagatctgagttagggttttagaatgtcctttaagtatctctgtttcgtttggaatttctacgttttgtaagtactgctgctattgataatgtttggagtctatatttgctctttgtgtccc

SEQ ID NO: 34819 - protein, 176 aa, Arabidopsis thaliana
  peptide (1)..(176): Ceres Seq. ID no. 13488335
  misc_feature (36)..(175): Pfam Name: Core histone H2A/H2B/H3/H4 Pfam Description: Core histone H2A/H2B/H3/H4
  misc_feature (27)..(176): Homolog of NCBI NO: 7439756 NR Description: histone H2B - tomato
  misc_feature (27)..(176): Homolog of NCBI NO: 7387727 NR Description: Histone H2B (CaH2B)
  misc_feature (27)..(176): Homolog of NCBI NO: 15223016 NR Description: histone H2B, putative [Arabidopsis thaliana]
  misc_feature (27)..(176): Homolog of NCBI NO: 7387726 NR Description: Histone H2B
  misc_feature (27)..(176): Homolog of NCBI NO: 21617908 NR Description: histone H2B [Arabidopsis thaliana]
  misc_feature (27)..(176): Homolog of NCBI NO: 15226943 NR Description: histone H2B, putative [Arabidopsis thaliana]
  misc_feature (27)..(176): Homolog of NCBI NO: 15231313 NR Description: histone H2B, putative [Arabidopsis thaliana]
  misc_feature (27)..(176): Homolog of NCBI NO: 15231304 NR Description: histone H2B [Arabidopsis thaliana]
  misc_feature (27)..(176): Homolog of NCBI NO: 21554180 NR Description: histone H2B-like protein [Arabidopsis thaliana]
  misc_feature (27)..(176): Homolog of NCBI NO: 15238563 NR Description: histone H2B [Arabidopsis thaliana]
IKQSKAIKPTQSQISLNLETSRKTVSMAPKAEKKPAEKKPASEKPVEEKSKAEKAPAEKKPKAGKKLPKEAGAGGDKKKKMKKKSVETYKIYIFKVLKQVHPDIGISSKAMGIMNSFINDIFEKLAQEASKLARYNKKPTITSREIQTAVRLVLPGELAKHAVSEGTKAVTKFTSS

SEQ ID NO: 34820 - protein, 150 aa, Arabidopsis thaliana
  peptide (1)..(150): Ceres Seq. ID no. 13488336
  misc_feature (10)..(149): Pfam Name: Core histone H2A/H2B/H3/H4 Pfam Description: Core histone H2A/H2B/H3/H4
  misc_feature (1)..(150): Homolog of NCBI NO: 7439756 NR Description: histone H2B - tomato
  misc_feature (1)..(150): Homolog of NCBI NO: 7387727 NR Description: Histone H2B (CaH2B)
  misc_feature (1)..(150): Homolog of NCBI NO: 15223016 NR Description: histone H2B, putative [Arabidopsis thaliana]
  misc_feature (1)..(150): Homolog of NCBI NO: 7387726 NR Description: Histone H2B
  misc_feature (1)..(150): Homolog of NCBI NO: 21617908 NR Description: histone H2B [Arabidopsis thaliana]
  misc_feature (1)..(150): Homolog of NCBI NO: 15226943 NR Description: histone H2B, putative [Arabidopsis thaliana]
  misc_feature (1)..(150): Homolog of NCBI NO: 15231313 NR Description: histone H2B, putative [Arabidopsis thaliana]
  misc_feature (1)..(150): Homolog of NCBI NO: 15231304 NR Description: histone H2B [Arabidopsis thaliana]
  misc_feature (1)..(150): Homolog of NCBI NO: 21554180 NR Description: histone H2B-like protein [Arabidopsis thaliana]
  misc_feature (1)..(150): Homolog of NCBI NO: 15238563 NR Description: histone H2B [Arabidopsis thaliana]
MAPKAEKKPAEKKPASEKPVEEKSKAEKAPAEKKPKAGKKLPKEAGAGGDKKKKMKKKSVETYKIYIFKVLKQVHPDIGISSKAMGIMNSFINDIFEKLAQEASKLARYNKKPTITSREIQTAVRLVLPGELAKHAVSEGTKAVTKFTSS

SEQ ID NO: 34821 - protein, 96 aa, Arabidopsis thaliana
  peptide (1)..(96): Ceres Seq. ID no. 13488337
  misc_feature (1)..(95): Pfam Name: Core histone H2A/H2B/H3/H4 Pfam Description: Core histone H2A/H2B/H3/H4
  misc_feature (1)..(96): Homolog of NCBI NO: 7439756 NR Description: histone H2B - tomato
  misc_feature (1)..(96): Homolog of NCBI NO: 7387727 NR Description: Histone H2B (CaH2B)
  misc_feature (1)..(96): Homolog of NCBI NO: 15223016 NR Description: histone H2B, putative [Arabidopsis thaliana]
  misc_feature (1)..(96): Homolog of NCBI NO: 7387726 NR Description: Histone H2B
  misc_feature (1)..(96): Homolog of NCBI NO: 21617908 NR Description: histone H2B [Arabidopsis thaliana]
  misc_feature (1)..(96): Homolog of NCBI NO: 15226943 NR Description: histone H2B, putative [Arabidopsis thaliana]
  misc_feature (1)..(96): Homolog of NCBI NO: 15231313 NR Description: histone H2B, putative [Arabidopsis thaliana]
  misc_feature (1)..(96): Homolog of NCBI NO: 15231304 NR Description: histone H2B [Arabidopsis thaliana]
  misc_feature (1)..(96): Homolog of NCBI NO: 21554180 NR Description: histone H2B-like protein [Arabidopsis thaliana]
  misc_feature (1)..(96): Homolog of NCBI NO: 15238563 NR Description: histone H2B [Arabidopsis thaliana]
MKKKSVETYKIYIFKVLKQVHPDIGISSKAMGIMNSFINDIFEKLAQEASKLARYNKKPTITSREIQTAVRLVLPGELAKHAVSEGTKAVTKFTSS

SEQ ID NO: 34822 - DNA, 1507 bp, Arabidopsis thaliana
  misc_feature (1)..(1507): Ceres Seq. ID no. 12714794
  misc_feature: MA Experiment ID: 108462 Result: Down-regulated in Transcription
  misc_feature: MA Experiment 108462 PARAMETER Experiment Name: At_Germinating_Seeds_cDNA_P Parameter: Age (day) Value: 2 vs. 0
  misc_feature: MA Experiment 108462 PARAMETER Experiment Name: At_Germinating_Seeds_cDNA_P Parameter: Tissue Value: Germinating Seeds
  misc_feature: MA Experiment ID: 108463 Result: Down-regulated in Transcription
  misc_feature: MA Experiment 108463 PARAMETER Experiment Name: At_Germinating_Seeds_cDNA_P Parameter: Age (day) Value: 3 vs. 0
  misc_feature: MA Experiment 108463 PARAMETER Experiment Name: At_Germinating_Seeds_cDNA_P Parameter: Tissue Value: Germinating Seeds
  misc_feature: MA Experiment ID: 108464 Result: Down-regulated in Transcription
  misc_feature: MA Experiment 108464 PARAMETER Experiment Name: At_Germinating_Seeds_cDNA_P Parameter: Age (day) Value: 4 vs. 0
  misc_feature: MA Experiment 108464 PARAMETER Experiment Name: At_Germinating_Seeds_cDNA_P Parameter: Tissue Value: Germinating Seeds
  misc_feature: MA Experiment ID: 108579 Result: Up-regulated in Transcription
  misc_feature: MA Experiment 108579 PARAMETER Experiment Name: At_4deg_Cold_cDNA_P Parameter: Temperature (deg C) Value: 4 vs. 22
  misc_feature: MA Experiment 108579 PARAMETER Experiment Name: At_4deg_Cold_cDNA_P Parameter: Timepoint (hr) Value: 6
  misc_feature: MA Experiment 108579 PARAMETER Experiment Name: At_4deg_Cold_cDNA_P Parameter: Tissue Value: Aerial
  misc_feature: MA Experiment ID: 108585 Result: Up-regulated in Transcription
  misc_feature: MA Experiment 108585 PARAMETER Experiment Name: At_5mM_NaNP_cDNA_P Parameter: Timepoint (hr) Value: 6
  misc_feature: MA Experiment 108585 PARAMETER Experiment Name: At_5mM_NaNP_cDNA_P Parameter: Tissue Value: Aerial
  misc_feature: MA Experiment 108585 PARAMETER Experiment Name: At_5mM_NaNP_cDNA_P Parameter: Treatment Value: null
  misc_feature: MA Experiment ID: 108595 Result: Down-regulated in Transcription
  misc_feature: MA Experiment 108595 PARAMETER Experiment Name: At_Ler-pi_Ovule_cDNA_P Parameter: Plant Line Value: null
  misc_feature: MA Experiment ID: 20000069 Result: Up-regulated in Transcription
  misc_feature: MA Experiment 20000069 PARAMETER Experiment Name: At_100uM_ABA_Mutants_cDNA_P Parameter: Plant Line Value: CS23
  misc_feature: MA Experiment 20000069 PARAMETER Experiment Name: At_100uM_ABA_Mutants_cDNA_P Parameter: Timepoint (hr) Value: 6
  misc_feature: MA Experiment 20000069 PARAMETER Experiment Name: At_100uM_ABA_Mutants_cDNA_P Parameter: Tissue Value: Aerial
  misc_feature: MA Experiment 20000069 PARAMETER Experiment Name: At_100uM_ABA_Mutants_cDNA_P Parameter: Treatment Value: 100uM ABA vs. No Treatment
  misc_feature: MA Experiment ID: 20000070 Result: Up-regulated in Transcription
  misc_feature: MA Experiment 20000070 PARAMETER Experiment Name: At_100uM_ABA_Mutants_cDNA_P Parameter: Plant Line Value: CS24
  misc_feature: MA Experiment 20000070 PARAMETER Experiment Name: At_100uM_ABA_Mutants_cDNA_P Parameter: Timepoint (hr) Value: 6
  misc_feature: MA Experiment 20000070 PARAMETER Experiment Name: At_100uM_ABA_Mutants_cDNA_P Parameter: Tissue Value: Aerial
  misc_feature: MA Experiment 20000070 PARAMETER Experiment Name: At_100uM_ABA_Mutants_cDNA_P Parameter: Treatment Value: 100uM ABA vs. No Treatment
  misc_feature: MA Experiment ID: 20000086 Result: Up-regulated in Transcription
  misc_feature: MA Experiment 20000086 PARAMETER Experiment Name: At_100uM_ABA_Mutants_cDNA_P Parameter: Plant Line Value: CS22
  misc_feature: MA Experiment 20000086 PARAMETER Experiment Name: At_100uM_ABA_Mutants_cDNA_P Parameter: Timepoint (hr) Value: 6
  misc_feature: MA Experiment 20000086 PARAMETER Experiment Name: At_100uM_ABA_Mutants_cDNA_P Parameter: Tissue Value: Aerial
  misc_feature: MA Experiment 20000086 PARAMETER Experiment Name: At_100uM_ABA_Mutants_cDNA_P Parameter: Treatment Value: 100uM ABA vs. No Treatment
  misc_feature: MA Experiment ID: 20000227 Result: Up-regulated in Transcription
  misc_feature: MA Experiment 20000227 PARAMETER Experiment Name: At_Root-Tips-vs-Tops_P Parameter: Tissue Value: Root Tips vs. Root Tops
  misc_feature: MA Experiment ID: 20000234 Result: Up-regulated in Transcription
  misc_feature: MA Experiment 20000234 PARAMETER Experiment Name: At_Siliques_P Parameter: Age (day) Value: 21
  misc_feature: MA Experiment 20000234 PARAMETER Experiment Name: At_Siliques_P Parameter: Organism Value: A. thaliana
  misc_feature: MA Experiment 20000234 PARAMETER Experiment Name: At_Siliques_P Parameter: Plant Line Value: WS
  misc_feature: MA Experiment 20000234 PARAMETER Experiment Name: At_Siliques_P Parameter: Tissue Value: Less Than 5mm Siliques vs. Whole Plant
  misc_feature: MA Experiment ID: 20001451 Result: Down-regulated in Transcription
  misc_feature: MA Experiment 20001451 PARAMETER Experiment Name: At_Far-red-induction_P Parameter: Age (day) Value: 7
  misc_feature: MA Experiment 20001451 PARAMETER Experiment Name: At_Far-red-induction_P Parameter: Light Value: Far-red vs. White
  misc_feature: MA Experiment 20001451 PARAMETER Experiment Name: At_Far-red-induction_P Parameter: Organism Value: A. thaliana
  misc_feature: MA Experiment 20001451 PARAMETER Experiment Name: At_Far-red-induction_P Parameter: Plant Line Value: Columbia
  misc_feature: MA Experiment 20001451 PARAMETER Experiment Name: At_Far-red-induction_P Parameter: Timepoint (hr) Value: 24
  misc_feature: MA Experiment 20001451 PARAMETER Experiment Name: At_Far-red-induction_P Parameter: Tissue Value: Whole Plant
  misc_feature: MA Experiment ID: 20001557 Result: Up-regulated in Transcription
  misc_feature: MA Experiment 20001557 PARAMETER Experiment Name: At_Drought_Soil_Dry_P Parameter: Age (day) Value: 27
  misc_feature: MA Experiment 20001557 PARAMETER Experiment Name: At_Drought_Soil_Dry_P Parameter: Organism Value: A. thaliana
  misc_feature: MA Experiment 20001557 PARAMETER Experiment Name: At_Drought_Soil_Dry_P Parameter: Plant Line Value: WS
  misc_feature: MA Experiment 20001557 PARAMETER Experiment Name: At_Drought_Soil_Dry_P Parameter: Post Timepoint (hr) Value: 3
  misc_feature: MA Experiment 20001557 PARAMETER Experiment Name: At_Drought_Soil_Dry_P Parameter: Post-Treatment Value: Re-Water vs. No Drought
  misc_feature: MA Experiment 20001557 PARAMETER Experiment Name: At_Drought_Soil_Dry_P Parameter: Timepoint (day) Value: 13
  misc_feature: MA Experiment 20001557 PARAMETER Experiment Name: At_Drought_Soil_Dry_P Parameter: Treatment Value: Drought vs. No Drought
  misc_feature: MA Experiment ID: 20001558 Result: Up-regulated in Transcription
  misc_feature: MA Experiment 20001558 PARAMETER Experiment Name: At_Drought_Soil_Dry_P Parameter: Age (day) Value: 27
  misc_feature: MA Experiment 20001558 PARAMETER Experiment Name: At_Drought_Soil_Dry_P Parameter: Organism Value: A. thaliana
  misc_feature: MA Experiment 20001558 PARAMETER Experiment Name: At_Drought_Soil_Dry_P Parameter: Plant Line Value: WS
  misc_feature: MA Experiment 20001558 PARAMETER Experiment Name: At_Drought_Soil_Dry_P Parameter: Post Timepoint (hr) Value: 6
  misc_feature: MA Experiment 20001558 PARAMETER Experiment Name: At_Drought_Soil_Dry_P Parameter: Post-Treatment Value: Re-Water vs. No Drought
  misc_feature: MA Experiment 20001558 PARAMETER Experiment Name: At_Drought_Soil_Dry_P Parameter: Timepoint (day) Value: 13
  misc_feature: MA Experiment 20001558 PARAMETER Experiment Name: At_Drought_Soil_Dry_P Parameter: Treatment Value: Drought vs. No Drought
acctgaatattgactacgcattataagaggttttgttttggggtttttccttcttcacatatcatttttctgattctcccacgaagatgaaccacctcgttcgtaaaagctccgtcggttactccgccttgaggtccgtttcgtacctccgtcaatctgccgttacctctccacctccgattttctccgccgccgcttcaaccgttcgccagttcacttccgccggctatccttccaacagttttcaattgacgccgccgacgaattggggaatccggatagttccggagaggaaggcgtttgtgattgagcgattcggtaaatacgctacgacgttgccgtcggggattcatttcctcattccgttcgtggatcgtattgcttatgttcattctctcaaggaagaagctatcccgattccgaatcagactgcgattactaaagacaacgttagtatccacatcgatggtgttctctacgttaagattgtggatcctaagttagcttcttatggcgttgagagtcctatctatgctgttgtacagctggctcagaccacaatgcgtagtgagcttggtaagatcactcttgataagacctttgaggaacgagacactctcaacgagaagatagtggaagccatcaatgttgctgcaaaagactggggtcttcagtgccttcgttatgagataagggatattatgccccctcatggagtgcgagctgctatggaaatgcaagctgaagctgagcgtaaaaagagagcccagattcttgagtctgaaggagaaaggcaatcccatatcaacattgctgatggtaagaaaagttctgtaatcttggcatctgaagcagcaaagatggaccaggtgaatcgagcacaaggtgaggcagaagcaatactagctagagcacaagcaactgcgaaaggcctggtcttgttatctcagtccctcaaggaaactgggggagtagaggcggcgagtttgagagttgcagagcaatacattacagccttcggtaacattgccaaggagggtacgataatgttgcttccaagtggtgcttcaaatcctgctagcatgattgctcaagctttaacaatgtacaaaagccttgtcatcaatggtccaagcaaagatcaccaagaaacacaagcacttgatgaaacagatttggaagagttggaagacatgggtgagaaacatatatcagaaggctctaataaccgatcaggctcaatatcatttgacacagagaaaccaggtcacaccggtgaaccacgattttctcttcagaaccgcaacaaggatccgcagtaggcagccgaaccggggatgagataaattctttgggcttgagaaaactggaaaccatttttcatctttcaaatatgaggcagtaaccatcttttccgtttgaatagctagaatatcatcactttgcatatagaaacgaatctgaacatctgttctccgataagaattttcctactggatttgttatg

SEQ ID NO: 34823 - protein, 411 aa, Arabidopsis thaliana
  peptide (1)..(411): Ceres Seq. ID no. 12714795
  misc_feature (58)..(376): Homolog of NCBI NO: 12963591 NR Description: stomatin-like protein 2 [Mus musculus]
  misc_feature (58)..(373): Homolog of NCBI NO: 32766629 NR Description: Unknown (protein for MGC:63505) [Danio rerio]
  misc_feature (63)..(344): Homolog of NCBI NO: 15892375 NR Description: unknown [Rickettsia conorii]
  misc_feature (63)..(351): Homolog of NCBI NO: 15604196 NR Description: unknown [Rickettsia prowazekii]
  misc_feature (41)..(344): Homolog of NCBI NO: 23394406 NR Description: unknown [Phytophthora infestans]
  misc_feature (19)..(372): Homolog of NCBI NO: 7716464 NR Description: stomatin-like protein [Zea mays]
  misc_feature (1)..(350): Homolog of NCBI NO: 21554125 NR Description: stomatin-like protein [Arabidopsis thaliana]
  misc_feature (1)..(350): Homolog of NCBI NO: 15239547 NR Description: putative protein
  misc_feature (1)..(393): Homolog of NCBI NO: 7487517 NR Description: hypothetical protein T29A15.70 - Arabidopsis
  misc_feature (1)..(411): Homolog of NCBI NO: 18417021 NR Description: putative protein
MNHLVRKSSVGYSALRSVSYLRQSAVTSPPPIFSAAASTVRQFTSAGYPSNSFQLTPPTNWGIRIVPERKAFVIERFGKYATTLPSGIHFLIPFVDRIAYVHSLKEEAIPIPNQTAITKDNVSIHIDGVLYVKIVDPKLASYGVESPIYAVVQLAQTTMRSELGKITLDKTFEERDTLNEKIVEAINVAAKDWGLQCLRYEIRDIMPPHGVRAAMEMQAEAERKKRAQILESEGERQSHINIADGKKSSVILASEAAKMDQVNRAQGEAEAILARAQATAKGLVLLSQSLKETGGVEAASLRVAEQYITAFGNIAKEGTIMLLPSGASNPASMIAQALTMYKSLVINGPSKDHQETQALDETDLEELEDMGEKHISEGSNNRSGSISFDTEKPGHTGEPRFSLQNRNKDPQ

SEQ ID NO: 34824 - protein, 253 aa, Arabidopsis thaliana
  peptide (1)..(253): Ceres Seq. ID no. 12714796
  misc_feature (1)..(218): Homolog of NCBI NO: 12963591 NR Description: stomatin-like protein 2 [Mus musculus]
  misc_feature (1)..(215): Homolog of NCBI NO: 32766629 NR Description: Unknown (protein for MGC:63505) [Danio rerio]
  misc_feature (1)..(186): Homolog of NCBI NO: 15892375 NR Description: unknown [Rickettsia conorii]
  misc_feature (1)..(193): Homolog of NCBI NO: 15604196 NR Description: unknown [Rickettsia prowazekii]
  misc_feature (1)..(186): Homolog of NCBI NO: 23394406 NR Description: unknown [Phytophthora infestans]
  misc_feature (1)..(214): Homolog of NCBI NO: 7716464 NR Description: stomatin-like protein [Zea mays]
  misc_feature (1)..(192): Homolog of NCBI NO: 21554125 NR Description: stomatin-like protein [Arabidopsis thaliana]
  misc_feature (1)..(192): Homolog of NCBI NO: 15239547 NR Description: putative protein
  misc_feature (1)..(235): Homolog of NCBI NO: 7487517 NR Description: hypothetical protein T29A15.70 - Arabidopsis
  misc_feature (1)..(253): Homolog of NCBI NO: 18417021 NR Description: putative protein
MRSELGKITLDKTFEERDTLNEKIVEAINVAAKDWGLQCLRYEIRDIMPPHGVRAAMEMQAEAERKKRAQILESEGERQSHINIADGKKSSVILASEAAKMDQVNRAQGEAEAILARAQATAKGLVLLSQSLKETGGVEAASLRVAEQYITAFGNIAKEGTIMLLPSGASNPASMIAQALTMYKSLVINGPSKDHQETQALDETDLEELEDMGEKHISEGSNNRSGSISFDTEKPGHTGEPRFSLQNRNKDPQ

SEQ ID NO: 34825 - protein, 206 aa, Arabidopsis thaliana
  peptide (1)..(206): Ceres Seq. ID no. 12714797
  misc_feature (1)..(171): Homolog of NCBI NO: 12963591 NR Description: stomatin-like protein 2 [Mus musculus]
  misc_feature (1)..(168): Homolog of NCBI NO: 32766629 NR Description: Unknown (protein for MGC:63505) [Danio rerio]
  misc_feature (1)..(139): Homolog of NCBI NO: 15892375 NR Description: unknown [Rickettsia conorii]
  misc_feature (1)..(146): Homolog of NCBI NO: 15604196 NR Description: unknown [Rickettsia prowazekii]
  misc_feature (1)..(139): Homolog of NCBI NO: 23394406 NR Description: unknown [Phytophthora infestans]
  misc_feature (1)..(167): Homolog of NCBI NO: 7716464 NR Description: stomatin-like protein [Zea mays]
  misc_feature (1)..(145): Homolog of NCBI NO: 21554125 NR Description: stomatin-like protein [Arabidopsis thaliana]
  misc_feature (1)..(145): Homolog of NCBI NO: 15239547 NR Description: putative protein
  misc_feature (1)..(188): Homolog of NCBI NO: 7487517 NR Description: hypothetical protein T29A15.70 - Arabidopsis
  misc_feature (1)..(206): Homolog of NCBI NO: 18417021 NR Description: putative protein
MPPHGVRAAMEMQAEAERKKRAQILESEGERQSHINIADGKKSSVILASEAAKMDQVNRAQGEAEAILARAQATAKGLVLLSQSLKETGGVEAASLRVAEQYITAFGNIAKEGTIMLLPSGASNPASMIAQALTMYKSLVINGPSKDHQETQALDETDLEELEDMGEKHISEGSNNRSGSISFDTEKPGHTGEPRFSLQNRNKDPQ

SEQ ID NO: 34826 - DNA, 1887 bp, Arabidopsis thaliana
  misc_feature (1)..(1887): Ceres Seq. ID no. 12371393
  misc_feature: MA Experiment ID: 20000180 Result: Up-regulated in Transcription
  misc_feature: MA Experiment 20000180 PARAMETER Experiment Name: At_Germinating_Seeds_P Parameter: Age (hr) Value: 24 vs. 0
  misc_feature: MA Experiment 20000180 PARAMETER Experiment Name: At_Germinating_Seeds_P Parameter: Tissue Value: Germinating Seeds
  misc_feature: MA Experiment ID: 20000438 Result: Up-regulated in Transcription
  misc_feature: MA Experiment 20000438 PARAMETER Experiment Name: At_Shoots__P Parameter: Age (day) Value: 14
  misc_feature: MA Experiment 20000438 PARAMETER Experiment Name: At_Shoots__P Parameter: Tissue Value: Shoots vs. Whole Plant
  misc_feature: MA Experiment ID: 20000439 Result: Down-regulated in Transcription
  misc_feature: MA Experiment 20000439 PARAMETER Experiment Name: At_Roots__P Parameter: Age (day) Value: 14 vs. 21
  misc_feature: MA Experiment 20000439 PARAMETER Experiment Name: At_Roots__P Parameter: Organism Value: A. thaliana
  misc_feature: MA Experiment 20000439 PARAMETER Experiment Name: At_Roots__P Parameter: Tissue Value: Roots vs. Whole Plant
  misc_feature: MA Experiment ID: 20001248 Result: Down-regulated in Transcription
  misc_feature: MA Experiment 20001248 PARAMETER Experiment Name: At_Far-red-induction_P Parameter: Age (day) Value: 7
  misc_feature: MA Experiment 20001248 PARAMETER Experiment Name: At_Far-red-induction_P Parameter: Light Value: Far-red vs. White
  misc_feature: MA Experiment 20001248 PARAMETER Experiment Name: At_Far-red-induction_P Parameter: Organism Value: A. thaliana
  misc_feature: MA Experiment 20001248 PARAMETER Experiment Name: At_Far-red-induction_P Parameter: Plant Line Value: Columbia
  misc_feature: MA Experiment 20001248 PARAMETER Experiment Name: At_Far-red-induction_P Parameter: Timepoint (hr) Value: 4
  misc_feature: MA Experiment 20001248 PARAMETER Experiment Name: At_Far-red-induction_P Parameter: Tissue Value: Whole Plant
  misc_feature: MA Experiment ID: 20001450 Result: Down-regulated in Transcription
  misc_feature: MA Experiment 20001450 PARAMETER Experiment Name: At_Far-red-induction_P Parameter: Age (day) Value: 7
  misc_feature: MA Experiment 20001450 PARAMETER Experiment Name: At_Far-red-induction_P Parameter: Light Value: Far-red vs. White
  misc_feature: MA Experiment 20001450 PARAMETER Experiment Name: At_Far-red-induction_P Parameter: Organism Value: A. thaliana
  misc_feature: MA Experiment 20001450 PARAMETER Experiment Name: At_Far-red-induction_P Parameter: Plant Line Value: Columbia
  misc_feature: MA Experiment 20001450 PARAMETER Experiment Name: At_Far-red-induction_P Parameter: Timepoint (hr) Value: 8
  misc_feature: MA Experiment 20001450 PARAMETER Experiment Name: At_Far-red-induction_P Parameter: Tissue Value: Whole Plant
aacgcaacgccgggaagcttatcaggggtttggtgcgttgaatttgtggatcaagagacgatgcaaattcaatgcaaaaccctaactttcacagtttcttcgattccttgtaacccaaagctaccattcccatcttcactcactttacggtcatggaatcctccattcccgagtttcaggagctcctctgtttccggaccaaagtcgtccctgaagctgaacaggtttttaagaaactgtgcaagtccaaatcaggagcttgttgttaaaggagaaaccggaaatgggtcgatttcggagctccaaggagatgcagcaaatggttcgatttcgccggtggaagtggaagcagaagtagaagaagtgaaggtagatgatttggcgaatcagagtatttggggacagatgaaagagatcgtcatgtttaccggacctgccgcgggattgtggctatgtgggccgttgatgagtctcattgatacggcggtgattggtcaaggaagctcactcgaactcgctgctttaggtcctgctaccgtcatctgtgattatttgtgttatacgttcatgttcctctcagttgcgacttcaaatcttgttgctacctctcttgctcggcaggataaagatgaagtacaacatcagatatcgatcttgcttttcattgggttggcttgtggagtcacgatgatggtgttgacaagactgtttggttcctgggcactaactgcttttacaggggtaaagaatgccgacattgttccagcagctaataaatatgttcagattcgtggtttagcatggccagctgttctcattggatgggttgctcaaagtgcaagtcttggtatgaaagactcatggggacctcttaaggctttggcggttgctagtgcaataaacggtgttggtgatgtggtcttatgcacctttctaggatatggtatagcaggtgcagcttgggcaactatggtgtcacaagttgttgctgcttatatgatgatggacgcattgaacaagaaaggatacagcgcattctcattctgtgttccttctccaagtgaacttttgacgatttttggactcgctgcccctgtctttataactatgatgtcaaaggttttgttctatacgctccttgtgtactttgctacatcaatgggtacaaatatcatagctgctcatcaggttatgcttcagatatataccatgagtacggtttggggggagcctctctctcaaactgcacagtcctttatgcctgagcttttattcggaatcaatcgtaatttgcctaaagctagggtgcttctgaagtcactagttatcatcggagctacgctaggaatagtagtcggaaccattggcacagcagttccatggctgttccctggcatcttcacacgtgacaaggttgtcacatccgagatgcacaaggtcataataccgtattttcttgctttatccatcactccaagtactcacagtcttgaaggcaccttactggctggaagagatcttagatatatcagcttgtcaatgactggatgcttagcggtcgctgggcttctacttatgcttctgagcaatggaggatttggtttgagaggctgctggtacgctctcgtgggattccaatgggctcggttttctctatctcttttccgccttctatcgagggatggtgtactgtactccgaagatacaagccgatacactgagaaagtgaaagctgcgtagctcagcaagtcaacgtatacctcacaagaaaaagtataatgaacagagaacagcttcattcagttgtagatcaatgtgttactctgtttcaagattgtattctttaagaacatgaaaatgtattcgactgaatagaaaagtcttggc

SEQ ID NO: 34827 - protein, 579 aa, Arabidopsis thaliana
  peptide (1)..(579): Ceres Seq. ID no. 12371394
  misc_feature (150)..(308): Pfam Name: MatE Pfam Description: MatE
  misc_feature (137)..(229): Homolog of NCBI NO: 15231918 NR Description: MATE efflux family protein, putative
  misc_feature (217)..(562): Homolog of NCBI NO: 15231918 NR Description: MATE efflux family protein, putative
  misc_feature (137)..(562): Homolog of NCBI NO: 29830828 NR Description: putative DNA-damage-inducible protein F
  misc_feature (38)..(329): Homolog of NCBI NO: 25412030 NR Description: hypothetical protein At2g21340 [imported] -
  misc_feature (245)..(478): Homolog of NCBI NO: 25412030 NR Description: hypothetical protein At2g21340 [imported] -
  misc_feature (113)..(489): Homolog of NCBI NO: 7485793 NR Description: hypothetical protein F19H22.130 - Arabidopsis
  misc_feature (113)..(578): Homolog of NCBI NO: 22329250 NR Description: putative protein
  misc_feature (38)..(579): Homolog of NCBI NO: 18399664 NR Description: expressed protein
  misc_feature (21)..(579): Homolog of NCBI NO: 17065002 NR Description: Unknown protein [Arabidopsis thaliana]
  misc_feature (38)..(579): Homolog of NCBI NO: 21554183 NR Description: enhanced disease susceptibility 5 [Arabidopsis
NATPGSLSGVWCVEFVDQETMQIQCKTLTFTVSSIPCNPKLPFPSSLTLRSWNPPFPSFRSSSVSGPKSSLKLNRFLRNCASPNQELVVKGETGNGSISELQGDAANGSISPVEVEAEVEEVKVDDLANQSIWGQMKEIVMFTGPAAGLWLCGPLMSLIDTAVIGQGSSLELAALGPATVICDYLCYTFMFLSVATSNLVATSLARQDKDEVQHQISILLFIGLACGVTMMVLTRLFGSWALTAFTGVKNADIVPAANKYVQIRGLAWPAVLIGWVAQSASLGMKDSWGPLKALAVASAINGVGDVVLCTFLGYGIAGAAWATMVSQVVAAYMMMDALNKKGYSAFSFCVPSPSELLTIFGLAAPVFITMMSKVLFYTLLVYFATSMGTNIIAAHQVMLQIYTMSTVWGEPLSQTAQSFMPELLFGINRNLPKARVLLKSLVIIGATLGIVVGTIGTAVPWLFPGIFTRDKVVTSEMHKVIIPYFLALSITPSTHSLEGTLLAGRDLRYISLSMTGCLAVAGLLLMLLSNGGFGLRGCWYALVGFQWARFSLSLFRLLSRDGVLYSEDTSRYTEKVKAA

SEQ ID NO: 34828 - protein, 559 aa, Arabidopsis thaliana
  peptide (1)..(559): Ceres Seq. ID no. 12371395
  misc_feature (130)..(288): Pfam Name: MatE Pfam Description: MatE
  misc_feature (117)..(209): Homolog of NCBI NO: 15231918 NR Description: MATE efflux family protein, putative
  misc_feature (197)..(542): Homolog of NCBI NO: 15231918 NR Description: MATE efflux family protein, putative
  misc_feature (117)..(542): Homolog of NCBI NO: 29830828 NR Description: putative DNA-damage-inducible protein F
  misc_feature (18)..(309): Homolog of NCBI NO: 25412030 NR Description: hypothetical protein At2g21340 [imported] -
  misc_feature (225)..(458): Homolog of NCBI NO: 25412030 NR Description: hypothetical protein At2g21340 [imported] -
  misc_feature (93)..(469): Homolog of NCBI NO: 7485793 NR Description: hypothetical protein F19H22.130 - Arabidopsis
  misc_feature (93)..(558): Homolog of NCBI NO: 22329250 NR Description: putative protein
  misc_feature (18)..(559): Homolog of NCBI NO: 18399664 NR Description: expressed protein
  misc_feature (1)..(559): Homolog of NCBI NO: 17065002 NR Description: Unknown protein [Arabidopsis thaliana]
  misc_feature (18)..(559): Homolog of NCBI NO: 21554183 NR Description: enhanced disease susceptibility 5 [Arabidopsis
MQIQCKTLTFTVSSIPCNPKLPFPSSLTLRSWNPPFPSFRSSSVSGPKSSLKLNRFLRNCASPNQELVVKGETGNGSISELQGDAANGSISPVEVEAEVEEVKVDDLANQSIWGQMKEIVMFTGPAAGLWLCGPLMSLIDTAVIGQGSSLELAALGPATVICDYLCYTFMFLSVATSNLVATSLARQDKDEVQHQISILLFIGLACGVTMMVLTRLFGSWALTAFTGVKNADIVPAANKYVQIRGLAWPAVLIGWVAQSASLGMKDSWGPLKALAVASAINGVGDVVLCTFLGYGIAGAAWATMVSQVVAAYMMMDALNKKGYSAFSFCVPSPSELLTIFGLAAPVFITMMSKVLFYTLLVYFATSMGTNIIAAHQVMLQIYTMSTVWGEPLSQTAQSFMPELLFGINRNLPKARVLLKSLVIIGATLGIVVGTIGTAVPWLFPGIFTRDKVVTSEMHKVIIPYFLALSITPSTHSLEGTLLAGRDLRYISLSMTGCLAVAGLLLMLLSNGGFGLRGCWYALVGFQWARFSLSLFRLLSRDGVLYSEDTSRYTEKVKAA

SEQ ID NO: 34829 - protein, 444 aa, Arabidopsis thaliana
  peptide (1)..(444): Ceres Seq. ID no. 12371396
  misc_feature (15)..(173): Pfam Name: MatE Pfam Description: MatE
  misc_feature (2)..(94): Homolog of NCBI NO: 15231918 NR Description: MATE efflux family protein, putative
  misc_feature (82)..(427): Homolog of NCBI NO: 15231918 NR Description: MATE efflux family protein, putative
  misc_feature (2)..(427): Homolog of NCBI NO: 29830828 NR Description: putative DNA-damage-inducible protein F
  misc_feature (1)..(194): Homolog of NCBI NO: 25412030 NR Description: hypothetical protein At2g21340 [imported] -
  misc_feature (110)..(343): Homolog of NCBI NO: 25412030 NR Description: hypothetical protein At2g21340 [imported] -
  misc_feature (1)..(354): Homolog of NCBI NO: 7485793 NR Description: hypothetical protein F19H22.130 - Arabidopsis
  misc_feature (1)..(443): Homolog of NCBI NO: 22329250 NR Description: putative protein
  misc_feature (1)..(444): Homolog of NCBI NO: 18399664 NR Description: expressed protein
  misc_feature (1)..(444): Homolog of NCBI NO: 17065002 NR Description: Unknown protein [Arabidopsis thaliana]
  misc_feature (1)..(444): Homolog of NCBI NO: 21554183 NR Description: enhanced disease susceptibility 5 [Arabidopsis
MKEIVMFTGPAAGLWLCGPLMSLIDTAVIGQGSSLELAALGPATVICDYLCYTFMFLSVATSNLVATSLARQDKDEVQHQISILLFIGLACGVTMMVLTRLFGSWALTAFTGVKNADIVPAANKYVQIRGLAWPAVLIGWVAQSASLGMKDSWGPLKALAVASAINGVGDVVLCTFLGYGIAGAAWATMVSQVVAAYMMMDALNKKGYSAFSFCVPSPSELLTIFGLAAPVFITMMSKVLFYTLLVYFATSMGTNIIAAHQVMLQIYTMSTVWGEPLSQTAQSFMPELLFGINRNLPKARVLLKSLVIIGATLGIVVGTIGTAVPWLFPGIFTRDKVVTSEMHKVIIPYFLALSITPSTHSLEGTLLAGRDLRYISLSMTGCLAVAGLLLMLLSNGGFGLRGCWYALVGFQWARFSLSLFRLLSRDGVLYSEDTSRYTEKVKAA

SEQ ID NO: 34830 - DNA, 935 bp, Arabidopsis thaliana
  misc_feature (1)..(935): Ceres Seq. ID no. 12366989
  misc_feature: MA Experiment ID: 108461 Result: Down-regulated in Transcription
  misc_feature: MA Experiment 108461 PARAMETER Experiment Name: At_Germinating_Seeds_cDNA_P Parameter: Age (day) Value: 1 vs. 0
  misc_feature: MA Experiment 108461 PARAMETER Experiment Name: At_Germinating_Seeds_cDNA_P Parameter: Tissue Value: Germinating Seeds
  misc_feature: MA Experiment ID: 108462 Result: Down-regulated in Transcription
  misc_feature: MA Experiment 108462 PARAMETER Experiment Name: At_Germinating_Seeds_cDNA_P Parameter: Age (day) Value: 2 vs. 0
  misc_feature: MA Experiment 108462 PARAMETER Experiment Name: At_Germinating_Seeds_cDNA_P Parameter: Tissue Value: Germinating Seeds
  misc_feature: MA Experiment ID: 108464 Result: Down-regulated in Transcription
  misc_feature: MA Experiment 108464 PARAMETER Experiment Name: At_Germinating_Seeds_cDNA_P Parameter: Age (day) Value: 4 vs. 0
  misc_feature: MA Experiment 108464 PARAMETER Experiment Name: At_Germinating_Seeds_cDNA_P Parameter: Tissue Value: Germinating Seeds
  misc_feature: MA Experiment ID: 108473 Result: Up-regulated in Transcription
  misc_feature: MA Experiment 108473 PARAMETER Experiment Name: At_Drought_Flowers_cDNA_P Parameter: Timepoint (hr) Value: 7 d
  misc_feature: MA Experiment 108473 PARAMETER Experiment Name: At_Drought_Flowers_cDNA_P Parameter: Tissue Value: Flower
  misc_feature: MA Experiment 108473 PARAMETER Experiment Name: At_Drought_Flowers_cDNA_P Parameter: Treatment Value: Drought vs. No Drought
  misc_feature: MA Experiment ID: 108488 Result: Down-regulated in Transcription
  misc_feature: MA Experiment ID: 108561 Result: Up-regulated in Transcription
  misc_feature: MA Experiment 108561 PARAMETER Experiment Name: At_100uM_ABA_cDNA_P Parameter: Timepoint (hr) Value: 6
  misc_feature: MA Experiment 108561 PARAMETER Experiment Name: At_100uM_ABA_cDNA_P Parameter: Tissue Value: Aerial
  misc_feature: MA Experiment 108561 PARAMETER Experiment Name: At_100uM_ABA_cDNA_P Parameter: Treatment Value: 100uM ABA vs. No Treatment
  misc_feature: MA Experiment ID: 108573 Result: Up-regulated in Transcription
  misc_feature: MA Experiment 108573 PARAMETER Experiment Name: At_Drought_cDNA_P Parameter: Timepoint (hr) Value: 6
  misc_feature: MA Experiment 108573 PARAMETER Experiment Name: At_Drought_cDNA_P Parameter: Tissue Value: Aerial
  misc_feature: MA Experiment 108573 PARAMETER Experiment Name: At_Drought_cDNA_P Parameter: Treatment Value: Drought vs. No Drought
  misc_feature: MA Experiment ID: 108574 Result: Up-regulated in Transcription
  misc_feature: MA Experiment 108574 PARAMETER Experiment Name: At_Wounding__cDNA_P Parameter: Timepoint (hr) Value: 1
  misc_feature: MA Experiment 108574 PARAMETER Experiment Name: At_Wounding__cDNA_P Parameter: Tissue Value: Aerial
  misc_feature: MA Experiment 108574 PARAMETER Experiment Name: At_Wounding__cDNA_P Parameter: Treatment Value: Wounding vs. No Wounding
  misc_feature: MA Experiment ID: 108595 Result: Up-regulated in Transcription
  misc_feature: MA Experiment 108595 PARAMETER Experiment Name: At_Ler-pi_Ovule_cDNA_P Parameter: Plant Line Value: null
  misc_feature: MA Experiment ID: 108605 Result: Up-regulated in Transcription
  misc_feature: MA Experiment 108605 PARAMETER Experiment Name: At_100uM_ABA_cDNA_P Parameter: Timepoint (hr) Value: 6
  misc_feature: MA Experiment 108605 PARAMETER Experiment Name: At_100uM_ABA_cDNA_P Parameter: Tissue Value: Aerial
  misc_feature: MA Experiment 108605 PARAMETER Experiment Name: At_100uM_ABA_cDNA_P Parameter: Treatment Value: 100uM ABA vs. No Treatment
  misc_feature: MA Experiment ID: 20000030 Result: Down-regulated in Transcription
  misc_feature: MA Experiment 20000030 PARAMETER Experiment Name: At_CS6630_Roots_cDNA_P Parameter: Plant Line Value: CS6630 vs. WS
  misc_feature: MA Experiment 20000030 PARAMETER Experiment Name: At_CS6630_Roots_cDNA_P Parameter: Tissue Value: Roots
  misc_feature: MA Experiment ID: 20000069 Result: Up-regulated in Transcription
  misc_feature: MA Experiment 20000069 PARAMETER Experiment Name: At_100uM_ABA_Mutants_cDNA_P Parameter: Plant Line Value: CS23
  misc_feature: MA Experiment 20000069 PARAMETER Experiment Name: At_100uM_ABA_Mutants_cDNA_P Parameter: Timepoint (hr) Value: 6
  misc_feature: MA Experiment 20000069 PARAMETER Experiment Name: At_100uM_ABA_Mutants_cDNA_P Parameter: Tissue Value: Aerial
  misc_feature: MA Experiment 20000069 PARAMETER Experiment Name: At_100uM_ABA_Mutants_cDNA_P Parameter: Treatment Value: 100uM ABA vs. No Treatment
  misc_feature: MA Experiment ID: 20000070 Result: Up-regulated in Transcription
  misc_feature: MA Experiment 20000070 PARAMETER Experiment Name: At_100uM_ABA_Mutants_cDNA_P Parameter: Plant Line Value: CS24
  misc_feature: MA Experiment 20000070 PARAMETER Experiment Name: At_100uM_ABA_Mutants_cDNA_P Parameter: Timepoint (hr) Value: 6
  misc_feature: MA Experiment 20000070 PARAMETER Experiment Name: At_100uM_ABA_Mutants_cDNA_P Parameter: Tissue Value: Aerial
  misc_feature: MA Experiment 20000070 PARAMETER Experiment Name: At_100uM_ABA_Mutants_cDNA_P Parameter: Treatment Value: 100uM ABA vs. No Treatment
  misc_feature: MA Experiment ID: 20000071 Result: Up-regulated in Transcription
  misc_feature: MA Experiment 20000071 PARAMETER Experiment Name: At_100uM_ABA_Mutants_cDNA_P Parameter: Plant Line Value: CS8104
  misc_feature: MA Experiment 20000071 PARAMETER Experiment Name: At_100uM_ABA_Mutants_cDNA_P Parameter: Timepoint (hr) Value: 6
  misc_feature: MA Experiment 20000071 PARAMETER Experiment Name: At_100uM_ABA_Mutants_cDNA_P Parameter: Tissue Value: Aerial
  misc_feature: MA Experiment 20000071 PARAMETER Experiment Name: At_100uM_ABA_Mutants_cDNA_P Parameter: Treatment Value: 100uM ABA vs. No Treatment
  misc_feature: MA Experiment ID: 20000072 Result: Up-regulated in Transcription
  misc_feature: MA Experiment 20000072 PARAMETER Experiment Name: At_100uM_ABA_Mutants_cDNA_P Parameter: Plant Line Value: CS8105
  misc_feature: MA Experiment 20000072 PARAMETER Experiment Name: At_100uM_ABA_Mutants_cDNA_P Parameter: Timepoint (hr) Value: 6
  misc_feature: MA Experiment 20000072 PARAMETER Experiment Name: At_100uM_ABA_Mutants_cDNA_P Parameter: Tissue Value: Aerial
  misc_feature: MA Experiment 20000072 PARAMETER Experiment Name: At_100uM_ABA_Mutants_cDNA_P Parameter: Treatment Value: 100uM ABA vs. No Treatment
  misc_feature: MA Experiment ID: 20000086 Result: Up-regulated in Transcription
  misc_feature: MA Experiment 20000086 PARAMETER Experiment Name: At_100uM_ABA_Mutants_cDNA_P Parameter: Plant Line Value: CS22
  misc_feature: MA Experiment 20000086 PARAMETER Experiment Name: At_100uM_ABA_Mutants_cDNA_P Parameter: Timepoint (hr) Value: 6
  misc_feature: MA Experiment 20000086 PARAMETER Experiment Name: At_100uM_ABA_Mutants_cDNA_P Parameter: Tissue Value: Aerial
  misc_feature: MA Experiment 20000086 PARAMETER Experiment Name: At_100uM_ABA_Mutants_cDNA_P Parameter: Treatment Value: 100uM ABA vs. No Treatment
  misc_feature: MA Experiment ID: 20000088 Result: Up-regulated in Transcription
  misc_feature: MA Experiment 20000088 PARAMETER Experiment Name: At_100uM_ABA_Mutants_cDNA_P Parameter: Plant Line Value: Landsberg
  misc_feature: MA Experiment 20000088 PARAMETER Experiment Name: At_100uM_ABA_Mutants_cDNA_P Parameter: Timepoint (hr) Value: 6
  misc_feature: MA Experiment 20000088 PARAMETER Experiment Name: At_100uM_ABA_Mutants_cDNA_P Parameter: Tissue Value: Aerial
  misc_feature: MA Experiment 20000088 PARAMETER Experiment Name: At_100uM_ABA_Mutants_cDNA_P Parameter: Treatment Value: 100uM ABA vs. No Treatment
  misc_feature: MA Experiment ID: 20000117 Result: Up-regulated in Transcription
  misc_feature: MA Experiment 20000117 PARAMETER Experiment Name: At_100uM_ABA_Mutants_cDNA_P Parameter: Plant Line Value: Columbia
  misc_feature: MA Experiment 20000117 PARAMETER Experiment Name: At_100uM_ABA_Mutants_cDNA_P Parameter: Timepoint (hr) Value: 6
  misc_feature: MA Experiment 20000117 PARAMETER Experiment Name: At_100uM_ABA_Mutants_cDNA_P Parameter: Tissue Value: Aerial
  misc_feature: MA Experiment 20000117 PARAMETER Experiment Name: At_100uM_ABA_Mutants_cDNA_P Parameter: Treatment Value: 100uM ABA vs. No Treatment
  misc_feature: MA Experiment ID: 20000436 Result: Up-regulated in Transcription
  misc_feature: MA Experiment 20000436 PARAMETER Experiment Name: At_Drought_P Parameter: Age (day) Value: 7
  misc_feature: MA Experiment 20000436 PARAMETER Experiment Name: At_Drought_P Parameter: Organism Value: A. thaliana
  misc_feature: MA Experiment 20000436 PARAMETER Experiment Name: At_Drought_P Parameter: Plant Line Value: WS
  misc_feature: MA Experiment 20000436 PARAMETER Experiment Name: At_Drought_P Parameter: Timepoint (hr) Value: 12
  misc_feature: MA Experiment 20000436 PARAMETER Experiment Name: At_Drought_P Parameter: Tissue Value: Whole Plant
  misc_feature: MA Experiment 20000436 PARAMETER Experiment Name: At_Drought_P Parameter: Treatment Value: Drought vs. No Drought
  misc_feature: MA Experiment ID: 20000437 Result: Up-regulated in Transcription
  misc_feature: MA Experiment 20000437 PARAMETER Experiment Name: At_Drought_P Parameter: Age (day) Value: 8
  misc_feature: MA Experiment 20000437 PARAMETER Experiment Name: At_Drought_P Parameter: Organism Value: A. thaliana
  misc_feature: MA Experiment 20000437 PARAMETER Experiment Name: At_Drought_P Parameter: Plant Line Value: WS
  misc_feature: MA Experiment 20000437 PARAMETER Experiment Name: At_Drought_P Parameter: Timepoint (hr) Value: 24
  misc_feature: MA Experiment 20000437 PARAMETER Experiment Name: At_Drought_P Parameter: Tissue Value: Whole Plant
  misc_feature: MA Experiment 20000437 PARAMETER Experiment Name: At_Drought_P Parameter: Treatment Value: Drought vs. No Drought
  misc_feature: MA Experiment ID: 20000438 Result: Down-regulated in Transcription
  misc_feature: MA Experiment 20000438 PARAMETER Experiment Name: At_Shoots__P Parameter: Age (day) Value: 14
  misc_feature: MA Experiment 20000438 PARAMETER Experiment Name: At_Shoots__P Parameter: Tissue Value: Shoots vs. Whole Plant
  misc_feature: MA Experiment ID: 20000794 Result: Up-regulated in Transcription
  misc_feature: MA Experiment 20000794 PARAMETER Experiment Name: At_Petals_P Parameter: Age (day) Value: 23-25 days
  misc_feature: MA Experiment 20000794 PARAMETER Experiment Name: At_Petals_P Parameter: Plant Line Value: WS
  misc_feature: MA Experiment 20000794 PARAMETER Experiment Name: At_Petals_P Parameter: Tissue Value: Petals vs. Whole plant
  misc_feature: MA Experiment ID: 20001555 Result: Up-regulated in Transcription
  misc_feature: MA Experiment 20001555 PARAMETER Experiment Name: At_Drought_Soil_Dry_P Parameter: Age (day) Value: 24
  misc_feature: MA Experiment 20001555 PARAMETER Experiment Name: At_Drought_Soil_Dry_P Parameter: Organism Value: A. thaliana
  misc_feature: MA Experiment 20001555 PARAMETER Experiment Name: At_Drought_Soil_Dry_P Parameter: Plant Line Value: WS
  misc_feature: MA Experiment 20001555 PARAMETER Experiment Name: At_Drought_Soil_Dry_P Parameter: Post Timepoint (hr) Value: None
  misc_feature: MA Experiment 20001555 PARAMETER Experiment Name: At_Drought_Soil_Dry_P Parameter: Post-Treatment Value: None
  misc_feature: MA Experiment 20001555 PARAMETER Experiment Name: At_Drought_Soil_Dry_P Parameter: Timepoint (day) Value: 10
  misc_feature: MA Experiment 20001555 PARAMETER Experiment Name: At_Drought_Soil_Dry_P Parameter: Treatment Value: Drought vs. No Drought
  misc_feature: MA Experiment ID: 20001556 Result: Up-regulated in Transcription
  misc_feature: MA Experiment 20001556 PARAMETER Experiment Name: At_Drought_Soil_Dry_P Parameter: Age (day) Value: 26
  misc_feature: MA Experiment 20001556 PARAMETER Experiment Name: At_Drought_Soil_Dry_P Parameter: Organism Value: A. thaliana
  misc_feature: MA Experiment 20001556 PARAMETER Experiment Name: At_Drought_Soil_Dry_P Parameter: Plant Line Value: WS
  misc_feature: MA Experiment 20001556 PARAMETER Experiment Name: At_Drought_Soil_Dry_P Parameter: Post Timepoint (hr) Value: None
  misc_feature: MA Experiment 20001556 PARAMETER Experiment Name: At_Drought_Soil_Dry_P Parameter: Post-Treatment Value: None
  misc_feature: MA Experiment 20001556 PARAMETER Experiment Name: At_Drought_Soil_Dry_P Parameter: Timepoint (day) Value: 12
  misc_feature: MA Experiment 20001556 PARAMETER Experiment Name: At_Drought_Soil_Dry_P Parameter: Treatment Value: Drought vs. No Drought
  misc_feature: MA Experiment ID: 20001557 Result: Up-regulated in Transcription
  misc_feature: MA Experiment 20001557 PARAMETER Experiment Name: At_Drought_Soil_Dry_P Parameter: Age (day) Value: 27
  misc_feature: MA Experiment 20001557 PARAMETER Experiment Name: At_Drought_Soil_Dry_P Parameter: Organism Value: A. thaliana
  misc_feature: MA Experiment 20001557 PARAMETER Experiment Name: At_Drought_Soil_Dry_P Parameter: Plant Line Value: WS
  misc_feature: MA Experiment 20001557 PARAMETER Experiment Name: At_Drought_Soil_Dry_P Parameter: Post Timepoint (hr) Value: 3
  misc_feature: MA Experiment 20001557 PARAMETER Experiment Name: At_Drought_Soil_Dry_P Parameter: Post-Treatment Value: Re-Water vs. No Drought
  misc_feature: MA Experiment 20001557 PARAMETER Experiment Name: At_Drought_Soil_Dry_P Parameter: Timepoint (day) Value: 13
  misc_feature: MA Experiment 20001557 PARAMETER Experiment Name: At_Drought_Soil_Dry_P Parameter: Treatment Value: Drought vs. No Drought
  misc_feature: MA Experiment ID: 20001559 Result: Up-regulated in Transcription
  misc_feature: MA Experiment 20001559 PARAMETER Experiment Name: At_Drought_Soil_Dry_P Parameter: Age (day) Value: 28
  misc_feature: MA Experiment 20001559 PARAMETER Experiment Name: At_Drought_Soil_Dry_P Parameter: Organism Value: A. thaliana
  misc_feature: MA Experiment 20001559 PARAMETER Experiment Name: At_Drought_Soil_Dry_P Parameter: Plant Line Value: WS
  misc_feature: MA Experiment 20001559 PARAMETER Experiment Name: At_Drought_Soil_Dry_P Parameter: Post Timepoint (hr) Value: 29
  misc_feature: MA Experiment 20001559 PARAMETER Experiment Name: At_Drought_Soil_Dry_P Parameter: Post-Treatment Value: Re-Water vs. No Drought
  misc_feature: MA Experiment 20001559 PARAMETER Experiment Name: At_Drought_Soil_Dry_P Parameter: Timepoint (day) Value: 14
  misc_feature: MA Experiment 20001559 PARAMETER Experiment Name: At_Drought_Soil_Dry_P Parameter: Treatment Value: Drought vs. No Drought
  misc_feature: MA Experiment ID: 20001904 Result: Up-regulated in Transcription
  misc_feature: MA Experiment 20001904 PARAMETER Experiment Name: At_Drought_Reproduction_P Parameter: Age (day) Value: 37
  misc_feature: MA Experiment 20001904 PARAMETER Experiment Name: At_Drought_Reproduction_P Parameter: Organism Value: A. thaliana
  misc_feature: MA Experiment 20001904 PARAMETER Experiment Name: At_Drought_Reproduction_P Parameter: Plant Line Value: WS
  misc_feature: MA Experiment 20001904 PARAMETER Experiment Name: At_Drought_Reproduction_P Parameter: Timepoint (day) Value: 7
  misc_feature: MA Experiment 20001904 PARAMETER Experiment Name: At_Drought_Reproduction_P Parameter: Tissue Value: Rosettes
  misc_feature: MA Experiment 20001904 PARAMETER Experiment Name: At_Drought_Reproduction_P Parameter: Treatment Value: Drought vs. No Drought
  misc_feature: MA Experiment ID: 20001906 Result: Up-regulated in Transcription
  misc_feature: MA Experiment 20001906 PARAMETER Experiment Name: At_Drought_Reproduction_P Parameter: Age (day) Value: 35
  misc_feature: MA Experiment 20001906 PARAMETER Experiment Name: At_Drought_Reproduction_P Parameter: Organism Value: A. thaliana
  misc_feature: MA Experiment 20001906 PARAMETER Experiment Name: At_Drought_Reproduction_P Parameter: Plant Line Value: WS
  misc_feature: MA Experiment 20001906 PARAMETER Experiment Name: At_Drought_Reproduction_P Parameter: Timepoint (day) Value: 5
  misc_feature: MA Experiment 20001906 PARAMETER Experiment Name: At_Drought_Reproduction_P Parameter: Tissue Value: Siliques
  misc_feature: MA Experiment 20001906 PARAMETER Experiment Name: At_Drought_Reproduction_P Parameter: Treatment Value: Drought vs. No Drought
aactttatcacgctattctcaaacaagcaaagaaccttaaccaaaaagaaaacgtctacggagacatatggagaggaaacatcacttcgtgttagttcacaacgcttatcatggagcctggatctggtacaagctcaagcccctccttgaatcagccggccaccgcgttactgctgtcgaactcgccgcctccgggatcgacccacgaccaatccaggccgttgaaaccgtcgacgaatactccaaaccgttgatcgaaaccctcaaatctcttccagagaacgaagaggtaattctggttggattcagcttcggaggcatcaacatcgctctcgccgccgacatatttccggcgaagattaaggttcttgtgttcctcaacgccttcttgcccgacacaacccacgtgccttctcacgttctggacaagtatatggagatgcctggaggtttgggagattgtgagttttcatctcatgaaacaagaaatgggacgatgagtttattgaagatgggaccaaaattcatgaaggcacgtctttaccaaaattgtcccatagaggattacgagctggcaaaaatgttgcataggcaagggtcatttttcacagaggatctatcaaagaaagaaaagtttagcgaggaaggatatggttcggtgcaacgagtttacgtaatgagtagtgaagacaaagccatcccctgcgatttcattcgttggatgattgataatttcaacgtctcgaaagtctacgagatcgatggcggagatcacatggtgatgctctccaaaccccaaaaactctttgactctctctctgctattgccaccgattatatgtaataatcttaagtccgttttacttttttctcatcgttactaataaaacaaacccctttttccgggcaactttcatcaaaaaacaaaacttatg

SEQ ID NO: 34831 - protein, 258 aa, Arabidopsis thaliana
  peptide (1)..(258): Ceres Seq. ID no. 12366990
  misc_feature (32)..(252): Pfam Name: alpha/beta hydrolase fold Pfam Description: alpha/beta hydrolase fold
  misc_feature (2)..(254): Homolog of NCBI NO: 6651393 NR Description: polyneuridine aldehyde esterase [Rauvolfia
  misc_feature (2)..(257): Homolog of NCBI NO: 21554666 NR Description: putative acetone-cyanohydrin lyase [Arabidopsis
  misc_feature (2)..(257): Homolog of NCBI NO: 15227863 NR Description: putative acetone-cyanohydrin lyase
  misc_feature (7)..(257): Homolog of NCBI NO: 2780225 NR Description: alpha-hydroxynitrile lyase [Manihot esculenta]
  misc_feature (2)..(258): Homolog of NCBI NO: 27754457 NR Description: putative acetone-cyanohydrin lyase [Arabidopsis
  misc_feature (2)..(258): Homolog of NCBI NO: 15227867 NR Description: putative acetone-cyanohydrin lyase; protein id:
  misc_feature (1)..(257): Homolog of NCBI NO: 14279437 NR Description: ethylene-induced esterase [Citrus sinensis]
  misc_feature (1)..(258): Homolog of NCBI NO: 16648679 NR Description: AT5g10300/F18D22_70 [Arabidopsis thaliana]
  misc_feature (1)..(258): Homolog of NCBI NO: 15028131 NR Description: putative alpha-hydroxynitrile lyase [Arabidopsis
  misc_feature (1)..(258): Homolog of NCBI NO: 15238118 NR Description: alpha-hydroxynitrile lyase-like protein
MERKHHFVLVHNAYHGAWIWYKLKPLLESAGHRVTAVELAASGIDPRPIQAVETVDEYSKPLIETLKSLPENEEVILVGFSFGGINIALAADIFPAKIKVLVFLNAFLPDTTHVPSHVLDKYMEMPGGLGDCEFSSHETRNGTMSLLKMGPKFMKARLYQNCPIEDYELAKMLHRQGSFFTEDLSKKEKFSEEGYGSVQRVYVMSSEDKAIPCDFIRWMIDNFNVSKVYEIDGGDHMVMLSKPQKLFDSLSAIATDYM

SEQ ID NO: 34832 - protein, 136 aa, Arabidopsis thaliana
  peptide (1)..(136): Ceres Seq. ID no. 12366991
  misc_feature (1)..(130): Pfam Name: alpha/beta hydrolase fold Pfam Description: alpha/beta hydrolase fold
  misc_feature (1)..(132): Homolog of NCBI NO: 6651393 NR Description: polyneuridine aldehyde esterase [Rauvolfia
  misc_feature (1)..(135): Homolog of NCBI NO: 21554666 NR Description: putative acetone-cyanohydrin lyase [Arabidopsis
  misc_feature (1)..(135): Homolog of NCBI NO: 15227863 NR Description: putative acetone-cyanohydrin lyase
  misc_feature (1)..(135): Homolog of NCBI NO: 2780225 NR Description: alpha-hydroxynitrile lyase [Manihot esculenta]
  misc_feature (1)..(136): Homolog of NCBI NO: 27754457 NR Description: putative acetone-cyanohydrin lyase [Arabidopsis
  misc_feature (1)..(136): Homolog of NCBI NO: 15227867 NR Description: putative acetone-cyanohydrin lyase; protein id:
  misc_feature (1)..(135): Homolog of NCBI NO: 14279437 NR Description: ethylene-induced esterase [Citrus sinensis]
  misc_feature (1)..(136): Homolog of NCBI NO: 16648679 NR Description: AT5g10300/F18D22_70 [Arabidopsis thaliana]
  misc_feature (1)..(136): Homolog of NCBI NO: 15028131 NR Description: putative alpha-hydroxynitrile lyase [Arabidopsis
  misc_feature (1)..(136): Homolog of NCBI NO: 15238118 NR Description: alpha-hydroxynitrile lyase-like protein
MEMPGGLGDCEFSSHETRNGTMSLLKMGPKFMKARLYQNCPIEDYELAKMLHRQGSFFTEDLSKKEKFSEEGYGSVQRVYVMSSEDKAIPCDFIRWMIDNFNVSKVYEIDGGDHMVMLSKPQKLFDSLSAIATDYM

SEQ ID NO: 34833 - protein, 134 aa, Arabidopsis thaliana
  peptide (1)..(134): Ceres Seq. ID no. 12366992
  misc_feature (1)..(128): Pfam Name: alpha/beta hydrolase fold Pfam Description: alpha/beta hydrolase fold
  misc_feature (1)..(130): Homolog of NCBI NO: 6651393 NR Description: polyneuridine aldehyde esterase [Rauvolfia
  misc_feature (1)..(133): Homolog of NCBI NO: 21554666 NR Description: putative acetone-cyanohydrin lyase [Arabidopsis
  misc_feature (1)..(133): Homolog of NCBI NO: 15227863 NR Description: putative acetone-cyanohydrin lyase
  misc_feature (1)..(133): Homolog of NCBI NO: 2780225 NR Description: alpha-hydroxynitrile lyase [Manihot esculenta]
  misc_feature (1)..(134): Homolog of NCBI NO: 27754457 NR Description: putative acetone-cyanohydrin lyase [Arabidopsis
  misc_feature (1)..(134): Homolog of NCBI NO: 15227867 NR Description: putative acetone-cyanohydrin lyase; protein id:
  misc_feature (1)..(133): Homolog of NCBI NO: 14279437 NR Description: ethylene-induced esterase [Citrus sinensis]
  misc_feature (1)..(134): Homolog of NCBI NO: 16648679 NR Description: AT5g10300/F18D22_70 [Arabidopsis thaliana]
  misc_feature (1)..(134): Homolog of NCBI NO: 15028131 NR Description: putative alpha-hydroxynitrile lyase [Arabidopsis
  misc_feature (1)..(134): Homolog of NCBI NO: 15238118 NR Description: alpha-hydroxynitrile lyase-like protein
MPGGLGDCEFSSHETRNGTMSLLKMGPKFMKARLYQNCPIEDYELAKMLHRQGSFFTEDLSKKEKFSEEGYGSVQRVYVMSSEDKAIPCDFIRWMIDNFNVSKVYEIDGGDHMVMLSKPQKLFDSLSAIATDYM

SEQ ID NO: 34834 - DNA, 1299 bp, Arabidopsis thaliana
  misc_feature (1)..(1299): Ceres Seq. ID no. 12338263
  misc_feature: MA Experiment ID: 108434 Result: Down-regulated in Transcription
  misc_feature: MA Experiment 108434 PARAMETER Experiment Name: At_Root_Tips_cDNA_P Parameter: Tissue Value: Root Tips
  misc_feature: MA Experiment ID: 108461 Result: Up-regulated in Transcription
  misc_feature: MA Experiment 108461 PARAMETER Experiment Name: At_Germinating_Seeds_cDNA_P Parameter: Age (day) Value: 1 vs. 0
  misc_feature: MA Experiment 108461 PARAMETER Experiment Name: At_Germinating_Seeds_cDNA_P Parameter: Tissue Value: Germinating Seeds
  misc_feature: MA Experiment ID: 108462 Result: Up-regulated in Transcription
  misc_feature: MA Experiment 108462 PARAMETER Experiment Name: At_Germinating_Seeds_cDNA_P Parameter: Age (day) Value: 2 vs. 0
  misc_feature: MA Experiment 108462 PARAMETER Experiment Name: At_Germinating_Seeds_cDNA_P Parameter: Tissue Value: Germinating Seeds
  misc_feature: MA Experiment ID: 108463 Result: Up-regulated in Transcription
  misc_feature: MA Experiment 108463 PARAMETER Experiment Name: At_Germinating_Seeds_cDNA_P Parameter: Age (day) Value: 3 vs. 0
  misc_feature: MA Experiment 108463 PARAMETER Experiment Name: At_Germinating_Seeds_cDNA_P Parameter: Tissue Value: Germinating Seeds
  misc_feature: MA Experiment ID: 108464 Result: Up-regulated in Transcription
  misc_feature: MA Experiment 108464 PARAMETER Experiment Name: At_Germinating_Seeds_cDNA_P Parameter: Age (day) Value: 4 vs. 0
  misc_feature: MA Experiment 108464 PARAMETER Experiment Name: At_Germinating_Seeds_cDNA_P Parameter: Tissue Value: Germinating Seeds
  misc_feature: MA Experiment ID: 108488 Result: Down-regulated in Transcription
  misc_feature: MA Experiment ID: 108561 Result: Up-regulated in Transcription
  misc_feature: MA Experiment 108561 PARAMETER Experiment Name: At_100uM_ABA_cDNA_P Parameter: Timepoint (hr) Value: 6
  misc_feature: MA Experiment 108561 PARAMETER Experiment Name: At_100uM_ABA_cDNA_P Parameter: Tissue Value: Aerial
  misc_feature: MA Experiment 108561 PARAMETER Experiment Name: At_100uM_ABA_cDNA_P Parameter: Treatment Value: 100uM ABA vs. No Treatment
  misc_feature: MA Experiment ID: 108572 Result: Up-regulated in Transcription
  misc_feature: MA Experiment 108572 PARAMETER Experiment Name: At_Drought_cDNA_P Parameter: Timepoint (hr) Value: 1
  misc_feature: MA Experiment 108572 PARAMETER Experiment Name: At_Drought_cDNA_P Parameter: Tissue Value: Aerial
  misc_feature: MA Experiment 108572 PARAMETER Experiment Name: At_Drought_cDNA_P Parameter: Treatment Value: Drought vs. No Drought
  misc_feature: MA Experiment ID: 108573 Result: Up-regulated in Transcription
  misc_feature: MA Experiment 108573 PARAMETER Experiment Name: At_Drought_cDNA_P Parameter: Timepoint (hr) Value: 6
  misc_feature: MA Experiment 108573 PARAMETER Experiment Name: At_Drought_cDNA_P Parameter: Tissue Value: Aerial
  misc_feature: MA Experiment 108573 PARAMETER Experiment Name: At_Drought_cDNA_P Parameter: Treatment Value: Drought vs. No Drought
  misc_feature: MA Experiment ID: 108577 Result: Down-regulated in Transcription
  misc_feature: MA Experiment 108577 PARAMETER Experiment Name: At_42deg_Heat_cDNA_P Parameter: Temperature (deg C) Value: 42 vs. 22
  misc_feature: MA Experiment 108577 PARAMETER Experiment Name: At_42deg_Heat_cDNA_P Parameter: Timepoint (hr) Value: 6
  misc_feature: MA Experiment 108577 PARAMETER Experiment Name: At_42deg_Heat_cDNA_P Parameter: Tissue Value: Aerial
  misc_feature: MA Experiment ID: 108594 Result: Down-regulated in Transcription
  misc_feature: MA Experiment 108594 PARAMETER Experiment Name: At_Ler-rhl_Root_cDNA_P Parameter: Plant Line Value: null
  misc_feature: MA Experiment ID: 108605 Result: Up-regulated in Transcription
  misc_feature: MA Experiment 108605 PARAMETER Experiment Name: At_100uM_ABA_cDNA_P Parameter: Timepoint (hr) Value: 6
  misc_feature: MA Experiment 108605 PARAMETER Experiment Name: At_100uM_ABA_cDNA_P Parameter: Tissue Value: Aerial
  misc_feature: MA Experiment 108605 PARAMETER Experiment Name: At_100uM_ABA_cDNA_P Parameter: Treatment Value: 100uM ABA vs. No Treatment
  misc_feature: MA Experiment ID: 108607 Result: Up-regulated in Transcription
  misc_feature: MA Experiment 108607 PARAMETER Experiment Name: At_100uM_ABA_cDNA_P Parameter: Timepoint (hr) Value: 4
  misc_feature: MA Experiment 108607 PARAMETER Experiment Name: At_100uM_ABA_cDNA_P Parameter: Tissue Value: Aerial
  misc_feature: MA Experiment 108607 PARAMETER Experiment Name: At_100uM_ABA_cDNA_P Parameter: Treatment Value: 100uM ABA vs. No Treatment
  misc_feature: MA Experiment ID: 20000069 Result: Up-regulated in Transcription
  misc_feature: MA Experiment 20000069 PARAMETER Experiment Name: At_100uM_ABA_Mutants_cDNA_P Parameter: Plant Line Value: CS23
  misc_feature: MA Experiment 20000069 PARAMETER Experiment Name: At_100uM_ABA_Mutants_cDNA_P Parameter: Timepoint (hr) Value: 6
  misc_feature: MA Experiment 20000069 PARAMETER Experiment Name: At_100uM_ABA_Mutants_cDNA_P Parameter: Tissue Value: Aerial
  misc_feature: MA Experiment 20000069 PARAMETER Experiment Name: At_100uM_ABA_Mutants_cDNA_P Parameter: Treatment Value: 100uM ABA vs. No Treatment
  misc_feature: MA Experiment ID: 20000070 Result: Up-regulated in Transcription
  misc_feature: MA Experiment 20000070 PARAMETER Experiment Name: At_100uM_ABA_Mutants_cDNA_P Parameter: Plant Line Value: CS24
  misc_feature: MA Experiment 20000070 PARAMETER Experiment Name: At_100uM_ABA_Mutants_cDNA_P Parameter: Timepoint (hr) Value: 6
  misc_feature: MA Experiment 20000070 PARAMETER Experiment Name: At_100uM_ABA_Mutants_cDNA_P Parameter: Tissue Value: Aerial
  misc_feature: MA Experiment 20000070 PARAMETER Experiment Name: At_100uM_ABA_Mutants_cDNA_P Parameter: Treatment Value: 100uM ABA vs. No Treatment
  misc_feature: MA Experiment ID: 20000071 Result: Up-regulated in Transcription
  misc_feature: MA Experiment 20000071 PARAMETER Experiment Name: At_100uM_ABA_Mutants_cDNA_P Parameter: Plant Line Value: CS8104
  misc_feature: MA Experiment 20000071 PARAMETER Experiment Name: At_100uM_ABA_Mutants_cDNA_P Parameter: Timepoint (hr) Value: 6
  misc_feature: MA Experiment 20000071 PARAMETER Experiment Name: At_100uM_ABA_Mutants_cDNA_P Parameter: Tissue Value: Aerial
  misc_feature: MA Experiment 20000071 PARAMETER Experiment Name: At_100uM_ABA_Mutants_cDNA_P Parameter: Treatment Value: 100uM ABA vs. No Treatment
  misc_feature: MA Experiment ID: 20000072 Result: Up-regulated in Transcription
  misc_feature: MA Experiment 20000072 PARAMETER Experiment Name: At_100uM_ABA_Mutants_cDNA_P Parameter: Plant Line Value: CS8105
  misc_feature: MA Experiment 20000072 PARAMETER Experiment Name: At_100uM_ABA_Mutants_cDNA_P Parameter: Timepoint (hr) Value: 6
  misc_feature: MA Experiment 20000072 PARAMETER Experiment Name: At_100uM_ABA_Mutants_cDNA_P Parameter: Tissue Value: Aerial
  misc_feature: MA Experiment 20000072 PARAMETER Experiment Name: At_100uM_ABA_Mutants_cDNA_P Parameter: Treatment Value: 100uM ABA vs. No Treatment
  misc_feature: MA Experiment ID: 20000086 Result: Up-regulated in Transcription
  misc_feature: MA Experiment 20000086 PARAMETER Experiment Name: At_100uM_ABA_Mutants_cDNA_P Parameter: Plant Line Value: CS22
  misc_feature: MA Experiment 20000086 PARAMETER Experiment Name: At_100uM_ABA_Mutants_cDNA_P Parameter: Timepoint (hr) Value: 6
  misc_feature: MA Experiment 20000086 PARAMETER Experiment Name: At_100uM_ABA_Mutants_cDNA_P Parameter: Tissue Value: Aerial
  misc_feature: MA Experiment 20000086 PARAMETER Experiment Name: At_100uM_ABA_Mutants_cDNA_P Parameter: Treatment Value: 100uM ABA vs. No Treatment
  misc_feature: MA Experiment ID: 20000087 Result: Up-regulated in Transcription
  misc_feature: MA Experiment 20000087 PARAMETER Experiment Name: At_100uM_ABA_Mutants_cDNA_P Parameter: Plant Line Value: WS
  misc_feature: MA Experiment 20000087 PARAMETER Experiment Name: At_100uM_ABA_Mutants_cDNA_P Parameter: Timepoint (hr) Value: 6
  misc_feature: MA Experiment 20000087 PARAMETER Experiment Name: At_100uM_ABA_Mutants_cDNA_P Parameter: Tissue Value: Aerial
  misc_feature: MA Experiment 20000087 PARAMETER Experiment Name: At_100uM_ABA_Mutants_cDNA_P Parameter: Treatment Value: 100uM ABA vs. No Treatment
  misc_feature: MA Experiment ID: 20000088 Result: Up-regulated in Transcription
  misc_feature: MA Experiment 20000088 PARAMETER Experiment Name: At_100uM_ABA_Mutants_cDNA_P Parameter: Plant Line Value: Landsberg
  misc_feature: MA Experiment 20000088 PARAMETER Experiment Name: At_100uM_ABA_Mutants_cDNA_P Parameter: Timepoint (hr) Value: 6
  misc_feature: MA Experiment 20000088 PARAMETER Experiment Name: At_100uM_ABA_Mutants_cDNA_P Parameter: Tissue Value: Aerial
  misc_feature: MA Experiment 20000088 PARAMETER Experiment Name: At_100uM_ABA_Mutants_cDNA_P Parameter: Treatment Value: 100uM ABA vs. No Treatment
  misc_feature: MA Experiment ID: 20000089 Result: Up-regulated in Transcription
  misc_feature: MA Experiment ID: 20000090 Result: Up-regulated in Transcription
  misc_feature: MA Experiment ID: 20000111 Result: Down-regulated in Transcription
  misc_feature: MA Experiment 20000111 PARAMETER Experiment Name: At_42deg_Heat_cDNA_P Parameter: Temperature (deg C) Value: 42 vs. 22
  misc_feature: MA Experiment 20000111 PARAMETER Experiment Name: At_42deg_Heat_cDNA_P Parameter: Timepoint (hr) Value: 6
  misc_feature: MA Experiment 20000111 PARAMETER Experiment Name: At_42deg_Heat_cDNA_P Parameter: Tissue Value: Aerial
  misc_feature: MA Experiment ID: 20000117 Result: Up-regulated in Transcription
  misc_feature: MA Experiment 20000117 PARAMETER Experiment Name: At_100uM_ABA_Mutants_cDNA_P Parameter: Plant Line Value: Columbia
  misc_feature: MA Experiment 20000117 PARAMETER Experiment Name: At_100uM_ABA_Mutants_cDNA_P Parameter: Timepoint (hr) Value: 6
  misc_feature: MA Experiment 20000117 PARAMETER Experiment Name: At_100uM_ABA_Mutants_cDNA_P Parameter: Tissue Value: Aerial
  misc_feature: MA Experiment 20000117 PARAMETER Experiment Name: At_100uM_ABA_Mutants_cDNA_P Parameter: Treatment Value: 100uM ABA vs. No Treatment
  misc_feature: MA Experiment ID: 20000169 Result: Up-regulated in Transcription
  misc_feature: MA Experiment 20000169 PARAMETER Experiment Name: At_100uM_ABA_P Parameter: Age (day) Value: 14
  misc_feature: MA Experiment 20000169 PARAMETER Experiment Name: At_100uM_ABA_P Parameter: Organism Value: A. thaliana
  misc_feature: MA Experiment 20000169 PARAMETER Experiment Name: At_100uM_ABA_P Parameter: Plant Line Value: WS
  misc_feature: MA Experiment 20000169 PARAMETER Experiment Name: At_100uM_ABA_P Parameter: Timepoint (hr) Value: 6
  misc_feature: MA Experiment 20000169 PARAMETER Experiment Name: At_100uM_ABA_P Parameter: Tissue Value: Aerial
  misc_feature: MA Experiment 20000169 PARAMETER Experiment Name: At_100uM_ABA_P Parameter: Treatment Value: 100uM ABA vs. No Treatment
  misc_feature: MA Experiment ID: 20000173 Result: Down-regulated in Transcription
  misc_feature: MA Experiment 20000173 PARAMETER Experiment Name: At_42deg_Heat_P Parameter: Age (day) Value: 14
  misc_feature: MA Experiment 20000173 PARAMETER Experiment Name: At_42deg_Heat_P Parameter: Organism Value: A. thaliana
  misc_feature: MA Experiment 20000173 PARAMETER Experiment Name: At_42deg_Heat_P Parameter: Plant Line Value: WS
  misc_feature: MA Experiment 20000173 PARAMETER Experiment Name: At_42deg_Heat_P Parameter: Temperature (deg C) Value: 42 vs. 22
  misc_feature: MA Experiment 20000173 PARAMETER Experiment Name: At_42deg_Heat_P Parameter: Timepoint (hr) Value: 6
  misc_feature: MA Experiment 20000173 PARAMETER Experiment Name: At_42deg_Heat_P Parameter: Tissue Value: Aerial
  misc_feature: MA Experiment ID: 20000180 Result: Up-regulated in Transcription
  misc_feature: MA Experiment 20000180 PARAMETER Experiment Name: At_Germinating_Seeds_P Parameter: Age (hr) Value: 24 vs. 0
  misc_feature: MA Experiment 20000180 PARAMETER Experiment Name: At_Germinating_Seeds_P Parameter: Tissue Value: Germinating Seeds
  misc_feature: MA Experiment ID: 20000184 Result: Down-regulated in Transcription
  misc_feature: MA Experiment 20000184 PARAMETER Experiment Name: At_Shoots__P Parameter: Age (day) Value: 7
  misc_feature: MA Experiment 20000184 PARAMETER Experiment Name: At_Shoots__P Parameter: Tissue Value: Shoots vs. Whole Plant
  misc_feature: MA Experiment ID: 20000185 Result: Down-regulated in Transcription
  misc_feature: MA Experiment 20000185 PARAMETER Experiment Name: At_Roots__P Parameter: Age (day) Value: 7 vs. 21
  misc_feature: MA Experiment 20000185 PARAMETER Experiment Name: At_Roots__P Parameter: Organism Value: A. thaliana
  misc_feature: MA Experiment 20000185 PARAMETER Experiment Name: At_Roots__P Parameter: Tissue Value: Roots vs. Whole Plant
  misc_feature: MA Experiment ID: 20000234 Result: Down-regulated in Transcription
  misc_feature: MA Experiment 20000234 PARAMETER Experiment Name: At_Siliques_P Parameter: Age (day) Value: 21
  misc_feature: MA Experiment 20000234 PARAMETER Experiment Name: At_Siliques_P Parameter: Organism Value: A. thaliana
  misc_feature: MA Experiment 20000234 PARAMETER Experiment Name: At_Siliques_P Parameter: Plant Line Value: WS
  misc_feature: MA Experiment 20000234 PARAMETER Experiment Name: At_Siliques_P Parameter: Tissue Value: Less Than 5mm Siliques vs. Whole Plant
  misc_feature: MA Experiment ID: 20000264 Result: Up-regulated in Transcription
  misc_feature: MA Experiment 20000264 PARAMETER Experiment Name: At_Open_Flower_P Parameter: Age (day) Value: 21
  misc_feature: MA Experiment 20000264 PARAMETER Experiment Name: At_Open_Flower_P Parameter: Plant Line Value: WS
  misc_feature: MA Experiment 20000264 PARAMETER Experiment Name: At_Open_Flower_P Parameter: Tissue Value: Open Flower vs. Whole Plant
  misc_feature: MA Experiment ID: 20000438 Result: Down-regulated in Transcription
  misc_feature: MA Experiment 20000438 PARAMETER Experiment Name: At_Shoots__P Parameter: Age (day) Value: 14
  misc_feature: MA Experiment 20000438 PARAMETER Experiment Name: At_Shoots__P Parameter: Tissue Value: Shoots vs. Whole Plant
  misc_feature: MA Experiment ID: 20000439 Result: Down-regulated in Transcription
  misc_feature: MA Experiment 20000439 PARAMETER Experiment Name: At_Roots__P Parameter: Age (day) Value: 14 vs. 21
  misc_feature: MA Experiment 20000439 PARAMETER Experiment Name: At_Roots__P Parameter: Organism Value: A. thaliana
  misc_feature: MA Experiment 20000439 PARAMETER Experiment Name: At_Roots__P Parameter: Tissue Value: Roots vs. Whole Plant
  misc_feature: MA Experiment ID: 20000453 Result: Up-regulated in Transcription
  misc_feature: MA Experiment 20000453 PARAMETER Experiment Name: At_100uM_ABA_P Parameter: Age (day) Value: 15
  misc_feature: MA Experiment 20000453 PARAMETER Experiment Name: At_100uM_ABA_P Parameter: Organism Value: A. thaliana
  misc_feature: MA Experiment 20000453 PARAMETER Experiment Name: At_100uM_ABA_P Parameter: Plant Line Value: WS
  misc_feature: MA Experiment 20000453 PARAMETER Experiment Name: At_100uM_ABA_P Parameter: Timepoint (hr) Value: 24
  misc_feature: MA Experiment 20000453 PARAMETER Experiment Name: At_100uM_ABA_P Parameter: Tissue Value: Aerial
  misc_feature: MA Experiment 20000453 PARAMETER Experiment Name: At_100uM_ABA_P Parameter: Treatment Value: 100uM ABA vs. No Treatment
  misc_feature: MA Experiment ID: 20000455 Result: Up-regulated in Transcription
  misc_feature: MA Experiment 20000455 PARAMETER Experiment Name: At_100uM_ABA_P Parameter: Age (day) Value: 16
  misc_feature: MA Experiment 20000455 PARAMETER Experiment Name: At_100uM_ABA_P Parameter: Organism Value: A. thaliana
  misc_feature: MA Experiment 20000455 PARAMETER Experiment Name: At_100uM_ABA_P Parameter: Plant Line Value: WS
  misc_feature: MA Experiment 20000455 PARAMETER Experiment Name: At_100uM_ABA_P Parameter: Timepoint (hr) Value: 48
  misc_feature: MA Experiment 20000455 PARAMETER Experiment Name: At_100uM_ABA_P Parameter: Tissue Value: Aerial
  misc_feature: MA Experiment 20000455 PARAMETER Experiment Name: At_100uM_ABA_P Parameter: Treatment Value: 100uM ABA vs. No Treatment
  misc_feature: MA Experiment ID: 20000456 Result: Down-regulated in Transcription
  misc_feature: MA Experiment 20000456 PARAMETER Experiment Name: At_100uM_BA_P Parameter: Age (day) Value: 14
  misc_feature: MA Experiment 20000456 PARAMETER Experiment Name: At_100uM_BA_P Parameter: Organism Value: A. thaliana
  misc_feature: MA Experiment 20000456 PARAMETER Experiment Name: At_100uM_BA_P Parameter: Plant Line Value: WS
  misc_feature: MA Experiment 20000456 PARAMETER Experiment Name: At_100uM_BA_P Parameter: Timepoint (hr) Value: 6
  misc_feature: MA Experiment 20000456 PARAMETER Experiment Name: At_100uM_BA_P Parameter: Tissue Value: Aerial
  misc_feature: MA Experiment 20000456 PARAMETER Experiment Name: At_100uM_BA_P Parameter: Treatment Value: 100uM BA vs. No Treatment
  misc_feature: MA Experiment ID: 20000460 Result: Down-regulated in Transcription
  misc_feature: MA Experiment 20000460 PARAMETER Experiment Name: At_10percent_PEG_P Parameter: Age (day) Value: 12
  misc_feature: MA Experiment 20000460 PARAMETER Experiment Name: At_10percent_PEG_P Parameter: Organism Value: A. thaliana
  misc_feature: MA Experiment 20000460 PARAMETER Experiment Name: At_10percent_PEG_P Parameter: Plant Line Value: WS
  misc_feature: MA Experiment 20000460 PARAMETER Experiment Name: At_10percent_PEG_P Parameter: Timepoint (day) Value: 12
  misc_feature: MA Experiment 20000460 PARAMETER Experiment Name: At_10percent_PEG_P Parameter: Tissue Value: Whole Plant
  misc_feature: MA Experiment 20000460 PARAMETER Experiment Name: At_10percent_PEG_P Parameter: Treatment Value: 10percent PEG vs. No Treatment
  misc_feature: MA Experiment ID: 20000527 Result: Down-regulated in Transcription
  misc_feature: MA Experiment 20000527 PARAMETER Experiment Name: At_10percent_PEG_P Parameter: Age (day) Value: 20
  misc_feature: MA Experiment 20000527 PARAMETER Experiment Name: At_10percent_PEG_P Parameter: Organism Value: A. thaliana
  misc_feature: MA Experiment 20000527 PARAMETER Experiment Name: At_10percent_PEG_P Parameter: Plant Line Value: WS
  misc_feature: MA Experiment 20000527 PARAMETER Experiment Name: At_10percent_PEG_P Parameter: Timepoint (day) Value: 20
  misc_feature: MA Experiment 20000527 PARAMETER Experiment Name: At_10percent_PEG_P Parameter: Tissue Value: Whole Plant
  misc_feature: MA Experiment 20000527 PARAMETER Experiment Name: At_10percent_PEG_P Parameter: Treatment Value: 10percent PEG vs. No Treatment
  misc_feature: MA Experiment ID: 20000794 Result: Up-regulated in Transcription
  misc_feature: MA Experiment 20000794 PARAMETER Experiment Name: At_Petals_P Parameter: Age (day) Value: 23-25 days
  misc_feature: MA Experiment 20000794 PARAMETER Experiment Name: At_Petals_P Parameter: Plant Line Value: WS
  misc_feature: MA Experiment 20000794 PARAMETER Experiment Name: At_Petals_P Parameter: Tissue Value: Petals vs. Whole plant
  misc_feature: MA Experiment ID: 20001247 Result: Down-regulated in Transcription
  misc_feature: MA Experiment 20001247 PARAMETER Experiment Name: At_Far-red-induction_P Parameter: Age (day) Value: 7
  misc_feature: MA Experiment 20001247 PARAMETER Experiment Name: At_Far-red-induction_P Parameter: Light Value: Far-red vs. White
  misc_feature: MA Experiment 20001247 PARAMETER Experiment Name: At_Far-red-induction_P Parameter: Organism Value: A. thaliana
  misc_feature: MA Experiment 20001247 PARAMETER Experiment Name: At_Far-red-induction_P Parameter: Plant Line Value: Columbia
  misc_feature: MA Experiment 20001247 PARAMETER Experiment Name: At_Far-red-induction_P Parameter: Timepoint (hr) Value: 1
  misc_feature: MA Experiment 20001247 PARAMETER Experiment Name: At_Far-red-induction_P Parameter: Tissue Value: Whole Plant
  misc_feature: MA Experiment ID: 20001904 Result: Up-regulated in Transcription
  misc_feature: MA Experiment 20001904 PARAMETER Experiment Name: At_Drought_Reproduction_P Parameter: Age (day) Value: 37
  misc_feature: MA Experiment 20001904 PARAMETER Experiment Name: At_Drought_Reproduction_P Parameter: Organism Value: A. thaliana
  misc_feature: MA Experiment 20001904 PARAMETER Experiment Name: At_Drought_Reproduction_P Parameter: Plant Line Value: WS
  misc_feature: MA Experiment 20001904 PARAMETER Experiment Name: At_Drought_Reproduction_P Parameter: Timepoint (day) Value: 7
  misc_feature: MA Experiment 20001904 PARAMETER Experiment Name: At_Drought_Reproduction_P Parameter: Tissue Value: Rosettes
  misc_feature: MA Experiment 20001904 PARAMETER Experiment Name: At_Drought_Reproduction_P Parameter: Treatment Value: Drought vs. No Drought
  misc_feature: MA Experiment ID: 20001905 Result: Up-regulated in Transcription
  misc_feature: MA Experiment 20001905 PARAMETER Experiment Name: At_Drought_Reproduction_P Parameter: Age (day) Value: 40
  misc_feature: MA Experiment 20001905 PARAMETER Experiment Name: At_Drought_Reproduction_P Parameter: Organism Value: A. thaliana
  misc_feature: MA Experiment 20001905 PARAMETER Experiment Name: At_Drought_Reproduction_P Parameter: Plant Line Value: WS
  misc_feature: MA Experiment 20001905 PARAMETER Experiment Name: At_Drought_Reproduction_P Parameter: Timepoint (day) Value: 10
  misc_feature: MA Experiment 20001905 PARAMETER Experiment Name: At_Drought_Reproduction_P Parameter: Tissue Value: Rosettes
  misc_feature: MA Experiment 20001905 PARAMETER Experiment Name: At_Drought_Reproduction_P Parameter: Treatment Value: Drought vs. No Drought
agatagttcgatgaactcattggtttggtatagttggcttggtggaattatcattggaaccatgactggtgctaacatggttttggaagatcattatcgagccggtccacggaatgttgttataaccggaagcactaggggactagggaaagctcttgctagagagtttcttctctctggagacagagtcattgtcacatctcgcagttctgaatctgttgatatgactgtcaaagagctagagcaaaatctcaaagagattatgagtaacgctagcgagtcagctagaaagaaactgagtgatgctaaggtagttggtattgcctgtgatgtttgcaaacccgaagacgttgagaagctgtcgaatttcgctgtaaaagagcttggttccatcaacatatggataaacaatgctggtactaacaaaggttttagaccgctactcgagttcacggaagaagatatcacacagattgtctccacaaatttgattggatcaattctatgtacacgaggggctatagatgtgatgagcagacagcacagtggtggacacatttttaacatggatggtgctggctctggaggttcaagtactcctctcactgccgtatatggttcaacaaaatgtggacttaggcagtttcatgggtctatagtgaaagaaagccaaaaaacaaacgttggccttcacactgcatcccctggcatggttctgacagaacttcttctcagtggttcgagcattaaaaacaagcagatgtttaacataatctgtgagcttcctgagacagtagctagaactttggtaccacgaatgcgagttgtgaaaggttcgggaaaagccgtcaattacctaactcctcctcggatattgttagctattgtcacttcctggctaaggagaggccgatggtttgatgaccaaggacgggcgttatatgcagcagaagcagatagactaaggaactgggcagagaacaggacgaggttgtcgttaacagacgcgatggagatgtatacagagaatacttgggtctctgttttctctctttctgttgtttgcgctttcatcatcttacaaagcacaacacctagctcttttccaggcacataacaaacatcttcctcggatgtgttttaagaaaattgtaaacgtacatgttatgtataaaaaacatatatataacagaaccgatttgttcatgtaaacacttcttatagttgtagaatgtgtcgttgttgaaaacaatgaaaaaatagattgtaataaacttttatcagattgtagtattttcc

SEQ ID NO: 34835 - protein, 371 aa, Arabidopsis thaliana
  peptide (1)..(371): Ceres Seq. ID no. 12338264
  misc_feature (37)..(102): Homolog of NCBI NO: 15672756 NR Description: 3-oxoacyl-acyl carrier protein reductase (EC
  misc_feature (103)..(266): Homolog of NCBI NO: 15672756 NR Description: 3-oxoacyl-acyl carrier protein reductase (EC
  misc_feature (39)..(311): Homolog of NCBI NO: 21673969 NR Description: oxidoreductase, short-chain
  misc_feature (15)..(276): Homolog of NCBI NO: 29244639 NR Description: putative oxidoreductase protein
  misc_feature (36)..(280): Homolog of NCBI NO: 18414726 NR Description: putative protein
  misc_feature (36)..(280): Homolog of NCBI NO: 10178029 NR Description: gene_id:MUG13.25~pir||T07705~similar to unknown
  misc_feature (1)..(44): Homolog of NCBI NO: 34904226 NR Description: P0443E07.30 [Oryza sativa (japonica
  misc_feature (40)..(363): Homolog of NCBI NO: 34904226 NR Description: P0443E07.30 [Oryza sativa (japonica
  misc_feature (1)..(371): Homolog of NCBI NO: 7485669 NR Description: hypothetical protein F17N18.140 - Arabidopsis
  misc_feature (1)..(371): Homolog of NCBI NO: 18413962 NR Description: putative protein
DSSMNSLVWYSWLGGIIIGTMTGANMVLEDHYRAGPRNVVITGSTRGLGKALAREFLLSGDRVIVTSRSSESVDMTVKELEQNLKEIMSNASESARKKLSDAKVVGIACDVCKPEDVEKLSNFAVKELGSINIWINNAGTNKGFRPLLEFTEEDITQIVSTNLIGSILCTRGAIDVMSRQHSGGHIFNMDGAGSGGSSTPLTAVYGSTKCGLRQFHGSIVKESQKTNVGLHTASPGMVLTELLLSGSSIKNKQMFNIICELPETVARTLVPRMRVVKGSGKAVNYLTPPRILLAIVTSWLRRGRWFDDQGRALYAAEADRLRNWAENRTRLSLTDAMEMYTENTWVSVFSLSVVCAFIILQSTTPSSFPGT

SEQ ID NO: 34836 - protein, 368 aa, Arabidopsis thaliana
  peptide (1)..(368): Ceres Seq. ID no. 12338265
  misc_feature (34)..(99): Homolog of NCBI NO: 15672756 NR Description: 3-oxoacyl-acyl carrier protein reductase (EC
  misc_feature (100)..(263): Homolog of NCBI NO: 15672756 NR Description: 3-oxoacyl-acyl carrier protein reductase (EC
  misc_feature (36)..(308): Homolog of NCBI NO: 21673969 NR Description: oxidoreductase, short-chain
  misc_feature (12)..(273): Homolog of NCBI NO: 29244639 NR Description: putative oxidoreductase protein
  misc_feature (33)..(277): Homolog of NCBI NO: 18414726 NR Description: putative protein
  misc_feature (33)..(277): Homolog of NCBI NO: 10178029 NR Description: gene_id:MUG13.25~pir||T07705~similar to unknown
  misc_feature (1)..(41): Homolog of NCBI NO: 34904226 NR Description: P0443E07.30 [Oryza sativa (japonica
  misc_feature (37)..(360): Homolog of NCBI NO: 34904226 NR Description: P0443E07.30 [Oryza sativa (japonica
  misc_feature (1)..(368): Homolog of NCBI NO: 7485669 NR Description: hypothetical protein F17N18.140 - Arabidopsis
  misc_feature (1)..(368): Homolog of NCBI NO: 18413962 NR Description: putative protein
MNSLVWYSWLGGIIIGTMTGANMVLEDHYRAGPRNVVITGSTRGLGKALAREFLLSGDRVIVTSRSSESVDMTVKELEQNLKEIMSNASESARKKLSDAKVVGIACDVCKPEDVEKLSNFAVKELGSINIWINNAGTNKGFRPLLEFTEEDITQIVSTNLIGSILCTRGAIDVMSRQHSGGHIFNMDGAGSGGSSTPLTAVYGSTKCGLRQFHGSIVKESQKTNVGLHTASPGMVLTELLLSGSSIKNKQMFNIICELPETVARTLVPRMRVVKGSGKAVNYLTPPRILLAIVTSWLRRGRWFDDQGRALYAAEADRLRNWAENRTRLSLTDAMEMYTENTWVSVFSLSVVCAFIILQSTTPSSFPGT

SEQ ID NO: 34837 - protein, 351 aa, Arabidopsis thaliana
  peptide (1)..(351): Ceres Seq. ID no. 12338266
  misc_feature (17)..(82): Homolog of NCBI NO: 15672756 NR Description: 3-oxoacyl-acyl carrier protein reductase (EC
  misc_feature (83)..(246): Homolog of NCBI NO: 15672756 NR Description: 3-oxoacyl-acyl carrier protein reductase (EC
  misc_feature (19)..(291): Homolog of NCBI NO: 21673969 NR Description: oxidoreductase, short-chain
  misc_feature (1)..(256): Homolog of NCBI NO: 29244639 NR Description: putative oxidoreductase protein
  misc_feature (16)..(260): Homolog of NCBI NO: 18414726 NR Description: putative protein
  misc_feature (16)..(260): Homolog of NCBI NO: 10178029 NR Description: gene_id:MUG13.25~pir||T07705~similar to unknown
  misc_feature (1)..(24): Homolog of NCBI NO: 34904226 NR Description: P0443E07.30 [Oryza sativa (japonica
  misc_feature (20)..(343): Homolog of NCBI NO: 34904226 NR Description: P0443E07.30 [Oryza sativa (japonica
  misc_feature (1)..(351): Homolog of NCBI NO: 7485669 NR Description: hypothetical protein F17N18.140 - Arabidopsis
  misc_feature (1)..(351): Homolog of NCBI NO: 18413962 NR Description: putative protein
MTGANMVLEDHYRAGPRNVVITGSTRGLGKALAREFLLSGDRVIVTSRSSESVDMTVKELEQNLKEIMSNASESARKKLSDAKVVGIACDVCKPEDVEKLSNFAVKELGSINIWINNAGTNKGFRPLLEFTEEDITQIVSTNLIGSILCTRGAIDVMSRQHSGGHIFNMDGAGSGGSSTPLTAVYGSTKCGLRQFHGSIVKESQKTNVGLHTASPGMVLTELLLSGSSIKNKQMFNIICELPETVARTLVPRMRVVKGSGKAVNYLTPPRILLAIVTSWLRRGRWFDDQGRALYAAEADRLRNWAENRTRLSLTDAMEMYTENTWVSVFSLSVVCAFIILQSTTPSSFPGT

SEQ ID NO: 34838 - DNA, 1293 bp, Arabidopsis thaliana
  misc_feature (1)..(1293): Ceres Seq. ID no. 12333690
  misc_feature: MA Experiment ID: 108461 Result: Down-regulated in Transcription
  misc_feature: MA Experiment 108461 PARAMETER Experiment Name: At_Germinating_Seeds_cDNA_P Parameter: Age (day) Value: 1 vs. 0
  misc_feature: MA Experiment 108461 PARAMETER Experiment Name: At_Germinating_Seeds_cDNA_P Parameter: Tissue Value: Germinating Seeds
  misc_feature: MA Experiment ID: 108561 Result: Down-regulated in Transcription
  misc_feature: MA Experiment 108561 PARAMETER Experiment Name: At_100uM_ABA_cDNA_P Parameter: Timepoint (hr) Value: 6
  misc_feature: MA Experiment 108561 PARAMETER Experiment Name: At_100uM_ABA_cDNA_P Parameter: Tissue Value: Aerial
  misc_feature: MA Experiment 108561 PARAMETER Experiment Name: At_100uM_ABA_cDNA_P Parameter: Treatment Value: 100uM ABA vs. No Treatment
  misc_feature: MA Experiment ID: 108577 Result: Down-regulated in Transcription
  misc_feature: MA Experiment 108577 PARAMETER Experiment Name: At_42deg_Heat_cDNA_P Parameter: Temperature (deg C) Value: 42 vs. 22
  misc_feature: MA Experiment 108577 PARAMETER Experiment Name: At_42deg_Heat_cDNA_P Parameter: Timepoint (hr) Value: 6
  misc_feature: MA Experiment 108577 PARAMETER Experiment Name: At_42deg_Heat_cDNA_P Parameter: Tissue Value: Aerial
  misc_feature: MA Experiment ID: 108595 Result: Down-regulated in Transcription
  misc_feature: MA Experiment 108595 PARAMETER Experiment Name: At_Ler-pi_Ovule_cDNA_P Parameter: Plant Line Value: null
  misc_feature: MA Experiment ID: 20000069 Result: Down-regulated in Transcription
  misc_feature: MA Experiment 20000069 PARAMETER Experiment Name: At_100uM_ABA_Mutants_cDNA_P Parameter: Plant Line Value: CS23
  misc_feature: MA Experiment 20000069 PARAMETER Experiment Name: At_100uM_ABA_Mutants_cDNA_P Parameter: Timepoint (hr) Value: 6
  misc_feature: MA Experiment 20000069 PARAMETER Experiment Name: At_100uM_ABA_Mutants_cDNA_P Parameter: Tissue Value: Aerial
  misc_feature: MA Experiment 20000069 PARAMETER Experiment Name: At_100uM_ABA_Mutants_cDNA_P Parameter: Treatment Value: 100uM ABA vs. No Treatment
  misc_feature: MA Experiment ID: 20000070 Result: Down-regulated in Transcription
  misc_feature: MA Experiment 20000070 PARAMETER Experiment Name: At_100uM_ABA_Mutants_cDNA_P Parameter: Plant Line Value: CS24
  misc_feature: MA Experiment 20000070 PARAMETER Experiment Name: At_100uM_ABA_Mutants_cDNA_P Parameter: Timepoint (hr) Value: 6
  misc_feature: MA Experiment 20000070 PARAMETER Experiment Name: At_100uM_ABA_Mutants_cDNA_P Parameter: Tissue Value: Aerial
  misc_feature: MA Experiment 20000070 PARAMETER Experiment Name: At_100uM_ABA_Mutants_cDNA_P Parameter: Treatment Value: 100uM ABA vs. No Treatment
  misc_feature: MA Experiment ID: 20000071 Result: Down-regulated in Transcription
  misc_feature: MA Experiment 20000071 PARAMETER Experiment Name: At_100uM_ABA_Mutants_cDNA_P Parameter: Plant Line Value: CS8104
  misc_feature: MA Experiment 20000071 PARAMETER Experiment Name: At_100uM_ABA_Mutants_cDNA_P Parameter: Timepoint (hr) Value: 6
  misc_feature: MA Experiment 20000071 PARAMETER Experiment Name: At_100uM_ABA_Mutants_cDNA_P Parameter: Tissue Value: Aerial
  misc_feature: MA Experiment 20000071 PARAMETER Experiment Name: At_100uM_ABA_Mutants_cDNA_P Parameter: Treatment Value: 100uM ABA vs. No Treatment
  misc_feature: MA Experiment ID: 20000072 Result: Down-regulated in Transcription
  misc_feature: MA Experiment 20000072 PARAMETER Experiment Name: At_100uM_ABA_Mutants_cDNA_P Parameter: Plant Line Value: CS8105
  misc_feature: MA Experiment 20000072 PARAMETER Experiment Name: At_100uM_ABA_Mutants_cDNA_P Parameter: Timepoint (hr) Value: 6
  misc_feature: MA Experiment 20000072 PARAMETER Experiment Name: At_100uM_ABA_Mutants_cDNA_P Parameter: Tissue Value: Aerial
  misc_feature: MA Experiment 20000072 PARAMETER Experiment Name: At_100uM_ABA_Mutants_cDNA_P Parameter: Treatment Value: 100uM ABA vs. No Treatment
  misc_feature: MA Experiment ID: 20000086 Result: Down-regulated in Transcription
  misc_feature: MA Experiment 20000086 PARAMETER Experiment Name: At_100uM_ABA_Mutants_cDNA_P Parameter: Plant Line Value: CS22
  misc_feature: MA Experiment 20000086 PARAMETER Experiment Name: At_100uM_ABA_Mutants_cDNA_P Parameter: Timepoint (hr) Value: 6
  misc_feature: MA Experiment 20000086 PARAMETER Experiment Name: At_100uM_ABA_Mutants_cDNA_P Parameter: Tissue Value: Aerial
  misc_feature: MA Experiment 20000086 PARAMETER Experiment Name: At_100uM_ABA_Mutants_cDNA_P Parameter: Treatment Value: 100uM ABA vs. No Treatment
  misc_feature: MA Experiment ID: 20000087 Result: Down-regulated in Transcription
  misc_feature: MA Experiment 20000087 PARAMETER Experiment Name: At_100uM_ABA_Mutants_cDNA_P Parameter: Plant Line Value: WS
  misc_feature: MA Experiment 20000087 PARAMETER Experiment Name: At_100uM_ABA_Mutants_cDNA_P Parameter: Timepoint (hr) Value: 6
  misc_feature: MA Experiment 20000087 PARAMETER Experiment Name: At_100uM_ABA_Mutants_cDNA_P Parameter: Tissue Value: Aerial
  misc_feature: MA Experiment 20000087 PARAMETER Experiment Name: At_100uM_ABA_Mutants_cDNA_P Parameter: Treatment Value: 100uM ABA vs. No Treatment
  misc_feature: MA Experiment ID: 20000088 Result: Down-regulated in Transcription
  misc_feature: MA Experiment 20000088 PARAMETER Experiment Name: At_100uM_ABA_Mutants_cDNA_P Parameter: Plant Line Value: Landsberg
  misc_feature: MA Experiment 20000088 PARAMETER Experiment Name: At_100uM_ABA_Mutants_cDNA_P Parameter: Timepoint (hr) Value: 6
  misc_feature: MA Experiment 20000088 PARAMETER Experiment Name: At_100uM_ABA_Mutants_cDNA_P Parameter: Tissue Value: Aerial
  misc_feature: MA Experiment 20000088 PARAMETER Experiment Name: At_100uM_ABA_Mutants_cDNA_P Parameter: Treatment Value: 100uM ABA vs. No Treatment
  misc_feature: MA Experiment ID: 20000112 Result: Down-regulated in Transcription
  misc_feature: MA Experiment 20000112 PARAMETER Experiment Name: At_42deg_Heat_cDNA_P Parameter: Temperature (deg C) Value: 42 vs. 22
  misc_feature: MA Experiment 20000112 PARAMETER Experiment Name: At_42deg_Heat_cDNA_P Parameter: Timepoint (hr) Value: 2
  misc_feature: MA Experiment 20000112 PARAMETER Experiment Name: At_42deg_Heat_cDNA_P Parameter: Tissue Value: Aerial
  misc_feature: MA Experiment ID: 20000113 Result: Down-regulated in Transcription
  misc_feature: MA Experiment 20000113 PARAMETER Experiment Name: At_42deg_Heat_cDNA_P Parameter: Temperature (deg C) Value: 42 vs. 22
  misc_feature: MA Experiment 20000113 PARAMETER Experiment Name: At_42deg_Heat_cDNA_P Parameter: Timepoint (hr) Value: 8
  misc_feature: MA Experiment 20000113 PARAMETER Experiment Name: At_42deg_Heat_cDNA_P Parameter: Tissue Value: Aerial
  misc_feature: MA Experiment ID: 20000117 Result: Down-regulated in Transcription
  misc_feature: MA Experiment 20000117 PARAMETER Experiment Name: At_100uM_ABA_Mutants_cDNA_P Parameter: Plant Line Value: Columbia
  misc_feature: MA Experiment 20000117 PARAMETER Experiment Name: At_100uM_ABA_Mutants_cDNA_P Parameter: Timepoint (hr) Value: 6
  misc_feature: MA Experiment 20000117 PARAMETER Experiment Name: At_100uM_ABA_Mutants_cDNA_P Parameter: Tissue Value: Aerial
  misc_feature: MA Experiment 20000117 PARAMETER Experiment Name: At_100uM_ABA_Mutants_cDNA_P Parameter: Treatment Value: 100uM ABA vs. No Treatment
  misc_feature: MA Experiment ID: 20000166 Result: Down-regulated in Transcription
  misc_feature: MA Experiment 20000166 PARAMETER Experiment Name: At_100uM_ABA_P Parameter: Age (day) Value: 14
  misc_feature: MA Experiment 20000166 PARAMETER Experiment Name: At_100uM_ABA_P Parameter: Organism Value: A. thaliana
  misc_feature: MA Experiment 20000166 PARAMETER Experiment Name: At_100uM_ABA_P Parameter: Plant Line Value: WS
  misc_feature: MA Experiment 20000166 PARAMETER Experiment Name: At_100uM_ABA_P Parameter: Timepoint (hr) Value: 1
  misc_feature: MA Experiment 20000166 PARAMETER Experiment Name: At_100uM_ABA_P Parameter: Tissue Value: Aerial
  misc_feature: MA Experiment 20000166 PARAMETER Experiment Name: At_100uM_ABA_P Parameter: Treatment Value: 100uM ABA vs. No Treatment
  misc_feature: MA Experiment ID: 20000234 Result: Up-regulated in Transcription
  misc_feature: MA Experiment 20000234 PARAMETER Experiment Name: At_Siliques_P Parameter: Age (day) Value: 21
  misc_feature: MA Experiment 20000234 PARAMETER Experiment Name: At_Siliques_P Parameter: Organism Value: A. thaliana
  misc_feature: MA Experiment 20000234 PARAMETER Experiment Name: At_Siliques_P Parameter: Plant Line Value: WS
  misc_feature: MA Experiment 20000234 PARAMETER Experiment Name: At_Siliques_P Parameter: Tissue Value: Less Than 5mm Siliques vs. Whole Plant
  misc_feature: MA Experiment ID: 20000264 Result: Up-regulated in Transcription
  misc_feature: MA Experiment 20000264 PARAMETER Experiment Name: At_Open_Flower_P Parameter: Age (day) Value: 21
  misc_feature: MA Experiment 20000264 PARAMETER Experiment Name: At_Open_Flower_P Parameter: Plant Line Value: WS
  misc_feature: MA Experiment 20000264 PARAMETER Experiment Name: At_Open_Flower_P Parameter: Tissue Value: Open Flower vs. Whole Plant
  misc_feature: MA Experiment ID: 20000286 Result: Up-regulated in Transcription
  misc_feature: MA Experiment 20000286 PARAMETER Experiment Name: At_Open_Flower_P Parameter: Age (day) Value: 21
  misc_feature: MA Experiment 20000286 PARAMETER Experiment Name: At_Open_Flower_P Parameter: Plant Line Value: WS
  misc_feature: MA Experiment 20000286 PARAMETER Experiment Name: At_Open_Flower_P Parameter: Tissue Value: Half Open vs. Whole Plant
  misc_feature: MA Experiment ID: 20000439 Result: Down-regulated in Transcription
  misc_feature: MA Experiment 20000439 PARAMETER Experiment Name: At_Roots__P Parameter: Age (day) Value: 14 vs. 21
  misc_feature: MA Experiment 20000439 PARAMETER Experiment Name: At_Roots__P Parameter: Organism Value: A. thaliana
  misc_feature: MA Experiment 20000439 PARAMETER Experiment Name: At_Roots__P Parameter: Tissue Value: Roots vs. Whole Plant
  misc_feature: MA Experiment ID: 20000445 Result: Down-regulated in Transcription
  misc_feature: MA Experiment 20000445 PARAMETER Experiment Name: At_100uM_NAA__P Parameter: Age (day) Value: 14
  misc_feature: MA Experiment 20000445 PARAMETER Experiment Name: At_100uM_NAA__P Parameter: Organism Value: A. thaliana
  misc_feature: MA Experiment 20000445 PARAMETER Experiment Name: At_100uM_NAA__P Parameter: Plant Line Value: WS
  misc_feature: MA Experiment 20000445 PARAMETER Experiment Name: At_100uM_NAA__P Parameter: Timepoint (hr) Value: 6
  misc_feature: MA Experiment 20000445 PARAMETER Experiment Name: At_100uM_NAA__P Parameter: Tissue Value: Aerial
  misc_feature: MA Experiment 20000445 PARAMETER Experiment Name: At_100uM_NAA__P Parameter: Treatment Value: 100uM NAA vs. No Treatment
  misc_feature: MA Experiment ID: 20000452 Result: Up-regulated in Transcription
  misc_feature: MA Experiment 20000452 PARAMETER Experiment Name: At_CS6879_Shoots-Roots_P Parameter: Age (day) Value: 14
  misc_feature: MA Experiment 20000452 PARAMETER Experiment Name: At_CS6879_Shoots-Roots_P Parameter: Organism Value: A. thaliana
  misc_feature: MA Experiment 20000452 PARAMETER Experiment Name: At_CS6879_Shoots-Roots_P Parameter: Plant Line Value: CS6879 vs. WS
  misc_feature: MA Experiment 20000452 PARAMETER Experiment Name: At_CS6879_Shoots-Roots_P Parameter: Tissue Value: Shoots
  misc_feature: MA Experiment ID: 20000495 Result: Up-regulated in Transcription
  misc_feature: MA Experiment 20000495 PARAMETER Experiment Name: At_Guard_Cells_P Parameter: Harvest Date Value: 8/2/2002
  misc_feature: MA Experiment 20000495 PARAMETER Experiment Name: At_Guard_Cells_P Parameter: Organism Value: A. thaliana
  misc_feature: MA Experiment 20000495 PARAMETER Experiment Name: At_Guard_Cells_P Parameter: Tissue Value: Guard Cells vs. Leaves
  misc_feature: MA Experiment ID: 20000573 Result: Down-regulated in Transcription
  misc_feature: MA Experiment 20000573 PARAMETER Experiment Name: At_100uM_ABA_Mutants__P Parameter: Organism Value: A. thaliana
  misc_feature: MA Experiment 20000573 PARAMETER Experiment Name: At_100uM_ABA_Mutants__P Parameter: Plant Line Value: CS22 vs. Ler wt
  misc_feature: MA Experiment 20000573 PARAMETER Experiment Name: At_100uM_ABA_Mutants__P Parameter: Timepoint (hr) Value: N/A
  misc_feature: MA Experiment 20000573 PARAMETER Experiment Name: At_100uM_ABA_Mutants__P Parameter: Tissue Value: Whole Plant
  misc_feature: MA Experiment 20000573 PARAMETER Experiment Name: At_100uM_ABA_Mutants__P Parameter: Treatment Value: None
  misc_feature: MA Experiment ID: 20000574 Result: Down-regulated in Transcription
  misc_feature: MA Experiment 20000574 PARAMETER Experiment Name: At_100uM_ABA_Mutants__P Parameter: Organism Value: A. thaliana
  misc_feature: MA Experiment 20000574 PARAMETER Experiment Name: At_100uM_ABA_Mutants__P Parameter: Plant Line Value: CS23 vs. Ler wt
  misc_feature: MA Experiment 20000574 PARAMETER Experiment Name: At_100uM_ABA_Mutants__P Parameter: Timepoint (hr) Value: N/A
  misc_feature: MA Experiment 20000574 PARAMETER Experiment Name: At_100uM_ABA_Mutants__P Parameter: Tissue Value: Whole Plant
  misc_feature: MA Experiment 20000574 PARAMETER Experiment Name: At_100uM_ABA_Mutants__P Parameter: Treatment Value: None
  misc_feature: MA Experiment ID: 20000794 Result: Up-regulated in Transcription
  misc_feature: MA Experiment 20000794 PARAMETER Experiment Name: At_Petals_P Parameter: Age (day) Value: 23-25 days
  misc_feature: MA Experiment 20000794 PARAMETER Experiment Name: At_Petals_P Parameter: Plant Line Value: WS
  misc_feature: MA Experiment 20000794 PARAMETER Experiment Name: At_Petals_P Parameter: Tissue Value: Petals vs. Whole plant
  misc_feature: MA Experiment ID: 20001248 Result: Down-regulated in Transcription
  misc_feature: MA Experiment 20001248 PARAMETER Experiment Name: At_Far-red-induction_P Parameter: Age (day) Value: 7
  misc_feature: MA Experiment 20001248 PARAMETER Experiment Name: At_Far-red-induction_P Parameter: Light Value: Far-red vs. White
  misc_feature: MA Experiment 20001248 PARAMETER Experiment Name: At_Far-red-induction_P Parameter: Organism Value: A. thaliana
  misc_feature: MA Experiment 20001248 PARAMETER Experiment Name: At_Far-red-induction_P Parameter: Plant Line Value: Columbia
  misc_feature: MA Experiment 20001248 PARAMETER Experiment Name: At_Far-red-induction_P Parameter: Timepoint (hr) Value: 4
  misc_feature: MA Experiment 20001248 PARAMETER Experiment Name: At_Far-red-induction_P Parameter: Tissue Value: Whole Plant
  misc_feature: MA Experiment ID: 20001450 Result: Down-regulated in Transcription
  misc_feature: MA Experiment 20001450 PARAMETER Experiment Name: At_Far-red-induction_P Parameter: Age (day) Value: 7
  misc_feature: MA Experiment 20001450 PARAMETER Experiment Name: At_Far-red-induction_P Parameter: Light Value: Far-red vs. White
  misc_feature: MA Experiment 20001450 PARAMETER Experiment Name: At_Far-red-induction_P Parameter: Organism Value: A. thaliana
  misc_feature: MA Experiment 20001450 PARAMETER Experiment Name: At_Far-red-induction_P Parameter: Plant Line Value: Columbia
  misc_feature: MA Experiment 20001450 PARAMETER Experiment Name: At_Far-red-induction_P Parameter: Timepoint (hr) Value: 8
  misc_feature: MA Experiment 20001450 PARAMETER Experiment Name: At_Far-red-induction_P Parameter: Tissue Value: Whole Plant
  misc_feature: MA Experiment ID: 20001557 Result: Up-regulated in Transcription
  misc_feature: MA Experiment 20001557 PARAMETER Experiment Name: At_Drought_Soil_Dry_P Parameter: Age (day) Value: 27
  misc_feature: MA Experiment 20001557 PARAMETER Experiment Name: At_Drought_Soil_Dry_P Parameter: Organism Value: A. thaliana
  misc_feature: MA Experiment 20001557 PARAMETER Experiment Name: At_Drought_Soil_Dry_P Parameter: Plant Line Value: WS
  misc_feature: MA Experiment 20001557 PARAMETER Experiment Name: At_Drought_Soil_Dry_P Parameter: Post Timepoint (hr) Value: 3
  misc_feature: MA Experiment 20001557 PARAMETER Experiment Name: At_Drought_Soil_Dry_P Parameter: Post-Treatment Value: Re-Water vs. No Drought
  misc_feature: MA Experiment 20001557 PARAMETER Experiment Name: At_Drought_Soil_Dry_P Parameter: Timepoint (day) Value: 13
  misc_feature: MA Experiment 20001557 PARAMETER Experiment Name: At_Drought_Soil_Dry_P Parameter: Treatment Value: Drought vs. No Drought
  misc_feature: MA Experiment ID: 20001558 Result: Up-regulated in Transcription
  misc_feature: MA Experiment 20001558 PARAMETER Experiment Name: At_Drought_Soil_Dry_P Parameter: Age (day) Value: 27
  misc_feature: MA Experiment 20001558 PARAMETER Experiment Name: At_Drought_Soil_Dry_P Parameter: Organism Value: A. thaliana
  misc_feature: MA Experiment 20001558 PARAMETER Experiment Name: At_Drought_Soil_Dry_P Parameter: Plant Line Value: WS
  misc_feature: MA Experiment 20001558 PARAMETER Experiment Name: At_Drought_Soil_Dry_P Parameter: Post Timepoint (hr) Value: 6
  misc_feature: MA Experiment 20001558 PARAMETER Experiment Name: At_Drought_Soil_Dry_P Parameter: Post-Treatment Value: Re-Water vs. No Drought
  misc_feature: MA Experiment 20001558 PARAMETER Experiment Name: At_Drought_Soil_Dry_P Parameter: Timepoint (day) Value: 13
  misc_feature: MA Experiment 20001558 PARAMETER Experiment Name: At_Drought_Soil_Dry_P Parameter: Treatment Value: Drought vs. No Drought
aactcattttgacaatttttctttggtccaactcttacatattaacattcaccttcctttttgattttcgtcggttctacatgttaaacccttcaaaaattaaattataataagtatagtgaagaccaataagcagttgcatggaccctgattgattcattaccgctaaaattttgtctgaatccttcttcctatttataccactctcttcttcttctccagtttcatcacaccaaacttctcacatctcctcattctgtattttgacaaaaaaaaaacaccctttgttttttctctcctttgcatgttgtgattgtttttgcttcacaacatgggagttttagtaatctcgcttctcgtggttcatctcctagctttttccgtctgcgttcagggcggctaccgtcgtggcggacaccatcccggcggtcacatgggaccttggatcaacgctcatgccactttttacggcggcggtgatgcttccggcactatgggtggagcatgcgggtacggcaatctgtatagccaaggttatggactggagacggcagcgctgagcacagcgttattcgaccaaggacttagttgtggcgcatgttttgagctgatgtgtgtcaacgatcctcaatggtgcataaaaggccgatccattgtggtcactgccactaacttttgtcctcctggtggtgcatgcgaccctcccaaccaccatttcgatctttctcagccgatctacgagaaaattgctctctacaaatccggtatcattcccgttatgtatagaagggttcggtgcaagagaagtggtgggataaggttcacgatcaacggccactcatactttaacttggtgttggtcacaaacgtgggtggagccggggacgtacactcggtctcaatgaaagggtcgaggacaaaatggcaattaatgtcgagaaattgggggcaaaattggcaaagcaactcttatctcaatggtcaaagtctgtcgtttgttgttaccacaagtgatcgtcgaagtgtcgtctcttttaatgttgcaccacccacttggtcctttggccagacctacaccggagggcagtttcggtattaattatatataatcggttcggtttgttattgtgctttttttttttttttcggttccaagttggggactcttttttggtaaccaattgagattgggactgatagtgatatgtagcgaatatatgtgtgggaacgagaaaaagagaagttttattaattctcgttttataatataagaaaatgaaagtgatgttatgt

SEQ ID NO: 34839 - protein, 255 aa, Arabidopsis thaliana
  peptide (1)..(255): Ceres Seq. ID no. 12333691
  misc_feature (162)..(239): Pfam Name: Pollen allergen Pfam Description: Pollen allergen
  misc_feature (162)..(239): Pfam Name: Pollen allergen Pfam Description: Pollen allergen
  misc_feature (6)..(254): Homolog of NCBI NO: 4138916 NR Description: expansin precursor [Lycopersicon esculentum]
  misc_feature (36)..(254): Homolog of NCBI NO: 20149054 NR Description: putative expansin [Capsicum annuum]
  misc_feature (14)..(254): Homolog of NCBI NO: 29466641 NR Description: expansin [Prunus persica]
  misc_feature (5)..(254): Homolog of NCBI NO: 20502788 NR Description: expansin 13 precursor [Rumex palustris]
  misc_feature (14)..(254): Homolog of NCBI NO: 17484121 NR Description: alpha-expansin [Prunus cerasus]
  misc_feature (6)..(254): Homolog of NCBI NO: 4138916 NR Description: expansin precursor [Lycopersicon esculentum]
  misc_feature (14)..(254): Homolog of NCBI NO: 29466641 NR Description: expansin [Prunus persica]
  misc_feature (14)..(254): Homolog of NCBI NO: 17484121 NR Description: alpha-expansin [Prunus cerasus]
  misc_feature (1)..(255): Homolog of NCBI NO: 15228564 NR Description: expansin (At-EXP5)
  misc_feature (33)..(253): Homolog of NCBI NO: 21314547 NR Description: alpha-expansin precursor [Gossypium hirsutum]
  misc_feature (28)..(255): Homolog of NCBI NO: 11932089 NR Description: expansin [Cicer arietinum]
  misc_feature (33)..(255): Homolog of NCBI NO: 22023949 NR Description: expansin 3 [Malus x domestica]
  misc_feature (6)..(254): Homolog of NCBI NO: 38046730 NR Description: alpha-expansin 3 [Populus tremula x Populus
  misc_feature (5)..(254): Homolog of NCBI NO: 20502788 NR Description: expansin 13 precursor [Rumex palustris]
  misc_feature (36)..(254): Homolog of NCBI NO: 20149054 NR Description: putative expansin [Capsicum annuum]
  misc_feature (6)..(254): Homolog of NCBI NO: 38046730 NR Description: alpha-expansin 3 [Populus tremula x Populus
  misc_feature (33)..(255): Homolog of NCBI NO: 22023949 NR Description: expansin 3 [Malus x domestica]
  misc_feature (28)..(255): Homolog of NCBI NO: 11932089 NR Description: expansin [Cicer arietinum]
  misc_feature (33)..(253): Homolog of NCBI NO: 21314547 NR Description: alpha-expansin precursor [Gossypium hirsutum]
  misc_feature (1)..(255): Homolog of NCBI NO: 15228564 NR Description: expansin (At-EXP5)
MGVLVISLLVVHLLAFSVCVQGGYRRGGHHPGGHMGPWINAHATFYGGGDASGTMGGACGYGNLYSQGYGLETAALSTALFDQGLSCGACFELMCVNDPQWCIKGRSIVVTATNFCPPGGACDPPNHHFDLSQPIYEKIALYKSGIIPVMYRRVRCKRSGGIRFTINGHSYFNLVLVTNVGGAGDVHSVSMKGSRTKWQLMSRNWGQNWQSNSYLNGQSLSFVVTTSDRRSVVSFNVAPPTWSFGQTYTGGQFRY

SEQ ID NO: 34840 - protein, 221 aa, Arabidopsis thaliana
  peptide (1)..(221): Ceres Seq. ID no. 12333692
  misc_feature (128)..(205): Pfam Name: Pollen allergen Pfam Description: Pollen allergen
  misc_feature (128)..(205): Pfam Name: Pollen allergen Pfam Description: Pollen allergen
  misc_feature (1)..(220): Homolog of NCBI NO: 4138916 NR Description: expansin precursor [Lycopersicon esculentum]
  misc_feature (2)..(220): Homolog of NCBI NO: 20149054 NR Description: putative expansin [Capsicum annuum]
  misc_feature (1)..(220): Homolog of NCBI NO: 29466641 NR Description: expansin [Prunus persica]
  misc_feature (1)..(220): Homolog of NCBI NO: 20502788 NR Description: expansin 13 precursor [Rumex palustris]
  misc_feature (1)..(220): Homolog of NCBI NO: 17484121 NR Description: alpha-expansin [Prunus cerasus]
  misc_feature (1)..(220): Homolog of NCBI NO: 4138916 NR Description: expansin precursor [Lycopersicon esculentum]
  misc_feature (1)..(220): Homolog of NCBI NO: 29466641 NR Description: expansin [Prunus persica]
  misc_feature (1)..(220): Homolog of NCBI NO: 17484121 NR Description: alpha-expansin [Prunus cerasus]
  misc_feature (1)..(221): Homolog of NCBI NO: 15228564 NR Description: expansin (At-EXP5)
  misc_feature (1)..(219): Homolog of NCBI NO: 21314547 NR Description: alpha-expansin precursor [Gossypium hirsutum]
  misc_feature (1)..(221): Homolog of NCBI NO: 11932089 NR Description: expansin [Cicer arietinum]
  misc_feature (1)..(221): Homolog of NCBI NO: 22023949 NR Description: expansin 3 [Malus x domestica]
  misc_feature (1)..(220): Homolog of NCBI NO: 38046730 NR Description: alpha-expansin 3 [Populus tremula x Populus
  misc_feature (1)..(220): Homolog of NCBI NO: 20502788 NR Description: expansin 13 precursor [Rumex palustris]
  misc_feature (2)..(220): Homolog of NCBI NO: 20149054 NR Description: putative expansin [Capsicum annuum]
  misc_feature (1)..(220): Homolog of NCBI NO: 38046730 NR Description: alpha-expansin 3 [Populus tremula x Populus
  misc_feature (1)..(221): Homolog of NCBI NO: 22023949 NR Description: expansin 3 [Malus x domestica]
  misc_feature (1)..(221): Homolog of NCBI NO: 11932089 NR Description: expansin [Cicer arietinum]
  misc_feature (1)..(219): Homolog of NCBI NO: 21314547 NR Description: alpha-expansin precursor [Gossypium hirsutum]
  misc_feature (1)..(221): Homolog of NCBI NO: 15228564 NR Description: expansin (At-EXP5)
MGPWINAHATFYGGGDASGTMGGACGYGNLYSQGYGLETAALSTALFDQGLSCGACFELMCVNDPQWCIKGRSIVVTATNFCPPGGACDPPNHHFDLSQPIYEKIALYKSGIIPVMYRRVRCKRSGGIRFTINGHSYFNLVLVTNVGGAGDVHSVSMKGSRTKWQLMSRNWGQNWQSNSYLNGQSLSFVVTTSDRRSVVSFNVAPPTWSFGQTYTGGQFRY

SEQ ID NO: 34841 - protein, 201 aa, Arabidopsis thaliana
  peptide (1)..(201): Ceres Seq. ID no. 12333693
  misc_feature (108)..(185): Pfam Name: Pollen allergen Pfam Description: Pollen allergen
  misc_feature (108)..(185): Pfam Name: Pollen allergen Pfam Description: Pollen allergen
  misc_feature (1)..(200): Homolog of NCBI NO: 4138916 NR Description: expansin precursor [Lycopersicon esculentum]
  misc_feature (1)..(200): Homolog of NCBI NO: 20149054 NR Description: putative expansin [Capsicum annuum]
  misc_feature (1)..(200): Homolog of NCBI NO: 29466641 NR Description: expansin [Prunus persica]
  misc_feature (1)..(200): Homolog of NCBI NO: 20502788 NR Description: expansin 13 precursor [Rumex palustris]
  misc_feature (1)..(200): Homolog of NCBI NO: 17484121 NR Description: alpha-expansin [Prunus cerasus]
  misc_feature (1)..(200): Homolog of NCBI NO: 4138916 NR Description: expansin precursor [Lycopersicon esculentum]
  misc_feature (1)..(200): Homolog of NCBI NO: 29466641 NR Description: expansin [Prunus persica]
  misc_feature (1)..(200): Homolog of NCBI NO: 17484121 NR Description: alpha-expansin [Prunus cerasus]
  misc_feature (1)..(201): Homolog of NCBI NO: 15228564 NR Description: expansin (At-EXP5)
  misc_feature (1)..(199): Homolog of NCBI NO: 21314547 NR Description: alpha-expansin precursor [Gossypium hirsutum]
  misc_feature (1)..(201): Homolog of NCBI NO: 11932089 NR Description: expansin [Cicer arietinum]
  misc_feature (1)..(201): Homolog of NCBI NO: 22023949 NR Description: expansin 3 [Malus x domestica]
  misc_feature (1)..(200): Homolog of NCBI NO: 38046730 NR Description: alpha-expansin 3 [Populus tremula x Populus
  misc_feature (1)..(200): Homolog of NCBI NO: 20502788 NR Description: expansin 13 precursor [Rumex palustris]
  misc_feature (1)..(200): Homolog of NCBI NO: 20149054 NR Description: putative expansin [Capsicum annuum]
  misc_feature (1)..(200): Homolog of NCBI NO: 38046730 NR Description: alpha-expansin 3 [Populus tremula x Populus
  misc_feature (1)..(201): Homolog of NCBI NO: 22023949 NR Description: expansin 3 [Malus x domestica]
  misc_feature (1)..(201): Homolog of NCBI NO: 11932089 NR Description: expansin [Cicer arietinum]
  misc_feature (1)..(199): Homolog of NCBI NO: 21314547 NR Description: alpha-expansin precursor [Gossypium hirsutum]
  misc_feature (1)..(201): Homolog of NCBI NO: 15228564 NR Description: expansin (At-EXP5)
MGGACGYGNLYSQGYGLETAALSTALFDQGLSCGACFELMCVNDPQWCIKGRSIVVTATNFCPPGGACDPPNHHFDLSQPIYEKIALYKSGIIPVMYRRVRCKRSGGIRFTINGHSYFNLVLVTNVGGAGDVHSVSMKGSRTKWQLMSRNWGQNWQSNSYLNGQSLSFVVTTSDRRSVVSFNVAPPTWSFGQTYTGGQFRY

SEQ ID NO: 34842 - DNA, 1936 bp, Arabidopsis thaliana
  misc_feature (1)..(1936): Ceres Seq. ID no. 12396221
  misc_feature: MA Experiment ID: 108462 Result: Down-regulated in Transcription
  misc_feature: MA Experiment 108462 PARAMETER Experiment Name: At_Germinating_Seeds_cDNA_P Parameter: Age (day) Value: 2 vs. 0
  misc_feature: MA Experiment 108462 PARAMETER Experiment Name: At_Germinating_Seeds_cDNA_P Parameter: Tissue Value: Germinating Seeds
  misc_feature: MA Experiment ID: 108463 Result: Down-regulated in Transcription
  misc_feature: MA Experiment 108463 PARAMETER Experiment Name: At_Germinating_Seeds_cDNA_P Parameter: Age (day) Value: 3 vs. 0
  misc_feature: MA Experiment 108463 PARAMETER Experiment Name: At_Germinating_Seeds_cDNA_P Parameter: Tissue Value: Germinating Seeds
  misc_feature: MA Experiment ID: 108464 Result: Down-regulated in Transcription
  misc_feature: MA Experiment 108464 PARAMETER Experiment Name: At_Germinating_Seeds_cDNA_P Parameter: Age (day) Value: 4 vs. 0
  misc_feature: MA Experiment 108464 PARAMETER Experiment Name: At_Germinating_Seeds_cDNA_P Parameter: Tissue Value: Germinating Seeds
  misc_feature: MA Experiment ID: 108501 Result: Down-regulated in Transcription
  misc_feature: MA Experiment 108501 PARAMETER Experiment Name: At_ap2_floral_buds_cDNA_P Parameter: Plant Line Value: ap2 (Ler.)
  misc_feature: MA Experiment 108501 PARAMETER Experiment Name: At_ap2_floral_buds_cDNA_P Parameter: Tissue Value: Closed Flower
  misc_feature: MA Experiment ID: 108569 Result: Up-regulated in Transcription
  misc_feature: MA Experiment 108569 PARAMETER Experiment Name: At_0.001%_MeJA__cDNA_P Parameter: Timepoint (hr) Value: 6
  misc_feature: MA Experiment 108569 PARAMETER Experiment Name: At_0.001%_MeJA__cDNA_P Parameter: Tissue Value: Aerial
  misc_feature: MA Experiment 108569 PARAMETER Experiment Name: At_0.001%_MeJA__cDNA_P Parameter: Treatment Value: 0.001% MeJA vs. No Treatment
  misc_feature: MA Experiment ID: 108573 Result: Up-regulated in Transcription
  misc_feature: MA Experiment 108573 PARAMETER Experiment Name: At_Drought_cDNA_P Parameter: Timepoint (hr) Value: 6
  misc_feature: MA Experiment 108573 PARAMETER Experiment Name: At_Drought_cDNA_P Parameter: Tissue Value: Aerial
  misc_feature: MA Experiment 108573 PARAMETER Experiment Name: At_Drought_cDNA_P Parameter: Treatment Value: Drought vs. No Drought
gaagtatagtttctgtaacaacaatggccaaaaccagagggtcttgttgtctcgtcaacgctctaatcgctatagcttttttggcgacagcccatttgtgtgaagctggcttgtctcagaaagaacaggacaaggtctcgaaattgcctggtcagaattttaatgttagttttgctcactactctgggtttgttgctactaatgagcaattgggaagagctctcttttactggttatttgaagccgttgaagatgctaagtctaagcctcttgttctctggctcaatggaggaccaggatgttcatctgttgcatatggtgaagcagaagagataggaccatttcacattaaggcagatgggaagactctttaccttaatcaatattcttggaaccaagctgcaaatattttgttccttgatgcacctgttggagttggttattcatactcaaacacctcgtctgatttgaagagcaatggtgataaaagaactgccgaagattcactgaaatttctgctgaaatgggttgagcggtttccggaatacaaaggaagggacttttatatagtaggggagagctatgcaggacattacattcctcagctgagtgaagccattgtaaaacataaccaaggttctgacaaaaacagtataaatctgaagggttacatggtaggaaatgggctgatggacgatttccatgacaggcttggtcttttccaatatatttggtcgttgggttttatatctgaccaaacatacagcttactgcaacttcaatgcggtttcgaatcgtttattcactcctccaaacagtgtaacaagattctggagatagcggacaaagaaataggtaacatagaccaatacagtgtcttcaccccagcttgtgttgccaatgcttcccagtcaaatatgttgctaaagaaaagacctatgactagccgcgtgagcgaacagtatgatccttgtacggagaaacacactacagtttatttcaatcttccagaggttcaaaaagccctccatgtcccaccaggacttgcaccatcaaaatgggatacttgcagtgatgtcgtgagtgaacactggaatgactctccttcctcggttctaaacatttaccacgagcttatagctgctgggcttcgtatctgggttttcagtggggacgcagatgccgttgtaccagtcacatcaacccggtacagtatcgatgcactaaaccttcgtcctttgagtgcctatggtccttggtacttagatggacaggtgggagggtggagtcagcagtatgctggtctgaactttgtgacagtgagaggtgcaggccatgaagttcctttgcacagaccgaagcaagctcttgcgctcttcaaggcttttatatctggaactccattgtccacacatgagaacagcatcagccgcgacatgtctgaactcgttagtgactcataatgagttctgatttgatgtaatgtgtgatttggattctcaatcaaaaactttccacataggccgttgaaataagaagagggaaagagaataaatcagtgttttaagtgatacgttcaatgcttcttcttcttctggttgtttgtttgtttggataaacatttgctgcttggaatctaataaaagaagtttctaccatttgtcagccatacgatccttgaataacaacaacatattcttgtgtaatgagaaagtgaagtctgatctgtgatgtataggactgggtattaatctggtaacggatataatactggggtagaaaatagaatttagactagtattgggggtctaaacgaaattatacagaagcattgggcttgacttggcccatgagacctaagcccatattttaaagaattaggggtttcttcttcctttgtctgttcaaattgaagaaacctgtttttttttatttc

SEQ ID NO: 34843 - protein, 486 aa, Arabidopsis thaliana
  peptide (1)..(486): Ceres Seq. ID no. 12396222
  misc_feature (49)..(465): Pfam Name: Serine carboxypeptidase Pfam Description: Serine carboxypeptidase
  misc_feature (21)..(476): Homolog of NCBI NO: 7428204 NR Description: carboxypeptidase D (EC 3.4.16.6) precursor -
  misc_feature (20)..(470): Homolog of NCBI NO: 34908012 NR Description: putative carboxypeptidase D
  misc_feature (21)..(468): Homolog of NCBI NO: 15231911 NR Description: putative serine carboxypeptidase II; protein id:
  misc_feature (34)..(472): Homolog of NCBI NO: 34895992 NR Description: putative carboxypeptidase D
  misc_feature (21)..(468): Homolog of NCBI NO: 15227493 NR Description: putative serine carboxypeptidase II
  misc_feature (226)..(344): Homolog of NCBI NO: 25289792 NR Description: SERINE CARBOXYPEPTIDASE II-like protein
  misc_feature (45)..(468): Homolog of NCBI NO: 2493494 NR Description: Serine carboxypeptidase II-2 precursor (CP-MII.2)
  misc_feature (319)..(486): Homolog of NCBI NO: 25289792 NR Description: SERINE CARBOXYPEPTIDASE II-like protein
  misc_feature (8)..(197): Homolog of NCBI NO: 25289792 NR Description: SERINE CARBOXYPEPTIDASE II-like protein
  misc_feature (8)..(486): Homolog of NCBI NO: 18417667 NR Description: SERINE CARBOXYPEPTIDASE II - like protein
SIVSVTTMAKTRGSCCLVNALIAIAFLATAHLCEAGLSQKEQDKVSKLPGQNFNVSFAHYSGFVATNEQLGRALFYWLFEAVEDAKSKPLVLWLNGGPGCSSVAYGEAEEIGPFHIKADGKTLYLNQYSWNQAANILFLDAPVGVGYSYSNTSSDLKSNGDKRTAEDSLKFLLKWVERFPEYKGRDFYIVGESYAGHYIPQLSEAIVKHNQGSDKNSINLKGYMVGNGLMDDFHDRLGLFQYIWSLGFISDQTYSLLQLQCGFESFIHSSKQCNKILEIADKEIGNIDQYSVFTPACVANASQSNMLLKKRPMTSRVSEQYDPCTEKHTTVYFNLPEVQKALHVPPGLAPSKWDTCSDVVSEHWNDSPSSVLNIYHELIAAGLRIWVFSGDADAVVPVTSTRYSIDALNLRPLSAYGPWYLDGQVGGWSQQYAGLNFVTVRGAGHEVPLHRPKQALALFKAFISGTPLSTHENSISRDMSELVSDS

SEQ ID NO: 34844 - protein, 479 aa, Arabidopsis thaliana
  peptide (1)..(479): Ceres Seq. ID no. 12396223
  misc_feature (42)..(458): Pfam Name: Serine carboxypeptidase Pfam Description: Serine carboxypeptidase
  misc_feature (14)..(469): Homolog of NCBI NO: 7428204 NR Description: carboxypeptidase D (EC 3.4.16.6) precursor -
  misc_feature (13)..(463): Homolog of NCBI NO: 34908012 NR Description: putative carboxypeptidase D
  misc_feature (14)..(461): Homolog of NCBI NO: 15231911 NR Description: putative serine carboxypeptidase II; protein id:
  misc_feature (27)..(465): Homolog of NCBI NO: 34895992 NR Description: putative carboxypeptidase D
  misc_feature (14)..(461): Homolog of NCBI NO: 15227493 NR Description: putative serine carboxypeptidase II
  misc_feature (219)..(337): Homolog of NCBI NO: 25289792 NR Description: SERINE CARBOXYPEPTIDASE II-like protein
  misc_feature (38)..(461): Homolog of NCBI NO: 2493494 NR Description: Serine carboxypeptidase II-2 precursor (CP-MII.2)
  misc_feature (312)..(479): Homolog of NCBI NO: 25289792 NR Description: SERINE CARBOXYPEPTIDASE II-like protein
  misc_feature (1)..(190): Homolog of NCBI NO: 25289792 NR Description: SERINE CARBOXYPEPTIDASE II-like protein
  misc_feature (1)..(479): Homolog of NCBI NO: 18417667 NR Description: SERINE CARBOXYPEPTIDASE II - like protein
MAKTRGSCCLVNALIAIAFLATAHLCEAGLSQKEQDKVSKLPGQNFNVSFAHYSGFVATNEQLGRALFYWLFEAVEDAKSKPLVLWLNGGPGCSSVAYGEAEEIGPFHIKADGKTLYLNQYSWNQAANILFLDAPVGVGYSYSNTSSDLKSNGDKRTAEDSLKFLLKWVERFPEYKGRDFYIVGESYAGHYIPQLSEAIVKHNQGSDKNSINLKGYMVGNGLMDDFHDRLGLFQYIWSLGFISDQTYSLLQLQCGFESFIHSSKQCNKILEIADKEIGNIDQYSVFTPACVANASQSNMLLKKRPMTSRVSEQYDPCTEKHTTVYFNLPEVQKALHVPPGLAPSKWDTCSDVVSEHWNDSPSSVLNIYHELIAAGLRIWVFSGDADAVVPVTSTRYSIDALNLRPLSAYGPWYLDGQVGGWSQQYAGLNFVTVRGAGHEVPLHRPKQALALFKAFISGTPLSTHENSISRDMSELVSDS

SEQ ID NO: 34845 - protein, 263 aa, Arabidopsis thaliana
  peptide (1)..(263): Ceres Seq. ID no. 12396224
  misc_feature (1)..(242): Pfam Name: Serine carboxypeptidase Pfam Description: Serine carboxypeptidase
  misc_feature (1)..(253): Homolog of NCBI NO: 20455471 NR Description: Serine carboxypeptidase II precursor
  misc_feature (1)..(253): Homolog of NCBI NO: 7428204 NR Description: carboxypeptidase D (EC 3.4.16.6) precursor -
  misc_feature (1)..(247): Homolog of NCBI NO: 34908012 NR Description: putative carboxypeptidase D
  misc_feature (1)..(245): Homolog of NCBI NO: 15231911 NR Description: putative serine carboxypeptidase II; protein id:
  misc_feature (1)..(249): Homolog of NCBI NO: 34895992 NR Description: putative carboxypeptidase D
  misc_feature (1)..(245): Homolog of NCBI NO: 15227493 NR Description: putative serine carboxypeptidase II
  misc_feature (3)..(121): Homolog of NCBI NO: 25289792 NR Description: SERINE CARBOXYPEPTIDASE II-like protein
  misc_feature (1)..(245): Homolog of NCBI NO: 2493494 NR Description: Serine carboxypeptidase II-2 precursor (CP-MII.2)
  misc_feature (96)..(263): Homolog of NCBI NO: 25289792 NR Description: SERINE CARBOXYPEPTIDASE II-like protein
  misc_feature (1)..(263): Homolog of NCBI NO: 18417667 NR Description: SERINE CARBOXYPEPTIDASE II - like protein
MVGNGLMDDFHDRLGLFQYIWSLGFISDQTYSLLQLQCGFESFIHSSKQCNKILEIADKEIGNIDQYSVFTPACVANASQSNMLLKKRPMTSRVSEQYDPCTEKHTTVYFNLPEVQKALHVPPGLAPSKWDTCSDVVSEHWNDSPSSVLNIYHELIAAGLRIWVFSGDADAVVPVTSTRYSIDALNLRPLSAYGPWYLDGQVGGWSQQYAGLNFVTVRGAGHEVPLHRPKQALALFKAFISGTPLSTHENSISRDMSELVSDS

SEQ ID NO: 34846 - DNA, 1401 bp, Arabidopsis thaliana
  misc_feature (1)..(1401): Ceres Seq. ID no. 13494240
  misc_feature: MA Experiment ID: 20000169 Result: Up-regulated in Transcription
  misc_feature: MA Experiment 20000169 PARAMETER Experiment Name: At_100uM_ABA_P Parameter: Age (day) Value: 14
  misc_feature: MA Experiment 20000169 PARAMETER Experiment Name: At_100uM_ABA_P Parameter: Organism Value: A. thaliana
  misc_feature: MA Experiment 20000169 PARAMETER Experiment Name: At_100uM_ABA_P Parameter: Plant Line Value: WS
  misc_feature: MA Experiment 20000169 PARAMETER Experiment Name: At_100uM_ABA_P Parameter: Timepoint (hr) Value: 6
  misc_feature: MA Experiment 20000169 PARAMETER Experiment Name: At_100uM_ABA_P Parameter: Tissue Value: Aerial
  misc_feature: MA Experiment 20000169 PARAMETER Experiment Name: At_100uM_ABA_P Parameter: Treatment Value: 100uM ABA vs. No Treatment
  misc_feature: MA Experiment ID: 20000179 Result: Up-regulated in Transcription
  misc_feature: MA Experiment 20000179 PARAMETER Experiment Name: At_Germinating_Seeds_P Parameter: Age (hr) Value: 6 vs. 0
  misc_feature: MA Experiment 20000179 PARAMETER Experiment Name: At_Germinating_Seeds_P Parameter: Tissue Value: Germinating Seeds
  misc_feature: MA Experiment ID: 20000180 Result: Up-regulated in Transcription
  misc_feature: MA Experiment 20000180 PARAMETER Experiment Name: At_Germinating_Seeds_P Parameter: Age (hr) Value: 24 vs. 0
  misc_feature: MA Experiment 20000180 PARAMETER Experiment Name: At_Germinating_Seeds_P Parameter: Tissue Value: Germinating Seeds
  misc_feature: MA Experiment ID: 20000182 Result: Up-regulated in Transcription
  misc_feature: MA Experiment 20000182 PARAMETER Experiment Name: At_2mM_SA_P Parameter: Age (day) Value: 14
  misc_feature: MA Experiment 20000182 PARAMETER Experiment Name: At_2mM_SA_P Parameter: Organism Value: A. thaliana
  misc_feature: MA Experiment 20000182 PARAMETER Experiment Name: At_2mM_SA_P Parameter: Plant Line Value: WS
  misc_feature: MA Experiment 20000182 PARAMETER Experiment Name: At_2mM_SA_P Parameter: Timepoint (hr) Value: 6
  misc_feature: MA Experiment 20000182 PARAMETER Experiment Name: At_2mM_SA_P Parameter: Tissue Value: Aerial
  misc_feature: MA Experiment 20000182 PARAMETER Experiment Name: At_2mM_SA_P Parameter: Treatment Value: 2mM SA vs. No Treatment
  misc_feature: MA Experiment ID: 20000234 Result: Down-regulated in Transcription
  misc_feature: MA Experiment 20000234 PARAMETER Experiment Name: At_Siliques_P Parameter: Age (day) Value: 21
  misc_feature: MA Experiment 20000234 PARAMETER Experiment Name: At_Siliques_P Parameter: Organism Value: A. thaliana
  misc_feature: MA Experiment 20000234 PARAMETER Experiment Name: At_Siliques_P Parameter: Plant Line Value: WS
  misc_feature: MA Experiment 20000234 PARAMETER Experiment Name: At_Siliques_P Parameter: Tissue Value: Less Than 5mm Siliques vs. Whole Plant
  misc_feature: MA Experiment ID: 20000286 Result: Down-regulated in Transcription
  misc_feature: MA Experiment 20000286 PARAMETER Experiment Name: At_Open_Flower_P Parameter: Age (day) Value: 21
  misc_feature: MA Experiment 20000286 PARAMETER Experiment Name: At_Open_Flower_P Parameter: Plant Line Value: WS
  misc_feature: MA Experiment 20000286 PARAMETER Experiment Name: At_Open_Flower_P Parameter: Tissue Value: Half Open vs. Whole Plant
  misc_feature: MA Experiment ID: 20000453 Result: Up-regulated in Transcription
  misc_feature: MA Experiment 20000453 PARAMETER Experiment Name: At_100uM_ABA_P Parameter: Age (day) Value: 15
  misc_feature: MA Experiment 20000453 PARAMETER Experiment Name: At_100uM_ABA_P Parameter: Organism Value: A. thaliana
  misc_feature: MA Experiment 20000453 PARAMETER Experiment Name: At_100uM_ABA_P Parameter: Plant Line Value: WS
  misc_feature: MA Experiment 20000453 PARAMETER Experiment Name: At_100uM_ABA_P Parameter: Timepoint (hr) Value: 24
  misc_feature: MA Experiment 20000453 PARAMETER Experiment Name: At_100uM_ABA_P Parameter: Tissue Value: Aerial
  misc_feature: MA Experiment 20000453 PARAMETER Experiment Name: At_100uM_ABA_P Parameter: Treatment Value: 100uM ABA vs. No Treatment
  misc_feature: MA Experiment ID: 20000709 Result: Down-regulated in Transcription
  misc_feature: MA Experiment 20000709 PARAMETER Experiment Name: At_15mM_NH4NO3_L-to-H_P Parameter: Age (hr) Value: 14
  misc_feature: MA Experiment 20000709 PARAMETER Experiment Name: At_15mM_NH4NO3_L-to-H_P Parameter: Organism Value: A. thaliana
  misc_feature: MA Experiment 20000709 PARAMETER Experiment Name: At_15mM_NH4NO3_L-to-H_P Parameter: Plant Line Value: WS
  misc_feature: MA Experiment 20000709 PARAMETER Experiment Name: At_15mM_NH4NO3_L-to-H_P Parameter: Timepoint (hr) Value: 4
  misc_feature: MA Experiment 20000709 PARAMETER Experiment Name: At_15mM_NH4NO3_L-to-H_P Parameter: Tissue Value: Aerial
  misc_feature: MA Experiment 20000709 PARAMETER Experiment Name: At_15mM_NH4NO3_L-to-H_P Parameter: Treatment Value: 15mM NH4NO3 vs. 30mM Mannitol
  misc_feature: MA Experiment ID: 20000794 Result: Up-regulated in Transcription
  misc_feature: MA Experiment 20000794 PARAMETER Experiment Name: At_Petals_P Parameter: Age (day) Value: 23-25 days
  misc_feature: MA Experiment 20000794 PARAMETER Experiment Name: At_Petals_P Parameter: Plant Line Value: WS
  misc_feature: MA Experiment 20000794 PARAMETER Experiment Name: At_Petals_P Parameter: Tissue Value: Petals vs. Whole plant
  misc_feature: MA Experiment ID: 20001554 Result: Up-regulated in Transcription
  misc_feature: MA Experiment 20001554 PARAMETER Experiment Name: At_Drought_Soil_Dry_P Parameter: Age (day) Value: 21
  misc_feature: MA Experiment 20001554 PARAMETER Experiment Name: At_Drought_Soil_Dry_P Parameter: Organism Value: A. thaliana
  misc_feature: MA Experiment 20001554 PARAMETER Experiment Name: At_Drought_Soil_Dry_P Parameter: Plant Line Value: WS
  misc_feature: MA Experiment 20001554 PARAMETER Experiment Name: At_Drought_Soil_Dry_P Parameter: Post Timepoint (hr) Value: None
  misc_feature: MA Experiment 20001554 PARAMETER Experiment Name: At_Drought_Soil_Dry_P Parameter: Post-Treatment Value: None
  misc_feature: MA Experiment 20001554 PARAMETER Experiment Name: At_Drought_Soil_Dry_P Parameter: Timepoint (day) Value: 7
  misc_feature: MA Experiment 20001554 PARAMETER Experiment Name: At_Drought_Soil_Dry_P Parameter: Treatment Value: Drought vs. No Drought
  misc_feature: MA Experiment ID: 20001557 Result: Down-regulated in Transcription
  misc_feature: MA Experiment 20001557 PARAMETER Experiment Name: At_Drought_Soil_Dry_P Parameter: Age (day) Value: 27
  misc_feature: MA Experiment 20001557 PARAMETER Experiment Name: At_Drought_Soil_Dry_P Parameter: Organism Value: A. thaliana
  misc_feature: MA Experiment 20001557 PARAMETER Experiment Name: At_Drought_Soil_Dry_P Parameter: Plant Line Value: WS
  misc_feature: MA Experiment 20001557 PARAMETER Experiment Name: At_Drought_Soil_Dry_P Parameter: Post Timepoint (hr) Value: 3
  misc_feature: MA Experiment 20001557 PARAMETER Experiment Name: At_Drought_Soil_Dry_P Parameter: Post-Treatment Value: Re-Water vs. No Drought
  misc_feature: MA Experiment 20001557 PARAMETER Experiment Name: At_Drought_Soil_Dry_P Parameter: Timepoint (day) Value: 13
  misc_feature: MA Experiment 20001557 PARAMETER Experiment Name: At_Drought_Soil_Dry_P Parameter: Treatment Value: Drought vs. No Drought
  misc_feature: MA Experiment ID: 20001558 Result: Down-regulated in Transcription
  misc_feature: MA Experiment 20001558 PARAMETER Experiment Name: At_Drought_Soil_Dry_P Parameter: Age (day) Value: 27
  misc_feature: MA Experiment 20001558 PARAMETER Experiment Name: At_Drought_Soil_Dry_P Parameter: Organism Value: A. thaliana
  misc_feature: MA Experiment 20001558 PARAMETER Experiment Name: At_Drought_Soil_Dry_P Parameter: Plant Line Value: WS
  misc_feature: MA Experiment 20001558 PARAMETER Experiment Name: At_Drought_Soil_Dry_P Parameter: Post Timepoint (hr) Value: 6
  misc_feature: MA Experiment 20001558 PARAMETER Experiment Name: At_Drought_Soil_Dry_P Parameter: Post-Treatment Value: Re-Water vs. No Drought
  misc_feature: MA Experiment 20001558 PARAMETER Experiment Name: At_Drought_Soil_Dry_P Parameter: Timepoint (day) Value: 13
  misc_feature: MA Experiment 20001558 PARAMETER Experiment Name: At_Drought_Soil_Dry_P Parameter: Treatment Value: Drought vs. No Drought
  misc_feature: MA Experiment ID: 20001560 Result: Down-regulated in Transcription
  misc_feature: MA Experiment 20001560 PARAMETER Experiment Name: At_Drought_Soil_Dry_P Parameter: Age (day) Value: 28
  misc_feature: MA Experiment 20001560 PARAMETER Experiment Name: At_Drought_Soil_Dry_P Parameter: Organism Value: A. thaliana
  misc_feature: MA Experiment 20001560 PARAMETER Experiment Name: At_Drought_Soil_Dry_P Parameter: Plant Line Value: WS
  misc_feature: MA Experiment 20001560 PARAMETER Experiment Name: At_Drought_Soil_Dry_P Parameter: Post Timepoint (hr) Value: None
  misc_feature: MA Experiment 20001560 PARAMETER Experiment Name: At_Drought_Soil_Dry_P Parameter: Post-Treatment Value: None
  misc_feature: MA Experiment 20001560 PARAMETER Experiment Name: At_Drought_Soil_Dry_P Parameter: Timepoint (day) Value: 14
  misc_feature: MA Experiment 20001560 PARAMETER Experiment Name: At_Drought_Soil_Dry_P Parameter: Treatment Value: Drought vs. No Drought
acaatctatcgagctaaaacactgaagcagacattagcgttgagaaaaaaaaaaaaagtaagaacgagagagagaaagccatgtctgcgaaaacaatcctatcatcagtagttttggtggttctcgtcgccgcatcagcagcggctaatatcggattcgatgagtcaaacccgatccgaatggtctccgatggtctccgggaggtagaagaatctgtttcccagatcttaggtcaatctcgtcacgttctctctttcgctcgcttcactcaccgatatggtaaaaagtatcagaacgtggaggagatgaagcttcgattctcgattttcaaggagaatcttgatttgatcagatccaccaacaagaaaggcttatcttacaaactcggtgttaatcaatttgctgatttgacatggcaagagtttcaaaggaccaagcttggtgctgctcagaactgctctgccactttaaagggcagccacaaggtcacagaagcagctcttcctgaaacaaaagactggagagaagatggtatcgttagtccggtcaaagatcagggaggttgtggatcttgctggacattcagcacaactggagctcttgaggcagcttaccatcaggcatttggaaaaggaatatctctctctgagcaacagcttgtggattgtgctggagctttcaataactatggttgcaatggtggccttccttctcaagcctttgaatacataaaatccaacggtggcctcgacacagagaaagcttatccttataccggtaaagatgaaacctgcaaattttcagctgaaaacgttggtgtacaagtcctcaactcagtcaacattactctgggtgctgaagatgaactgaagcatgcggttggattggtacggccagtaagcatagcatttgaggttatacactcgttccggctttacaagagtggagtttacactgatagtcactgtggaagtactccaatggatgtgaaccacgcggttttggccgttggttatggagttgaagacggtgtaccatattggcttattaagaactcatggggagcggattggggcgacaaaggttacttcaagatggagatggggaagaacatgtgtggtattgctacatgtgcatcataccccgttgtggcttgagatgatcagcgaatgtggttggtcaattatcaaattacgaaatgttcacgtatttattggattaagacattacgtaaaagttgggacttgggaatgcatatggtttatgcttgttgtaacataaaaaggtctgttaatatgtacaaaataaagccaaaactatagacgacaaatttataatattttcatgttaaatttatgaacataaattgatttagatcaaagtagtttcgttcttgatccg

SEQ ID NO: 34847 - protein, 358 aa, Arabidopsis thaliana; identical to SEQ ID NO: 21554
  peptide (1)..(358): Ceres Seq. ID no. 13494241
  misc_feature (141)..(356): Pfam Name: Papain family cysteine protease Pfam Description: Papain family cysteine protease
  misc_feature (9)..(358): Homolog of NCBI NO: 14422331 NR Description: early leaf senescence abundant cysteine protease
  misc_feature (9)..(358): Homolog of NCBI NO: 7435779 NR Description: cysteine proteinase (EC 3.4.22.-) - garden pea
  misc_feature (6)..(358): Homolog of NCBI NO: 2677828 NR Description: cysteine protease [Prunus armeniaca]
  misc_feature (6)..(358): Homolog of NCBI NO: 28192371 NR Description: NTCP23-like cysteine proteinase [Nicotiana
  misc_feature (6)..(358): Homolog of NCBI NO: 8347420 NR Description: cysteine protease [Nicotiana tabacum]
  misc_feature (1)..(346): Homolog of NCBI NO: 11265612 NR Description: cysteine proteinase (EC 3.4.22.-) F18N11.70
  misc_feature (1)..(358): Homolog of NCBI NO: 18407961 NR Description: cysteine proteinase AALP, putative [Arabidopsis
  misc_feature (1)..(358): Homolog of NCBI NO: 18141289 NR Description: senescence-associated cysteine protease [Brassica
  misc_feature (1)..(358): Homolog of NCBI NO: 23397070 NR Description: putative cysteine proteinase AALP [Arabidopsis
  misc_feature (1)..(358): Homolog of NCBI NO: 18424347 NR Description: cysteine proteinase AALP [Arabidopsis thaliana]

SEQ ID NO: 34848 - protein, 325 aa, Arabidopsis thaliana; identical to SEQ ID NO: 21555
  peptide (1)..(325): Ceres Seq. ID no. 13494242
  misc_feature (108)..(323): Pfam Name: Papain family cysteine protease Pfam Description: Papain family cysteine protease
  misc_feature (1)..(325): Homolog of NCBI NO: 14422331 NR Description: early leaf senescence abundant cysteine protease
  misc_feature (1)..(325): Homolog of NCBI NO: 7435779 NR Description: cysteine proteinase (EC 3.4.22.-) - garden pea
  misc_feature (1)..(325): Homolog of NCBI NO: 2677828 NR Description: cysteine protease [Prunus armeniaca]
  misc_feature (1)..(325): Homolog of NCBI NO: 28192371 NR Description: NTCP23-like cysteine proteinase [Nicotiana
  misc_feature (1)..(325): Homolog of NCBI NO: 8347420 NR Description: cysteine protease [Nicotiana tabacum]
  misc_feature (1)..(313): Homolog of NCBI NO: 11265612 NR Description: cysteine proteinase (EC 3.4.22.-) F18N11.70
  misc_feature (1)..(325): Homolog of NCBI NO: 18407961 NR Description: cysteine proteinase AALP, putative [Arabidopsis
  misc_feature (1)..(325): Homolog of NCBI NO: 18141289 NR Description: senescence-associated cysteine protease [Brassica
  misc_feature (1)..(325): Homolog of NCBI NO: 23397070 NR Description: putative cysteine proteinase AALP [Arabidopsis
  misc_feature (1)..(325): Homolog of NCBI NO: 18424347 NR Description: cysteine proteinase AALP [Arabidopsis thaliana]

SEQ ID NO: 34849 - protein, 283 aa, Arabidopsis thaliana; identical to SEQ ID NO: 21556
  peptide (1)..(283): Ceres Seq. ID no. 13494243
  misc_feature (66)..(281): Pfam Name: Papain family cysteine protease Pfam Description: Papain family cysteine protease
  misc_feature (1)..(283): Homolog of NCBI NO: 14422331 NR Description: early leaf senescence abundant cysteine protease
  misc_feature (1)..(283): Homolog of NCBI NO: 7435779 NR Description: cysteine proteinase (EC 3.4.22.-) - garden pea
  misc_feature (1)..(283): Homolog of NCBI NO: 2677828 NR Description: cysteine protease [Prunus armeniaca]
  misc_feature (1)..(283): Homolog of NCBI NO: 28192371 NR Description: NTCP23-like cysteine proteinase [Nicotiana
  misc_feature (1)..(283): Homolog of NCBI NO: 8347420 NR Description: cysteine protease [Nicotiana tabacum]
  misc_feature (1)..(271): Homolog of NCBI NO: 11265612 NR Description: cysteine proteinase (EC 3.4.22.-) F18N11.70
  misc_feature (1)..(283): Homolog of NCBI NO: 18407961 NR Description: cysteine proteinase AALP, putative [Arabidopsis
  misc_feature (1)..(283): Homolog of NCBI NO: 18141289 NR Description: senescence-associated cysteine protease [Brassica
  misc_feature (1)..(283): Homolog of NCBI NO: 23397070 NR Description: putative cysteine proteinase AALP [Arabidopsis
  misc_feature (1)..(283): Homolog of NCBI NO: 18424347 NR Description: cysteine proteinase AALP [Arabidopsis thaliana]
